United States Patent Application Publication US 2008/0274467 A1 - sequence listing, part 7

SEQ ID NO: 852 - DNA, 2449 bp, Homo sapiens
caggcttctggccagtcacctgccaataggtacattaaacaccaagttagagaaggttggtttgacttaactccatcccaactcttagaaaaagtgagccaaagtctaggcccagtggatgttggattatcaaagggcagcactcaagttgacctccccatgggacgaagtcataactttgacaatgaaagtgggccttgcgggagggcatctactctgggattcatgacagtctgctatgatgctgttgatgcccctgaactcatcttgttttgtagctcttccatcccagcgaatgctcaaggcatgaacagaacacatgctaggccagccatctgccagccttcactccatccttctgactgctgcctgccgctccatcccgctgcccttttgcatggctgcagagccagcccgcagaccgttccccggtccctctcacccccgccaggccgtcagtctcccacgctgggcccgcgcctgagcgggatcggccccccatccctccgtggcagctgtcggcgctgcagcctgagccgggcggggtcccgctgcactcgtcctggaccttctggctcgacagctgagcccgatgttgtaaatccaacaggaagactggcatttagaagatataactctgcctttaaagtcttcccctttaaggtgggatttagcaggtctcatgaggacctggagattgccgctccaacaagctcccgggtgatgctacccattgcctggttgcactttgagtggcaaagatgcagcagggttcgaagaaaccgtttcagcttctttactttatccctccctggtgccacagcagctgagtgcgcatcaaatctgaagaaaatctacacagtacagacagtacagctctgccagtgcctctctgtgcctctgttccccatcagtgagaggcagtggcgccttccctgcagggttactaaaggtttagaggtcacatggggagagcaggatagtgtggagcgtgaaggcctagcaagtgctttcactttgcatttcatcattacattttccagtgaaatagctgtatccttatacagaggaggcaacgtgggtttcacgggctacatgacctgtgaaggttatgctgagaacctaggtcttaaatccagggaagaggagagtaatgcaaagggtggcgtatggaagatgaaagtccccaaggacagcacgtccacagtttggaaagagttgctgttagcaaccatcggggaacagttcacagactgtgccgcagcagaaaagggatttctagagggaggcatcaggaagcaggaagaattcataggaaaggagcagacaagtaaaccgcagaaagcagatgagcagtcgagaatgcacaatctggctccagttcgtgttggggcagatagcgctgaccactccaaggtccctgaaagcttggcaggaaatgatgaagtaataggagttagtgtcagtgttcgggaccgagaagacgtcgtccaagtctggaatgtaaatgcctctttagtgggtgaagcgactgttttagaaaagatctatgaacttctgccccacataacttttaaagcagtattttataaacagacagaagtggtgctggggtttggagtttgaaaataaccttcctatgacaggaagtgggcttttgctattagttgcccaactcttagaggatcccagcttgtgtctttagacaaaactgacagcctttggaacgatcgcatggtggcgctgccttccagccaacagttctggctcagcagcagaatttatccagctatgtttgtagaatttttttaagatcctactgcattttgctcttaagcttttataaaaatttgacgagaaaatgtaaaaatgatacttggcaataagacatttagttttcatgcacctaataaaaatgtgtcaaagctagatcgctccagatgtgcttaaaatatctcaaatcctaggctctcattggccttataagtgattgggaagaaaaagaataaaataaactcacatataggagatatggaaaatatttcatcaaatattatgcccaaagagagaaaattaggagttgattttttttagcactctgaatatggaacttccttttaaaaatgtaattctacccttcacctttcctacattgtatgtttctgtgagattttactcattacaagtgaaagtagaggactgcctgtgaattgtttacttctgaaaagaatatattgagatcagttaaaattactcaagagtttggtgactcaggattgtaaaaagcctggatctcaacagctgggaggagtcagagggtgaagtgggaaaaaatagggactgagaggcaacgaaaagtccctttgaacctgtggtcatttatagcaattagagtgggttgcccctctacttctcccaagaagaaatcccaaatagattcctttcatgt

SEQ ID NO: 853 - protein, 480 aa, Homo sapiens
MGRSHNFDNESGPCGRASTLGFMTVCYDAVDAPELILFCSSSIPANAQGMNRTHARPAICQPSLHPSDCCLPLHPAALLHGCRDQTVPRSLSPPPGRQSPTLGPRLSGIGPPSLRGSCRRCSLSRAGSRCWGPSGSTAEPDVVNPTGRLAFRRYNSAFKVFPFKVGFSRSHEDLEIAAPTSSRVMLPIAWLHFEWQRCSRVRRNRFSFFTLSLPGATAAECNLKKIYTVQTVQLCQCLSVPLFPISQWRLPCRVTKGLEVTWGEQDSVEREGLASAFTLHFIITFSSEIAVSLYRGGNVGFTGYMTCEGYAENLGLKSREEESNAKGGVWKMKVPKDSTSTVWKELLLATIGEQFTDCAAAEKGFLEGGIRKQEEFIGKEQTSKPQKADEQSRMHNLAPVRVGADSADHSKVPESLAGNDEVIGVSVSVRDREDVVQVWNVNASLVGEATVLEKIYELLPHITFKAVFYKQTEVVLGFGV

SEQ ID NO: 854 - DNA, 2458 bp, Homo sapiens
ctcagccgcgctcgccccgcggtccgcgcgtccgccggccttgcaggcggggcggagaaaattgcgctgcccccggccgccgcgccccccgccggggcccgggagccgccggggtcccgcgccgccgccgctgccgccgcccccgagccgccgctcggcctgcagcagctgtcggcgctgcagcctgagccgggcggggtcccgctgcactcgtcctggaccttctggctcgacagatccctccctggtgccacagcagctgagtgcgcatcaaatctgaagaaaatctacacagtacagacagtacagatattttggagtgtatacaataatatccctcctgtgactagcctgcctttgagatgtagttatcatttaatgagaggagagaggcgaccactttgggaagaggagagtaatgcaaagggtggcgtatggaagatgaaagtccccaaggacagcacgtccacagtttggaaagagttgctgttagcaaccatcggggaacagttcacagactgtgccgcagcagatgatgaagtaataggagttagtgtcagtgttcgggaccgagaagacgtcgtccaagtctggaatgtaaatgcctctttagtgggtgaagcgactgttttagaaaagatctatgaacttctgccccacataacttttaaagcagtattttataaaccccatgaagagcatcatgcttttgaaggtggacgtggaaaacactaattgcactctgtaaagaattctttgtcctttgctgattggttttggaaacggtcttaacaggagggagagtgaagagaagacttgccgaagccgatgctggtcaatttagagtgggtttctgtccttgcagatgggcaattaggactcaaagtggcaggtggggtggggggagattgtgtgggtttctaccgtcacattacttgctttttaaaaaaaacacacacatttttcaaaagggcagtgcactcagaacttcactgtacctgggatttttaattcctcttgcagtgttgaccagcagagagacttgaggctactttaagcctccactatgtgtttgtagataaaattctccattcaaacattttaaaggactttgaacattatctgcttatggaagttgtgcccttcacttggttagtaaccacctcagccataatacttaccatcataggtttcttaaaatgctttttttttttccctaaacttgagtttccttagtgatttcaaaatgaagtataagaatatcagatccagttagcaaaagcctaggacttgtttctccaaacattgtactaacattcaacttgttttaaaattatgactcaagaattttaaaaaattattctggacatgaattaaaacttttttataatataagtatttttctgattgaaaaaaggatataattgacttcactctaattgtcatgtatatttccataagtaaatggattttgaagtatttttattttttgaactttatttaaagcatttgtgatgacatgttcaacttttgcatgtatgtagcctttgaagtaaaaataaataggaatgttaggctcacgttaatatttctagtttctgtttatgatcatggaacatgactagcacacaaagtagatttttgccccagtgaacttctgcaactgtttctgaccctttagaaaataccaactgtgagaaggatttaatttgcctaatgttaaaaacctatcatctaaattactttcagagaggattttgtcagattttggtttggaaattgttttaattgaatatttaatcataatagactttgtatgaactaagctgatttaatcagtttaaaaacctctcattaccttcttagattaaagaagctaatactgttttgagatagaaggaaatattttgtggggcatgtgacttttgtgttaaggcagtttacccatcttggctgatgtggggaaagtgcaaacttccagtagaatcccggtcttttcatccaagtgcttgcaggggcagccttgtagtctgcaaagaaccatgcagaaaccaaagagcttgcttttttgtctttgtaattccttagggtctgtgatatatgccaggaaatctgattgaaactaatatgctttttattctcccattattccctaaattgttatatcacaggcacttgcctacattgggaaagtaaggacaaataatacccatttaaagtaacttgcctatattttgactgtctttcgtaagcacttgctgaactgctgacttaactcagttttaagatttcctctttccccccaacttttccacatttcttaaatgagggtgtaatttactgcaaacatgtacatttaatataatattgctgttagattcgtggtacactttatgaagcaaaaacatgaaaaggaaaccacaactctaataaactttaaattaaagattaagatgac

SEQ ID NO: 855 - protein, 240 aa, Homo sapiens
LSRARPAVRASAGLAGGAEKIALPPAAAPPAGAREPPGSRAAAAAAAPEPPLGLQQLSALQPEPGGVPLHSSWTFWLDRSLPGATAAECNLKKIYTVQTVQIFWSVYNNIPPVTSLPLRCSYHLMRGERRPLWEEESNAKGGVWKMKVPKDSTSTVWKELLLATIGEQFTDCAAADDEVIGVSVSVRDREDVVQVWNVNASLVGEATVLEKIYELLPHITFKAVFYKFEHHAFEGGRGKH

SEQ ID NO: 856 - DNA, 32886 bp, Mus musculus
  misc_feature (1)...(32886): n = A,T,C or G
acgcggggccaggcgggccggtcccgtccgcggggcgggggacaatggaccagttcctggtgcgtcacgagggagttccttaaaggggaagtgagcgggctcccggcggacgcgcggggaggcggtcggctggggacgcgcccggcgcttcaaaataatgcccgcggcggacgcgcgaccatgcaatggcgagcgcttgtcctggggctggtgctgctgcgcctcggcctccacgcggtgctctggttggtcttcgggctggggcccagcatgggcttctaccagcggtttccgctcagcttcggcttccagcgcttgagggaccccgacggctcggggccagttggtccgcccggaggcccggcctggcttcatcggccaaggcgcggaacggaggggcggcttgagaccccgccagagccgggaccgacgccgggaccgggcgtgtgcggcccggcgcactggggctatgccctgggcggcggtggctgcggcccggacgagtacgagcggcgctacagcggcgccttcccgccgcagctgcgtgcccagatgcgcgacctggcgcggggcatgttcgtcttcggctatgacaactacatggcgcacgcctttcctcaggacgagctcaaccccatctactgccgcggccgggggcctgaccgcggagacccgtgagtagcccgcgcgctgccttccgcccctccgggtccctgagaacacaccagggtctttaaggtccgcagtagtccgaggttcctcctctccttaccccagtggactgccatccccttgattctccctgaccctccaaacttcaggacagctgtccttgtcattttctgttgcaaatggggaaactgagtcccagagaccggaagggacaatcacagtatcccttgctccagatagacacatatctaagtgctggttatataggtttcctttggaaaactccgcttcaaaacgaagcctccccactcctgatcagaatgccacacccaaagctttaataaggttaaggagcgggttcctagaaaggggccatctagtgagttggacgcccggattgggatgaggcgttaagtgtttctcctttccaggggccgcagcctagactgaggggagcttgttggcaggaatggtagttgcctggcccagattggcgatctggatacttgaaggatgatttcttaggcgcagagttgactgacaccgtcattgcttggtaccatcgtaaacaccagtggggtgatggtgctgtcagaaggtcagctagtcctcgcagcccactagccacgtatgggaaggtggagttccggggttactcgagtggacttcaaagtccaagacagcaggacacccagccaagttcctcctccctgaagggtgtgcgttgccacagaccaagtcaggctggttggtgactgtcgtgtttccctctccttagatgggagtggagttgttaggttgtttgttgtcttggcattctacatggacacccttggacatctggcatgtgcatttccctttaccttatggaagccaggaaggattcttagtttcaaaaaggaaagctaagggctgatgagatgactcagccagtaagggcccttggcactgtgctcagacgggagtttgattccccaggacccacatggaagaaggagaaagaaccgaagagactcccgcagttgtcctctgacctctactcgcactccgtgactcccccacacagctagctagtactctaaaagtgcaggaagagctataaaaagtgggttggttatctgtagatttgtgtctgaatttgcagcccgatgagctttaagagggagcatctcacacagagggcctgggtcttttcatagttgtagcagactgatgcactatgtatatgtatacgtcagcctttgtatatgttgaaaaacaaaaaacaaaacaacaacaacaaaaccaaagccttcctactttatttcagcagtgtgggggaattgaacacacgaagttctttatagctgagctaaatttcagtctttttttttttcctttttttttcttttttttttggtttttcgagacagggtttctttgtgtagccctggctgccctggaactcactttgtagaccaggctggcctcaaactcagaaatccgcctgcctctgcctcccgagtgctgggattaaaggcgtgagccaccacgcccggcttattttctcccagtttctttgggaggcgggggggggggggcgatagttatgtgaagtaacatcggtcctttttgggattataggaagggaatgagatgtttcactcctaagagacacaggagagactccatacctatggttgttgttttcttcaattccagccttcacccttccctcttctcccctccttttccttcccctcctcttctctcccctttctttatcttgtgagaacaaatttcattaaatctgagaggggaaactgaaaaatcccactagttatttttagtagatcttttctgtcagttcctgtccatatggcagcacatttctctctctctctttctttctttctttctttctttctttctttctttctttctttctttctttcttctttcatgtagctgcaacttaagcatatacctattttggatgtttttaaattattattttacaaagacaatatttttgtttgtgtaccaaaagtcaaccaaaggttgacagttgacaccaagacatagaaaaggtttgaacatctgttaatgaccactcttaacctcccttgaatattttacagggcatttctgggccattcccaactgaaccttgagcacagcatcagctatgttcccgtccattatacctcattgtctttctcttttcttctttttctctggactaggaactgctctgctgatggacgggcttccttggaaagtggctcttccatactctcttctttccttcttccttcggtctgctggtctgttagtctttctgtcttcctttcatgctaaggattgttcctaacgtaaccaggagtgttccattaaaagctccagctgccctaataagccaggcttggccactcatcccaaggtaccaattaaagagacaattactgacacaaggcagagtaaagagtcttaattaacctcctgggaaagaggtacaaatacagggggtcctgctccccttgannnnnnnnnnnnnnnnnnnnaaaaagtgggttggttatctgtagatttgtgtctgaatttgcagcccgatgagctttaagagggagcatctcacacagagggcctgggtcttttcatagttgtagcagactgatgcactatgtatatgtatacgtcagcctttgtatatgttgaaaaacaaaaaacaaaacaacaacaacaaaaccaaagccttcctactttatttcagcagtgtgggtgaattgaacacacgaagttctttatagctgagctaaatttcagtctttttttttttccttttttttctttttttttggtttttcgagacagggtttctttgtgtagccctggctgttctggaactcactttgtagaccaggctggcctcaaactcagaaatctgcctgcctctgcctcccgagtgctgggattaaaggcgtgagccaccacgcccggctaaatttcagtcttttatataaacgtattttctcccagtttctttgggaggcggggggggggggggctatagttatgtgaagtaacatcggtcctttttgggattataggaagggaatgagatgtttcactcctaagagacacaggagagactccatacctatggttgttgttttcttcaattccagccttcacccttcttccctcttctcccctccttttccttcccctcctcttctctcccctttctttatcttgtgagaacaaatttcattaaatctgagaggggaaactgaaaaaatcccactagttatttttagtagatcttttctgtcagttcctgtccatatggcagcacatttctctctctctctctctctctttctttctttctttctttctttctttctttctttctttctttctttctttgtttctttctttgtttctttctttgtttctttctttcttctttcatgtagctgcaacttaagcatatacctattttggatgtttttaaattattattttacaaagacaatatttttgtttgtgtaccaaaagtcaaccaaaggttgacagttgacaccaagacatagaaaaggtttgaacatctgttaatgaccactcttaaccccccttgaatattttacagggcatttctgggccattcccaactgaaccttaagcacagcatcagctatgttcccgtccattatacctcattgtctttctcttttcttctttttctttggactaggaactgctctgctgatggacgggcttccttggaaagtggctcttccatactctcttctttccttcttccttcggtctgctggtctgttagtctttctgtcttcctttcatgctaaggattgttcctaacgtaaccaggagtgttccattaaaagctccagctgccctaataagccaggcttggccactcatcccaaggtaccaattaaagagacaattactgacacaaggcagagtaaagagtcttaattaacctcctgggaagaggtacaaatacaggggtcctgctccccttgagttggggttcagggacctgccatgagccctacgaccaagtagaggaaggattggtgcagagtatgagagattaagaaagctaagcagtttgggtggacttgtggtcttggccattatggtaacagctcaggtcttacaaggtgagcctgttaactaggaatagtgtcactttgttcctagttgtcattgcctaactgaggggccagttcttgtaagatgacttgcttatactgcctcataggtaattgttctcatcctttggagtctaaagtaactacaggttttagacaatgccttcagtttcataggaaggagagagggtagacagggtctcttgaaatgattaccatgtccatgtgtagtggtgggggttggggctctttgacaaaatgaagtgatggtggttgattaaagttgttggtcccactggcatcttgggggatgtaggtttttgtttttgttttttgttttttgttttttttttgagacctatgataatttgtgggttgctttggctgtacactggcagtttgtacaagttgaagtccagtctctgactgggatgatgtctagcactttggggcatttgacttgtggttggcaagcctttgtgagagagcactgggactttgtggccttgactcatgctggccaacaaggaacagaaagcttaacttctttttttttttttttttcctgtccctgttctgtacggtatagttctctcatgctttggtatttttcaaagtgtttcaggcctgtgctttgtcattgtgttgaatacatttcccaaataaaatgtgtgggggaaaaagtcttaaatatttttatttctgataatgagactcgcccattccagattaagtggtctgctactaagctacctttgtcccttttcaaaattagcctttgcaggccggagagatggctcagcagtgaaaagtgcttgtttctccctcttacagagggctggaatttgttttcagtactcagaaccacgcaatacccgacctccaggtctagcctccccgtggatgctcatacacatgtgcacgcatgcacacacatgcacatttatacacacacaaagtaaaatgttattttgaggtctggggatgtatctcagtggtagagtacttgcctagtgtgtaggaggtccttaattcaatactatgctccaaccagtaaaaagtaacaacaataaaaatgttttgaggaagagtcctcaaatcttaggattcttctgccttgacccacaataattacaaggtgcacttttaccatgcccagaaaatgcctttaggatttaaaaaaaaaaaaaatcaaatatgctcattaaggcagggtctcatgtagcacagagtaaataggtagcagagggtgacctctgctgaacagcctgcgttgtatcctcagtgcggtggttacagaagcatgcctggctgtgtcgtttctttagtcacatcctcttgatgcttatcttgatagacacggaccctgtgttgttgagttaacgtgaagtagatggatcttgaaccctataaaaatagccagtctctatctagcttccaagtactgttgggttgtagaatccaaattcaaacctttgagtaaataattgtagatatttctgtgatctcgtggatgacacctgggactgtgcttgatccagctaactccccaaaccatattctcccaacaaaaagaaaatgccaagtgaccagataaaatattggtccccagacatagctagcttaagatagccacttatctaagtgctagttaggtaggtttcccttggaaaacttgtgcttcggaacgaagcctccccaatccctatcaggatgccacactcttagccttgggctggggctgaggtaattgggtaagagggcactatgaaagtgtgaacacttgagttagatttccatagcaagctcctataaatctgggtgtggctactcttttgtaacccaaacactggctagggtagagtcaggaggattgctggggtttgctggatatctggtgagttccaggctctgtgagagacactgtctctagggagtaagatggagagagagacgacagctgaacactcagaatcctactcagacctcttacctgaagaaatgtgaacaccttcacactcatgcaggtgtgtgtgtgtgtgtgtgtgtgtgtgtgtgaggtggcctcctagaatttctcttaaagacatctttcagagtcaggctcaaggcttgcttgagctgtggaaggtcattctcctggttcgctcctttcaggtttgacccctttctggtgagcctccattctggcgttaactttgtttgagaattgagcaccgtgtatatttaccttcctgtcctgtccttctctctggattactaagtccttgagtgtgcaggcactgtttgttgtattatctttctgcccacagagaacagataaagtttctgttacaggttgagtaaatgtagcacttttcccccacaacccctctgcttgattttattagctacagagtcaaagattttcaggcaggcaccatcttctccaccatcttattcttcctctcctccccctccttctccttttttcttcctcttttcctcctcctctccttctcctcttctttcctccttctgttggtttagaggtagtgaggtaggtgacttccaagtgtcgccttggacgattgcaggagtgagttgagcgttcattcacatcaatggctttggaggaagttgagattttaccagctgcttcacaggaccccttgtactcttgatttttgtactgaaagattgacttcctcaagagctgttgggtgagacaggacgacactaagcatgtccaagagcagagctgtgttatctgttggaagggctgacagatggaagcaggacaatgttatgctgttgggtcaggaccaggtgttttattgaatctatttttttccctcattctctactctcttcctcctattttgatgatttctgttattaattttttttctgattcgtggtcttgtgtaatcaaagaacttgatacccttctgcccgagtcttctgagtgctggtattatttggtagaaagatttcaaaatgctcttgtgaacattctagatctctaagtggattttctgactagagtagagctatcacagttattacaaatacattttaaagaaaacctactctgctaacagttgccagtttgttactgactctttggctagtgttcttgaggatttatagttttgaggggaaggtcagtgtgaagcttcaaacccagggtcttaacattcgaggcaagcggtctaccagtggctgtgaacccagctcttcagtagttgagcagtgtcccttctatgtgtggactaagagaaaaagcacagtaaacatggaaaggaacaacatggttgctaacaattgctagtacctaccatgggccctgggcaggcagctgtggagggtgccactttccatagatgaggggataactcaggagaaggcctaatgccaggtgataatggggttcttgttcagccctatcagttgggatgctaagcaaaatggggttttctggtgaggcgagtgtttggagctctctgtttctgagcagcgtaggcctgtagttaaatatttaaacccagccaagtgttcttgaggacttgaatgtgaggctgtctgctttgagtcccctgcaacccttggcagatcctgtgtgcttggccctgcctctgagagacctgaatccataatgctcaccctgagagcacctttggcatcatgtaatttttttttttaagagaatcaagtaaaagaaagaagtgcagttttccagtgatgctgttgggttgctgtgattcctacagaacccgctccgggcacttgttctttgcttcccattgtttgtcttccattaagtgcccagcacacacaaaagagaagcactggaaggtccaaataaaaggggtcagatgcagaagctgtttatgcttgcttcttcatgtaagttccatttcatgccgaatgaagcccgcccaccagggctgtgtgtgtgcgcacacatgcatgccgtggtgctgtgtacaggtgagggtagtgtgtgggagtcagtgctctctttttaccatttgggttctggttctgagagtcagcatcaagggcctttcccagcgagtcatcttagcagccccaggaggccttctagagagatgcagcagaccaggccatccagaactgtggggtgctgcccttaaaagttgttcatagggaggaagtagggcagggaccctgagatgtgccagggcaggtggcatgcagagaaggcggaggacgccagatgtgagtgaggctgtggctagaaatgaaagaagggctttcttactttggtctctagcaaatgagatcattaagtagttgacttatttcttcttttactatcattttgtcttcctttgaagctctgtaacagttttctggctttgtggtaacagggcagcgaacagtcagtgaagtcgggatgtgaacctcagctgcaccgggtcctgttcactgttggcccaaccttcccgggtgcagtggttttcattgcgtcatagtttgagcagtgaagaaataccaggtcatctggcaggatccctctgcagttcctaatgattgtgaaattaagagttgtgaagttagacagggttaaagatctgtctcagagagtgagtggcttgtccatctctggcattcccctgggttttccaactacggctctatccatgtctctgctgtcctgtagctgctcctcctgtgagcacaggcactgctgctcttgagcgaggaggccttatttaccctgccgtctgcccacagctgctttctggatcataggcacagctctagtttctcatgagggtttccttttatggtcgtttttctgtttcactttagatgaagagtgcctttgtttaattttacttctttctttttcagttccaatctgaacatcaatgatgtcctagggaattactctctgactctggttgatgccttggatacattggcagtaagtgtccagccttttcttctttaattaagataagtaagatgcagcgtttggggccctgttgtatttcttcatgtccctaggaatgggagtttggggcagtgctgtactcagaagattttgatgagttatttattttaatggcctttatgggaaggctgtgaggggacatgtgtccttcctttaaaggtagagaagaagaaatgcatggctagcttttagaaaacttttttttttctccccttagctatcctatgccctaacggagtctggagaatttagttactatttagttaaaattaggatccgaaggaggtgtcagatgacctgagatttcatctttgctcaaactctgacagacagtgaaaacttatgtatcctggaaggtggaacaattagatcacagactgtattaactactttcctgttgtgatgaaacaccagggccaagggcaagttcatggagaagagtttattttggcttaacggttccgtagggtagccctcagtggtggaaaggcatggcatggtggctggatcaggaggctcgatgttcagtcatgttttcctccacagactgcaccttctagaggtcccataaggtccccaaacagcaccagcaactggggaccaagtgttccagtacatgagcctacaggcccatttctcattcaaaccactatatgcaccttctagcctctatgtctctctctctcccagaaatcaggtcacaccttcctgccaccttttctctcttggacagagtttaaaaaaacaaaaacaaaacggatactgtacctctcagtggcttctcctcctgcagctagctgcaagataagtttatgctcctcctaagcgcctgtctctgtgcctgtacatagaccagactacgctaaattatgaagtatgaagcttgccccaaaccctaagagcctttaagaatcagcacttgtgcttgttttctgcaacttcatggtccagtctctcctttgaggaccccgtccttctctgcacacgcatctctctctcctaactgcactctcactttaaatcatggctttagctggaaggatctctcctaacggttcattctgaagggtcattttctgttagctcctttttaggaatctgccattcttctctttagcttgtaacacagtacttcaagaacaaaatccggaagatttcagggtcagaagctaccctaaagtgcttctagctactgacttctcaggggtgtctgtgcagggtgccttcctatgcatgtggccgtctctgtagacttctgttatttcctgcttcttggtgttggctgttgtttttgatgaggtctaccaagcttcatcctgcttttacactccttgtccctcatcgacctttggaagctggagaccttgaaacttaaatgcaagacatgtcctgataagccatactgggcgtgtcaggctctcatgtacttcatggcatagcaccacagagcatgggttccaggggatatccccagtgccctgcagtctccttagtaatttcacaaactctcctttgttctctctgagaagtctttaccattagaaagccattaaatcttatatcaagtcctgtatttaataatttttctgactcctttaaatgtcaccaagaaatgtttaaagctgtcaggtaagagttggaattgggtaaggtagctaagtttataccacgcttgtcttgtggtttgctagtagtagagttgcaggacttgggaagagctggaggtaatgttgtatgccttcattttatggatggcagaagaggcctgggccttggttctggtgaggctgctgggtttccttctaggctctagttgcagagcactttcagtttcccagtatttccttctaaagtgattgctgctccattaagtctccaccatcacttctgagaatgtgcccagacaagtaaatgcagcgtaattagtgctaacgctggagctgtgagggggaggctgagtggccggctgttgggaaaggagagtcaggaggtgcgtggtgtgcagcttaagcaagctcagcctccctcctgagcactcctgctcatccattatgtctctaccccttgcttgctaaggacagagatgctatcattcctatttgttgtactctcctccacacctgacagtaagtggtacatagtaggactgcagatttttgtttaagtgaatattttcacttaataaatattttcacaaaattaataacctaattttgtccaaaatctattctaagggtatgcccttgaatagtacagttctcaaacaaactggagaaactctgactgttagagagccacgtcacacaacaacattttattatttaatttttatgttggggtaaagaagggatttaaacaaattaagaacgtttatttagtacttatacatactaaggacacacacatatataccagtaaataaataagtggagaaatggataataacatcaaggagaaatgactcttcagacattcctcctttggggtgtgccttatttcttacaatactgattgctatgtgtttctcaagtcatatttgcttgggtatagagcagactcaaactttctgtttgcaattttcctttttaaaagatcatgcaatcttgttctggttgcatgcaatggtcaggagactcttttcccctaggggttcttgcagcttatctgcaaacgtctgttgaaaatgctaacaaaagagaaacctcaacttaaggaacacgtgagaactgagccaacacactagcatgctcaagaccagctattctactctgaaaaaccgcagaaataggtctgtttcctcacagatggtctccaagaacagcatctggtacacctgcaaggttaatatgatctcagatcaagctggggaaggtgatgaaatctaggcacaccaaagtacaccctgtaaggtgcctcattagatagccagtgagcacaaagtaaccagggctcagaatcgcataggcctgagaaaggctgactggacagaggaggggatctcagaatgttgaaaacgctgaagtacagctccaacctctaattccagcactctggaggctgaggcataaagatggtcaccagttggagactctgcctcaaagaacaaaatactcaccttatgtgtgcagagccccagtccaccaaaagaaacaaacatgcacacatgcctataagcacatcacttcaggctgaggcaagactgctacaatgttaaggccttcctgaactttattgtagagaccctgtctcaaaacttaaataaatagggccaggaagatggctccgtagataaggctacttgctaccaactttgacaacttgaatttgatccctggaacccaaatggtaggagagaaccaactcctacaagctacacaagctgtcctataacctccaccgacaggctgtgtcatgagcacacgcacacatatataagtactaaataaacgttcttaatttgtttaaatcccttctttacctcaacataaaaattaaataataaaatgttgttgtgtgacgtggctctctaacagtcagagtttctccagtttgtttgagaactgtactattcaagggcatacccttagaatagattttggacaaaattaggttattaattttgtgaaaatatttattaagtgaaaatattcgcttaaacaaaaatctgcagtcctactatgtaccacttactgtcaagtgtggaggagagtacaacaaataggaatgatagcatctctgtccttagcaagcaaggggtagagacataatggatgagcaggagtgctcaggagggaggctgagcttgcttaagctgcacatgcacctcctgactctcctttcccacagccggccactcagcctccctcgcagctccagcgttagcactaattacgctgcatttacttgtctgggtttaaaatatggttttaaaatatggttgaaatcagatcatttccatgtcggttaaactatagcatttgtgatggttttgtcctttcagaagggagtaacacactgtggtattgtatctacacatgtcacatagtagccttaatttttaaattggacatagaactgatagtttgtatattttgtttttgtatcttaagtactcatttatttttctgtacatgtgtgtacatgcttgtgtgtgagggcaagcatgtgctacagcattggcgttgagatcagagggcaaactgtgctgtctttctacacgggttcagagacctgcactcaggtcatcagccagacttgcatgacaagcattttacctccagaaccagttcccaaggcctacgtcactgattgatgctgttttattaataccgcttctcagaatcctcacaaatctgtatggaaagcaagatcaactaggtttgcagatgtcttggatttatttaactttctgacttattttctcccattccacaactttttagtaactgtctaccttgtaaataaaggtcagctcagagcttggaggagaggggagtgggaagaccagacatcccagggattggctctgtgcgtgttgttcacacagttgtgccacttggagattggacccttgagagagtggtaggacacaggcttgctgtttgtcctggagtagcatgtgagaaatgacattttggtttctagtcccactgtggcaatgccatgggcagtacagacacatagacatagcagctggctgccgcgtcagtgtcaatttcaggctgctgtaatattttgtgttcctctgtttaaagataatgggaaattcatccgagttccagaaggcagtcaagttagtgatcaacactgtttcatttgacaaagattccacagtccaggtcttcgaagctacgataaggtaaattaacacaggaaatgattggagactttgtgtgtgtgtgtgtgtgtgtgtgtgtgtgtgtaggtaagggatttaattcccctgagggtatttccaccagagtccgcatgggtatggactccacgtgtattatttatgttcattttagtgtagtatttatgggaacttgtcgggtttttttgtttgtttgtttgttttgtttttttttttggttttttgagacggtttctctgtatatccctggctgtcctgaaactcactttgtagaccaggctggactcaaactcagaaatctgcctgcctctgcctcccaagtgctgggattaaaggcgtgcatcaccaccgcccggcgaacttgtagttttgatgtgtatatgacatcacagtttgaaccgcacagaaacacacttacagtgggtacataacagagacacccctcagatgcacttccaccgactccattcatgtcctttctagtttgctcatttactgcctccagaacctcattcatgtttttcatggagttttgcatttctctactcacgaaaatccactgcttgctgtttggatgtcttttcttcttgtatggttttcatttattacccactcgttgctaaatatggtggactcagcctatacccagttttgtgcctgaatttttttagggtgaaatgctgactcttttctgttttactaaattatattatacacagccatccagatccagatttgaaattgaagttatgaagttatttattccaaaacaagaaaaagataaatcgtttgtttgaaaaacgttgccgtcctttttagacaattgcgatgggacatttatatctatacaaggccacaaatctaaaagttacggttcatcagtgtcctggcagtcagtcctgcagaagttacatagttcctcttcttaatgcctaagattaagaagttaaagctttaggtggtatcctcagttgtcttgaatgactgattccccttctttttgtcagcagtgcagtgagctgagaatcagttacttagagccagagagaactgtagcaagatgctgagtcaggtccttctgctccaggcagcttggaccctgaaaaggagagtcaggttttatctttgtaaactggattctgtacacttgtaagaacatgcttttgttgttgttgttgttgttacaattattattatttcctgctcttagggttctgggaagcctcctttctgctcacagaataataactgattccaaacagccctttggtgacatgacaattgaggattatgataatgaattgttgtacatggcccatgacttggctgtgcggctccttccagcctttgaaaacaccaagacagggatcccctatcctcgggtaagtgacaggtttgtttcattgttttgctgtttttgagaactggtcttgtgtcatgtagctcaggctgaccttgaacttgtgtattttttgcctcagacttccaggtgttgcattgcaggcatgagttaccagatctggctgccttgttcctttgtggttcacagttcactgtgttcttgaattaagacttataaaagggatgggcctgggtttaagaagggagctatgtccttggaggggatttggtcctaaacataatgtcatttctaaaaaatctgcattggtgttctgcctgcatgtctgtgtgaggtaattggaattgcagacagttgtgcgctgctttgtgggtagtgggaattgaacccaggtcctctgaaagaacagccagtgttcttaaccacatctctttcaccccataatatcaaattttaaaacttctttcagcatttgctgagtaccttctgtgtggtagacacacactaatagagcaattagccttttgccttgaagaaccatgttcactgttcatgtgtggtttgattttctcttactagacagtatagagaatgtttcttcatttctgacttggatatatttcccaaagatcctcatgtgttggaagagctcagtgaatgttcatttgaatgcttcaaatgcctgtaagtgaagcctgtagaaacagccaattagatgctaaagtgagattgtatatttgtggcatcttatttagcaagccaaatcactcctctgggaattgtgtgaaccttcgtggtaagcagggagaaatgccagaccacaggccctccatgatgtaactggctgtcatactgggctgagctgctgcctctgtcccagtctaccagttgtttgtgtttgctgaggagttgttagacactccttgaagtttagaagccatttatagcttgtaattgtgtgtagcctcatggtagtgttacttctgatgttgtgatgaaacaccaggacccgaagcgatgtgacagaagagtgtattgtagctgatggctccagagcgagagtcggaaatgtcagtgaaggactggcacaggcagcaggagcgggaactgactggtctcatttcacacaggaagcagaaagagtgaacaggaagtagaacgagtgagtgatcaggaagtaggatgaggctataaactctcaaagcccactcactcccattgatgcacttcctccagcaaggttgtatctcttagaggttctctaaacccaggcaacagccccactgttcaaatacatgagcctttgagggacatttgtattcagaacacctttgagcttggtgcttctgtaatcttgaaggatacttggcagaaagagatggtttatgagtaatgtcataataagatgacagactctgttcttactgtgtgtgtgttggttgagtgtgacatgacaagtggtgactgagtcacagtgagcctgggccattagctgagtgtcatactcatggtgtaacttctcagcacggtgaatttttaagttttcctataattttctctctctttctttctttctttttttttttttttttaattgaaatcttgctatgagctgaggctgtccttgaacttgctctgtagtcaggctggcctccaacttatgacccttctgccttggcctctcaagtgctggggtagctgtttaacacccttagggtttccacaccacctttgattcttcccactgcaggtgaatctgaagacaggtgttcctcctgacagcaataatgagacctgcacagcgggggccggttctctcctggtggaatttgggattctgagccgcctgctgggggattccacttttgagtgggttgccagacgagctgtgaaagccctctggaacttgcggagcaacgatacaggattattaggtgggagtccccctctgctgtcagttggttcctacagcctttggtcccctttcctcctccttccttgaagctctgcacagtacttcgtcttccctgaaccactggatctgaaaatccaacagccattggtgcatagtgagttcagcttcttcacatagccttttgcttagtgtgaagttttaggggttgatggaagataataatagttcagctgttaagagcccctcagtttggatcccttggtatattccactggaaattattgttaatagaaatgccataaaaagaactgtctcagaggcaaactttattgctttcaatataaggttctaaaaatacaggaatttaccatttccttaaaaaaaaagaaaaagaaaaaacaatccagtagtgcaagcctagatgaaacatatattagattttttcccccttgagaatatttagtcaagatatttaaaactcattatagaaggttttaagcattagtagtagacataataacaaataatatcctctatgtattcatcatggtgttcatctttggtagctactcatattttggtaactcagtgttgttttaagatgggtttttaacatcataaaattgtcttattgggacatattttctttttggcatctggaagtaacttggttgtttggggaccatattgggttatttataaaaggtttttaaaagtaatttctgtcttctgaaattcatctgcaaactttctacaatgaatagcaacagtacaaataaaacctctcaggctgaatgtggtgacacacctgtgaatatagcactctggaggctgaggcagggcttagggtgagtctgaggctagcctgggctgcagaatgagaccttgtctccacatggttgactgcttagttttcaggaggccctctcagcctgtcatgagttagcttttgtggctttccatattacacactactgatagaaacgatgtttctatgctggatgcacgtggcagagcagtctaatgtttccaggttgttgccttgctttcatagtttccacttttcaaagctatacatttatttttccctataaaagtcttgctttgtagcatgtgacctccactctctgtgcagccccaaatgcccttaacctcctcaccgtgtacacctgtgcactgccatgtctggctattttttgtggtgttagaactcaggtccttgtatgtgttaggcagctcctccaccactgaccttatatccccagtgctgaccttttgcttctgaagcattattttcaggacaaattccaaggaatgagaatacggggtaaaaggctgtgaatattcctttgggttttgaaatgcattaccactgtgggaaagcaaaatgttgagtcatttatttatttattttttcatgtttatcctcatttttcatctgtggctaaatactacttgcatgcagacatgcgcatacacctgactgctatagagtgatcttttcattatccaaggatcaaagaaagtcaaagaaagttaggcttaagtacccatttctcatctctggcagggatggggaagctgcgaagcagcggcacaggagtaggagggccgtgccctaatccttctgccgcggttgagacctaagtgccttgtttgtttgtttgtttgtttctacaggcaatgttgtgaacatccagacaggccattgggttggaaagcagagtggcttgggtgctgggctggattccttctatgagtacctcttgaaatcttacattctttttggagaaaaagaagatctagagatgtttaatgctgcgtatcagagcatccagagctacctgcgaagagggtgtgtgtcccagacattgcttctttgccatacagtgtgtttagaaatgtacctgcccagttctcctttaattttaaaaaaatgatgatgatgatgaattttattgtttttggagaggggtgcatgccatggcacatgtgtggaggtcagagggacagcgtgcagttggagaggggtgcatgccatggcacatgtgtggaggtcggagggacagcgtgcagttggagaggggtgcatgccatggcacatgtgtggaggtcggagggacagcgtgcagttggagaggggtgcatgcaatggcacatgtgtggaggtcagagggacagcgtgcaggagttggttctttcttactgtgttatcgcaggaatggaatccagttgttcattctcgatggcaacctttcttgccaaacgtcttccttgagtttaaaaatgtagggggtggagtgtcactggagaggtctgtctggcctggtattcatttggacccagatcggcagcagttctcttgcctctgcttcccaagtgctggaaccacatctggcagaggcttttgcagaggacccaagtttggcttctaaaacctgtatgtggtggctcacaactgtctataactccaggtccagggtgtctgatgcctccttctggcctgtctcggcatccaaaagtacatacttgaatgtacatgtagacacttacaaatgcacacacacacattaaactcttgcccccacccccccccaaaaaaaaaaaaccaaaaaaaaaaaaaaacaaaacaaaaaccaaaaacctgtgtaaggcttttggctagagctgccctttgcttttctctgtgttctcttccttagtgtgaggcgctggagaataattgttgctacagctctgttgattgtgtgctcagacaaccctcataaactgcaagtgtagattgctatgaattggaatgtcattgctatggagagaatatgctcattttctctgtggcgttgcagtttcaccactttttgctgaagtgtgctctgccttctgagacttgctatcctcctgcctcactcctgagtgtgatgattacaggcattcactactgtgcccagctcacttcagctttacaaaataccgcactaaattgagtagaaagctctcgggtcctgccttgatgcattgatgcatctccacagcccccgcccccttttaaaaattttttttcacaatgctgtgttctctctgtaccagagaagagactctaaacagaataaaacacgtgtgtgtccctacgtgagtcaaggccagcacagaccagttctgctccatgtcactgttctgaaatccaaatgtgaaagtgctttctgtaaatgtagtgaagttttgatagtccacagaggatatgtttagaagtaggttcttgccaggcggtggtggcacacgcctttaatcccagcactcgggaggcagaggcaggcagatttctgagtttgaggccagcctggtctacaaagtgagtcccaggacagccagggctacacagagaaaccttgtcttgaaaaaccaaaaaaaaaaaaaaaagaagtcggttcttgtatagacacctacaggcagtctgactgccaaagacttaagggaggagttgggaaaaagttagtgttgattttgcttcagtgacacacagggaggtagaccaccagagggacagagtgaccttccctttcacctttgcctgcgctctctggatccacagccgggaagcctgcaatgaaggagaaggagacccaccgctctacgtcaacgtgaacatgttcagtgggcagctcatgaacacctggattgactcactgcaggctttcttccctggactgcaggtatctggcaggcttgtgttgagaagggctggggagacagctcagtgggtaagagtgttgctgtgtgaacctgcaggcctgagtttgaatcttcagcacgcacctaaaaggacagtggtggcagcatggccccgtcattccagggctgggggagaggggtaggcagggcacagagatgagaagtttagtgggggttgactgttgctagcctagctccagggagtaagggggagagtgacagagcagcctacctcagccatagggataagcatgagtaaatgcacacgtgtacatatggagcgcgcgcgcacacacacacagaacacacacacacacacacacacacacacggaggggggagggagagggagggagggagagagagattattgggaaagctcctctcttctgttattcttagcattctctggctcctttggatttgggaggttactagcacatcttgatcgctctgtgaaattagtccctagccgtgcaaatctgcttgagagtttagattatttgcctgtattgtctttctaggttctgataggggatgtggaagatgccatctgcctacacgccttctactatgccatatggaagcggtacggggccctccctgagcgctataactggcaactccaggcccctgatgttctcttctaccctctgagaccagagctagtggagtccacatatctcctctaccaggtaatgggcccactgagcaatggcttgctgttgcatggcgactcttcctgtttctgcccttttctgtcttgctagaggtcacttctgttgatgctgtagaatggagaaagtgtctgcaaatatgggctttctttttctttttttttttttttattaggtattttcctcgtttacattttcaatgctatcccaaaagtcccccatacccacccccccaatcccctacccacccactccccctttttggccctggggttcccctgtactggggcatataaagtttgcaagtccattgggcctctctttgcagtgctcaagggaagatgctcttgtgggagctgggtgggggtgcacttttatttttccagttttactttatggtttgcaaaaaaaagtattgaataaaaattccttccttccttcnnnnnnnnnnnnnnnnnnnnnnnnnnnnnnnnnnnnnnnnnnnnnnnnnnnnnnnnnnnnnnnnnnnnnnnnnnnnnnnnnnnnnnnnnnnnnnnnnnnnnnnnnnnnnnnnnnnnnnnnnnnnnnnnnnnnnnnnnnnnnnnnnnnnnnnnnnnnnnnnnnnnnnnnnnnnnnnntttaagcagttactatagtaaaagaggagatgtctctgtgaccgatgaagcctgatacacatcttccacatgctctacacgcatgtgcacactcaaaaactcctcagggtaaacagaggtgtgtatttttattgacaggtgatacttccacacagtccacaagacatacttccccctccccctctcccctccccctctccctctctctgttttggggaaattcaatgaaaccaatgtcagtacttttatctctcaagagatctcacaaggtttagagactcttgaaaaagggaataggtgatgtcaggtatggtttctctgagcctagaataaagccaagctatgtatgctctaaggccatcttacctgctgctctctggcgtgtcatcagtttagccctgctgccatccttgcccgctgtattcttagcatccagaggaatatttcctttacgggtttctcctctggggccatcccaggctctcagtcttaggcagcacacatgctgcttgtttcctttggttgctgtcggttggcagtaggcatgagttagaagcttggggtggaagcctcatcttccagagaatttcctccctgaaaataaccagattgctggtgacagagaagtaaggccctgaggttggatttcctgggtggtcagaagaaagtgttcaggcctcttagagtcctgtcgtctgaaggacagttgccctctctgccctctcagtgcagtaactggatgaggcagtcttactaaccttcttctgcatcttaagtttctagggagctctgaggcaagacagaaactgggcttgttctcggatctgtatggtaccgcagggtggaccctgtttcttttctaaccatgctaagcatccatagagccaaagcagtgctctgccctgttgaagagttcctgaccctgagtacagtgaagcgcatcacaggtgttggtgtagtgaacaccttcatcagatgaagtgggagtgtggctctggtccttctgttagctagggatccagccccttagggagcccctgcaggccccacagtgtgtgttgatgctatctcttccaagcccttcttgagtaacattctcttatgttctgtctaggcaaccaagaatcccttctacctccatgtaggaatggacattctgcagagtcttgaaaaatacacaaaagtcaagtcagtttgctatgttccttattttattgtttggatgtttgtgattgactgagagttattctgtagaaatgttagttttaaaactttaaattaaaaattatgtattttatgtatatgaatgttttatctgcatgtatgtttgtgcaccatgtatgtacctggtgttcttggagaccagaagagggcatcggatcccctgagactggattatagatgcttgtaagttgccatgtgagtgctgggaattgaccccgagtcctctggaagagcagctagtgctcttaacccctaagccatttctttatccctcaagtttgtttttttaatattttaatttatctgggaggatgtgtctatgtagggacttctagttggttgtgagccgccctttgtgggtgctggggaccaaaatggcatcctcagtaaggactctgaatgccctgtgctgagtcatctccagtccctttagtaggatttttaaactacctttatttatgcgtgtgtgcatgcttgtgtatatgtgagaaaaggggttcgtgagtggaggtcagagaacctgcaggaatcttttctctccccacacctgggaagtttattttttatgccagtaattcattaaagcacttaagcagcatagaagatattaagagtgaaatattcttatgattacacctataggttaccatgataaacactgaatgcttagaattaccatgtttagaatcttctcaatatatttgtttcatttatgcatatgttgtgtgtgcatacacacatacacacacacataaacatacctgtattttgattttgtatcctgctgttttatatatacctcagaaatatatgatagaaaaatactgttttaggctatggcaataataatgcagttccacaaatcctggggtgaacagtttaggtcagtccttctaaatgtattgccagtctttttcatgatgctgtgtttcgctccactgacctcatcccaagcttggagctaaccggagatgacgcaatccaagaatgctttcaagtcaatttgcaaacaattcatgttaaaacaaaaagcaaacaaaagccctagcaaagttattttcatgaggtgttggagaagtaagttgattctcttggtagtagactattctgacaggcagagagtgcaggggaggagcctaaagcagggctaactggacccttattctgtagatgtggatatgctacgctgcatcacgtcatagacaagtctaaagaagaccggatggaaagcttctttctcagcgagacttgcaaatacttgtatctggtatgtgtgtcctaagattaaccagaggtatttagtgctcagagagcaaaatcgtctgtacaagaaatacttactacttacttgtctacattgtgctggacagtgtctgttcctggagttacaggccttgtccggacaaaaggatattgctgtcttccttcctggttgtcagcctcctagagaagttgtttgtcatgcaagcagaaatgagcttagggttaggagctgtggaagatgctggtaaggaccgagagaaaaccagctttgctagtgttcctcgggctctctgaggagggaagcagttttgagctcagagcctcgtggaagccaagcagctattttagcactgagcgacctttccaatatgagagtggtgttgatggctccgaggtacagcagagcctcctgatcctcgtacatatcttcagacatgcctgtatatgtgtggggtggggggctgtccacacctaagagaccgtggcttgtatagttacttttcattctaccctcaggggaactacgacttagactgagagctcagccagcttactgtggccctgggtgaccacacggcaggactgagtcttgagccattgccagggctcttgcagcttctgccttctgtcacaaacatgtagtacctgtatgctcatgtctgtaggctcttttctatcatggctacatacaaacaacactttgaaggcacagagggttgattcaagggcagcagcagtactgataggttctgccctttaattcacttgtcctcaggcctggggctagctacgtagcaatgaccctaaacccttgttaacacctcctttacattgagtccagatatttgaaaagaattgggctagaggatttagttttgacagatgcctgtactgattctatatgaagccaagttttggctaagatgatgggttaaagtctatgtccttcccgtctagcatctatatgtatgatctgggggtggatgaggtagagctagttccaggattaggtgtaaggactcagcgggaggttgaaatttttctggggagtacttacagactgtctgtgcttggatcctggatctggggtttttgattctccggttctggagaaggagtaagggttgggactcacctgggcacacaaatttaaacaaaaatagtgcattaccaccctgggctggaaatcagggcttttaactgatgcttttttgtctggttttgttccctagcaggtcagaaccctttgctgtgagctagttcaaaaactactagttaccagttgtaggattgttcttaaagttggtcttagggattgaccccagggcctgcgtgtgctctgtaaggatttagtagagctgtatgccagccctagacctcccctcccctcccnnnnnnnnnnnnnnnnnnnnnnnnnnnnnnnnnnnnnnnnnnnnnnnnnnnnnnnnnnnnnnnnnnnnnnnnnnnnnnnnnnnnnnnnnnnnnnnnnnnnnnnnnnnnnnnnnnnnnnnnnnnnnccttccctcccttcctccttccttccctctctccctccctctctccctctcttctctctttcttcatgcagtggctagcctagaactcattatgtagaccaggctagactcaaactcataaaggtctgcctgccttaacctccctagtgctgggattgaatttatgtgccagtatgcccagccaacatgttttcttattgcttctttttttctatctttagctatttgatgaagagaatccagtacacaaatctggaaccagatacatgtttacaactgagggccatatcatatctgtggacaaacgtcttcgggaattgccttggaaggaattcttctctgaagatggggagcgggaccaagaggaaaagtttgtacacagacctaagtctcaggagctcagagtcattaactccagttctaatgtgagttgctttgtccactgcaggtgggaaaagagaaaatattaactccttcagtagtcaagagttctcacatgaagtaggtggcatactcagattgtaaactttgacaggagttcataaagggaccatttacaaagtgccactaggatgtagagaaattggggagcagcagtataggcacatcagtcttggctgcagaggcaggtagagagtggtccagcatcctggagagaagtgaggccaccagcaggtcccactccttagatctggatccagggacatccagagaggaagccagcagtatcaacactgaatcccttccccatctcttcatctgatgtctctggagtgaggttgtaattgttttattttgatgtgaggttccacatactaatgtagcacactggctttgaactctgtgtagtggtggctagctttgaacccctggttctcctgccactaaatccctagatttacagatatgtgtcaccatgcatcacactctccttgatctcttactggtggtccttggccgtttctgcgagaagccagagggcaaggaagaattgctgtagtccatcagaacacacttgttcaggccagaccaatgggagagggtgaagagagggtccacagagaagaaagacttcagctagactccccaccacgcaccagtagcacagggggagtcactcttttaaattaccttgtccattgtatattgagatatcacatgtagccttcattggcttcagattcactgtgtagttgagtcaggccattcattcaggacattggtagtgtctggagtcgtttttggtacaactggagactggaagttgttgctggccccttaagtggaaaagaccaaggatgttgttctgccaactacactctaatacacagaatagctctccagaacaaagaggcatctgtctgaaatgttgccggctatgggctcacactccctgggtttttaattcaaatctcacatatcttctcccttttgtcttcccagtgtaatcgtgttcctgatgagaggagatactccttgcccttaaagagcatctacatgcgccagatcgaccagatggttggcttgatttgacctgctcacctcaatgtggccagaacttaaaccaaacccaagtgtaccaaaatctcctctgaggtggaagcggtggagcctgcccatctgtgatgctgtcgaagtttctgtccagctcttactcacctctggttgaatcttgcacttagtgctttttagtgtttcccttctgtttaataaaatactctattttttctgaaggataaaactagaaatgggaagcttcgtggggagcttcttgcgctatgctgatgttgttaagcacaatggatattagcctctttggattcttcttccagcttcacacatagcacccagtctccttgctttgcccccgttgctgtgctgaagtcttgctacctctttgctagaggatcaggaatgcaattcctgtgcaaaggtcctgaagttcacttggcatcactactgcaatcaaagcgccatcccttttctctctgatgggatcattaggctgtccccacgatagccagctgtcagcgtggatcacgtgggggaaattcacctggtttatttgcatcctaaagtaatttattcactgttacttgttttagtgtaatgtctagccagaaatctgacaggcaacctttaaagctaagttgaaatctaggagattaactaacagatcttttatactgtacttagcatatattttgagcatcaccttacctgaagaactcccatggttccagaaccaggtgccttctagggagaggaaagccctaggattgtgagcttccaccctcctgcttcataaccaaggatgcacagtgcccactgtcactgggttagacttctggtgggttttgttttttttttttttgtttttcttgtttttgtttttggcttatgtgtagtgccaattagctaatcagggacaaagaagtgatcagatgactttctgacatccttgagccatttctctgtgtgatatggactttagattagtgccttatgggttttgtttgggccatgggctgtcacaaccactgctacagacagctcgttttatattgccatatgatgggaccaataaggaacagggtgtatgtgaggaagattctggaaaactagtttgtcagtctttgccttttaacttatgattttagccaggcataaaggaggaaattatgagaaattgcttttgttgttctgtaggtgaaatgggaagctctgcacatgggaagtttgcacaaactgttcctaaaaggcagagctgggcctgccctggcttggcctccttgcactgggacaggccaaataccaaaggcaaagggtagaagtttatgagaaagctggttcaacctcacatatcttatgtcttccctctacactgttaatagacacttgagatgatttcattccagtctcctatagccagggaaaagcctcatctgaatcgttgcatttttagtcaaaagggagaaattataatcttcaatatgtagtactgtctggaaaataaatataattcagttccttggcatgtttagaaagggggtttcagtagtaactatcatcttttaaatacttactatgcaattggtcttatttatttgttaagaatattgaatgtttctggttttctttcttttgatttcacaagcattgttctatgtatccacagtgtctcgtctactgtatagaaaactttctttaagcagattatctgttttacatattttcgttaactccgtaaaagtattaaccacatgcatgcacaggcctgtgtgtgtacccccttttacctttgttccaggcacgttcacgtgcaactgtgaatgacccactagggacagtaaagacctatcaggaaagaaagcatgcccctcaggcttctctttaccatcttccccatctctccctctctctctctcggttttggttttggttttgttttttttgttttttttggcaacagcggtgtatgttggcacccagcagttctctctcatctgggttctcatctgttgctcttgattaagcttgggttgcttcttgctcctgtgctcttggaatggtgatctgtgtctggaagtaccatggtgccttgagtgctaccagtgggtctcaggggtacaggcagacatgcaatgtattttattaagtcttaaaccctcttgacttttgggtaccagatttttcagctgttgacaaggctgagggtaaataagataatgcctgtaaatcttaccattgagtttctagactgctgagaccaaagccagtgatttgtggggctagatgaagaacactgtctactgccagacatataaagaacattattagagacaagttcgaagctgtcgcttgctttctgaatgtcagcaactgcaatgtatatcttacaatatatttgctgttccttccaacctgtgtgctgaaatatgggtagaaaatttctaactcactgctttggtccaggaatgtgaacagaagaatttcatggatgtttgtaaccatgcttgtgttcccaggagtagccagtagtgtccagtttggccaacatgtgaaaagttgcaaactacgtagcaggctgtcttatggttaggtatggtggagtcccattctacaaccaacaggcttgccttagctgctctaaatactgtgacagggtaactccattctcctggaagaggaggtgaccaaggaatgtttggtggcttttggattgctttggtagctgtggaaaccaggcttgtttcccagagcctcccttgagtttcttcctgctcttctactggagcgtactttttgtaattggatttctagttctgatgtctggactttccttgtcttggattgtagactctgcacatgacattcaaatacttttctgtgtgttgaagtgaaagcatgtgagggtagtgcctgcccagaggagtatctgagagcccatgttttactggtttcaataaatgcagtcgtctctatcctgtcttcccttctctctcaaggaaaatatccctcttagcatctccccaccagctcagtgaatgagtgtccactgcagttcttcactttggatcctgtagactctgcactggacatcccttttcttctgagctctgagatcttgttctcttgatgtggacaaacatagtgctggtcagagggtagggctgggccacctcaggcgcacgcgcagagtggccgagcagggacttgggaagaaggtgctgatctttgcctttctgttcctggctgtccagcacctgctctagtgcctcttccctgcaaggcagggaccccgtgtgaatcagagccggtgatgcgtgtgggccttgtggccgccactcagcggggctcagggttaaggtccctcttgagtttggatgtgaatatcctaaagctatcaagtacctgtgaaactctgcttcactgctcttctccttctgagaggtaaacaaatcatatttttaagggtattttgttttagtgttaaatagcatcccacgagctgcatttttatttattacatacacaaaaagtaaatgtgtttctataaaatacaaagtctagagttggaaactctgggaaaacttgctgagatgcacaaatgtttctctctgtgatgtgcaatatgcttggccgccatagatggtacttcatgtttaatctgtaaataagaactgtatttaaattaaatgggaaatttttgtaaaaggaccaaatgttcttttataagcatactaaggaatatcttgttctttgaaatttattaggatttttatgaataatttttattaaaagattctctttttgagttgtcactgtgtttctcctttgcatgctctgcaagaccagggaaaatcatttggagaaattctaagcttcgatgactaaaatcttcagctttttggttttgtttttcttactggctgagctgctttgtgagatcgctctccagtgtctgtcccagctttatgtttgaatttggatgtgaacatcctaaagatattccttcccttgtgaaccatcccctctcattcgtcccactgctggcttcttatgttccctgccagtgcttcagtctcagtgttgttactagttacctgtgtttctggggatgcttctctgttgtcgtgaaaaaggcacctcatatcttctctctctgcttaagatggaatagtggtgtttagcagtgagggcacacatctccagaggcttgaagattttgaagctagcctgggctacatagagtttaaaagcaaaacaggccaggcagtggtggcacatgcctttaatccaagcactcaggaggcacaggtacgcagatctctatgagtttggggccagccttgtctacagattgagttctagtataaccaaagctacacagagaacccctgtctcagaaaacctaaaataaac

SEQ ID NO: 857 - DNA, 6534 bp, Mus musculus
acgcggggccaggcgggccggtcccgtccgcggggcgggggacaatggaccagttcctggtgcgtcacgagggagttccttaaaggggaagtgagcgggctcccggcggacgcgcggggaggcggtcggctggggacgcgcccggcgcttcaaaataatgcccgcggcggacgcgcgaccatgcaatggcgagcgcttgtcctggggctggtgctgctgcgcctcggcctccacgcggtgctctggttggtcttcgggctggggcccagcatgggcttctaccagcggtttccgctcagcttcggcttccagcgcttgagggaccccgacggctcggggccagttggtccgcccggaggcccggcctggcttcatcggccaaggcgcggaacggaggggcggcttgagaccccgccagagccgggaccgacgccgggaccgggcgtgtgcggcccggcgcactggggctatgccctgggcggcggtggctgcggcccggacgagtacgagcggcgctacagcggcgccttcccgccgcagctgcgtgcccagatgcgcgacctggcgcggggcatgttcgtcttcggctatgacaactacatggcgcacgcctttcctcaggacgagctcaaccccatctactgccgcggccgggggcctgaccgcggagacccttccaatctgaacatcaatgatgtcctagggaattactctctgactctggttgatgccttggatacattggcaataatgggaaattcatccgagttccagaaggcagtcaagttagtgatcaacactgtttcatttgacaaagattccacagtccaggtcttcgaagctacgataagggttctgggaagcctcctttctgctcacagaataataactgattccaaacagccctttggtgacatgacaattgaggattatgataatgaattgttgtacatggcccatgacttggctgtgcggctccttccagcctttgaaaacaccaagacagggatcccctatcctcgggtgaatctgaagacaggtgttcctcctgacagcaataatgagacctgcacagcgggggccggttctctcctggtggaatttgggattctgagccgcctgctgggggattccacttttgagtgggttgccagacgagctgtgaaagccctctggaacttgcggagcaacgatacaggattattaggcaatgttgtgaacatccagacaggccattgggttggaaagcagagtggcttgggtgctgggctggattccttctatgagtacctcttgaaatcttacattctttttggagaaaaagaagatctagagatgtttaatgctgcgtatcagagcatccagagctacctgcgaagaggccgggaagcctgcaatgaaggagaaggagacccaccgctctacgtcaacgtgaacatgttcagtgggcagctcatgaacacctggattgactcactgcaggctttcttccctggactgcaggttctgataggggatgtggaagatgccatctgcctacacgccttctactatgccatatggaagcggtacggggccctccctgagcgctataactggcaactccaggcccctgatgttctcttctaccctctgagaccagagctagtggagtccacatatctcctctaccaggcaaccaagaatcccttctacctccatgtaggaatggacattctgcagagtcttgaaaaatacacaaaagtcaaatgtggatatgctacgctgcatcacgtcatagacaagtctaaagaagaccggatggaaagcttctttctcagcgagacttgcaaatacttgtatctggtactatttgatgaagagaatccagtacacaaatctggaaccagatacatgtttacaactgagggccatatcatatctgtggacaaacgtcttcgggaattgccttggaaggaattcttctctgaagatggggagcgggaccaagaggaaaagtttgtacacagacctaagtctcaggagctcagagtcattaactccagttctaattgtaatcgtgttcctgatgagaggagatactccttgcccttaaagagcatctacatgcgccagatcgaccagatggttggcttgatttgacctgctcacctcaatgtggccagaacttaaaccaaacccaagtgtaccaaaatctcctctgaggtggaagcggtggagcctgcccatctgtgatgctgtcgaagtttctgtccagctcttactcacctctggttgaatcttgcacttagtgctttttagtgtttcccttctgtttaataaaatactctattttttctgaaggataaaactagaaatgggaagcttcgtggggagcttcttgcgctatgctgatgttgttaagcacaatggatattagcctctttggattcttcttccagcttcacacatagcacccagtctccttgctttgcccccgttgctgtgctgaagtcttgctacctctttgctagaggatcaggaatgcaattcctgtgcaaaggtcctgaagttcacttggcatcactactgcaatcaaagcgccatcccttttctctctgatgggatcattaggctgtccccacgatagccagctgtcagcgtggatcacgtgggggaaattcacctggtttatttgcatcctaaagtaatttattcactgttacttgttttagtgtaatgtctagccagaaatctgacaggcaacctttaaagctaagttgaaatctaggagattaactaacagatcttttatactgtacttagcatatattttgagcatcaccttacctgaagaactcccatggttccagaaccaggtgccttctagggagaggaaagccctaggattgtgagcttccaccctcctgcttcataaccaaggatgcacagtgcccactgtcactgggttagacttctggtgggttttgttttttttttttttgtttttcttgtttttgtttttggcttatgtgtagtgccaattagctaatcagggacaaagaagtgatcagatgactttctgacatccttgagccatttctctgtgtgatatggactttagattagtgccttatgggttttgtttgggccatgggctgtcacaaccactgctacagacagctcgttttatattgccatatgatgggaccaataaggaacagggtgtatgtgaggaagattctggaaaactagtttgtcagtctttgccttttaacttatgattttagccaggcataaaggaggaaattatgagaaattgcttttgttgttctgtaggtgaaatgggaagctctgcacatgggaagtttgcacaaactgttcctaaaaggcagagctgggcctgccctggcttggcctccttgcactgggacaggccaaataccaaaggcaaagggtagaagtttatgagaaagctggttcaacctcacatatcttatgtcttccctctacactgttaatagacacttgagatgatttcattccagtctcctatagccagggaaaagcctcatctgaatcgttgcatttttagtcaaaagggagaaattataatcttcaatatgtagtactgtctggaaaataaatataattcagttccttggcatgtttagaaagggggtttcagtagtaactatcatcttttaaatacttactatgcaattggtcttatttatttgttaagaatattgaatgtttctggttttctttcttttgatttcacaagcattgttctatgtatccacagtgtctcgtctactgtatagaaaactttctttaagcagattatctgttttacatattttcgttaactccgtaaaagtattaaccacatgcatgcacaggcctgtgtgtgtacccccttttacctttgttccaggcacgttcacgtgcaactgtgaatgacccactagggacagtaaagacctatcaggaaagaaagcatgcccctcaggcttctctttaccatcttccccatctctccctctctctctctcggttttggttttggttttgttttttttgttttttttggcaacagcggtgtatgttggcacccagcagttctctctcatctgggttctcatctgttgctcttgattaagcttgggttgcttcttgctcctgtgctcttggaatggtgatctgtgtctggaagtaccatggtgccttgagtgctaccagtgggtctcaggggtacaggcagacatgcaatgtattttattaagtcttaaaccctcttgacttttgggtaccagatttttcagctgttgacaaggctgagggtaaataagataatgcctgtaaatcttaccattgagtttctagactgctgagaccaaagccagtgatttgtggggctagatgaagaacactgtctactgccagacatataaagaacattattagagacaagttcgaagctgtcgcttgctttctgaatgtcagcaactgcaatgtatatcttacaatatatttgctgttccttccaacctgtgtgctgaaatatgggtagaaaatttctaactcactgctttggtccaggaatgtgaacagaagaatttcatggatgtttgtaaccatgcttgtgttcccaggagtagccagtagtgtccagtttggccaacatgtgaaaagttgcaaactacgtagcaggctgtcttatggttaggtatggtggagtcccattctacaaccaacaggcttgccttagctgctctaaatactgtgacagggtaactccattctcctggaagaggaggtgaccaaggaatgtttggtggcttttggattgctttggtagctgtggaaaccaggcttgtttcccagagcctcccttgagtttcttcctgctcttctactggagcgtactttttgtaattggatttctagttctgatgtctggactttccttgtcttggattgtagactctgcacatgacattcaaatacttttctgtgtgttgaagtgaaagcatgtgagggtagtgcctgcccagaggagtatctgagagcccatgttttactggtttcaataaatgcagtcgtctctatcctgtcttcccttctctctcaaggaaaatatccctcttagcatctccccaccagctcagtgaatgagtgtccactgcagttcttcactttggatcctgtagactctgcactggacatcccttttcttctgagctctgagatcttgttctcttgatgtggacaaacatagtgctggtcagagggtagggctgggccacctcaggcgcacgcgcagagtggccgagcagggacttgggaagaaggtgctgatctttgcctttctgttcctggctgtccagcacctgctctagtgcctcttccctgcaaggcagggaccccgtgtgaatcagagccggtgatgcgtgtgggccttgtggccgccactcagcggggctcagggttaaggtccctcttgagtttggatgtgaatatcctaaagctatcaagtacctgtgaaactctgcttcactgctcttctccttctgagaggtaaacaaatcatatttttaagggtattttgttttagtgttaaatagcatcccacgagctgcatttttatttattacatacacaaaaagtaaatgtgtttctataaaatacaaagtctagagttggaaactctgggaaaacttgctgagatgcacaaatgtttctctctgtgatgtgcaatatgcttggccgccatagatggtacttcatgtttaatctgtaaataagaactgtatttaaattaaatgggaaatttttgtaaaaggaccaaatgttcttttataagcatactaaggaatatcttgttctttgaaatttattaggatttttatgaataatttttattaaaagattctctttttgagttgtcactgtgtttctcctttgcatgctctgcaagaccagggaaaatcatttggagaaattctaagcttcgatgactaaaatcttcagctttttggttttgtttttcttactggctgagctgctttgtgagatcgctctccagtgtctgtcccagctttatgtttgaatttggatgtgaacatcctaaagatattccttcccttgtgaaccatcccctctcattcgtcccactgctggcttcttatgttccctgccagtgcttcagtctcagtgttgttactagttacctgtgtttctggggatgcttctctgttgtcgtgaaaaaggcacctcatatcttctctctctgcttaagatggaatagtggtgtttagcagtgagggcacacatctccagaggcttgaagattttgaagctagcctgggctacatagagtttaaaagcaaaacaggccaggcagtggtggcacatgcctttaatccaagcactcaggaggcacaggtacgcagatctctatgagtttggggccagccttgtctacagattgagttctagtataaccaaagctacacagagaacccctgtctcagaaaacctaaaataaac

SEQ ID NO: 858 - protein, 651 aa, Mus musculus
MQWRALVLGLVLLRLGLHAVLWLVFGLGPSMGFYQRFPLSFGFQRLRDPDGSGPVGPPGGPAWLHRPRRGTEGRLETPPEPGPTPGPGVCGPAHWGYALGGGGCGPDEYERRYSGAFPPQLRAQMRDLRMFVFGYDNYMAHAFPQDELNPIYCRGRGPDRGDPSNLNINDVLGNYSLTLVDALDTLAIMGNSSEFQKAVKLVINTVSFDKDSTVQVFEATIRVLGSLLSAHRIITDSKQPFGDMTIEDYDNELLYMAHDLAVRLLPAFENTKTGIPYPRVNLKTGVPPDSNNETCTAGAGSLLVEFGILSRLLGDSTFEWVARRAVKALWNLRSNDTGLLGNVVNIQTGHWVGKQSGLGAGLDSFYEYLLKSYILFGEKEDLEMFNAAYQSIQSYLRRGREACNEGEGDPPLYVNVNMFSGQLMNTWIDSLQAFFPGLQVLIGDVEDAICLHAFYYAIWKRYGALPERYNWQLQAPDVLFYPLRPELVESTYLLYQATKNPFYLHVGMDILQSLEKYTKVKCGYATLHHVIDKSKEDRMESFFLSETCKYLYLVLFDEENPVHKSGTRYMFTTEGHIISVDKRLRELPWKEFFSEDGERDQEEKFVHRPKSQELRVINSSSNCNRVPDERRYSLPLKSIYMRQIDQMVGLI

SEQ ID NO: 859 - DNA, 52299 bp, Homo sapiens
tgttggccaggctggtctcaaactgctgacctcaggtgatcacctgcctcggcctcccaaagtgtgggattacaggtgtgagccaccgtgcccggccatgaatttcttaaatatttaaatttggttatttcacttcagatttacctttctcccattcagttccaatgagtgtggctttgctcgtattgtgcactgttgtccccattttaaggtgcagaggtgcttcttcagtagttgggttaaatcattgcttccacaatggtgaacagttcatgtttgttatagctcagccctgtggtgtttcgttaatgcatgttagctgggaaactggtagtgaatttaccctcatctttcaggcttggagaatagagtggtgcttctgatagactctcatgtacccttctgaagaagtgaggacaagaattacccagccccagatgtcaaaagggcatggtgtgaaccctgcaccagccttggcagtgacagcctcctctcccatccctgtgctttagtcacattgtatcactcacaatccatccagagctccacaatgtttcatgccttttaacattcttttgctgttttttttttttaacctggagttctgtggggtggcccccaagccccgggaattactgcatcttttctgtgtattatacttaaaagcgccttgagggcaaacaggggttattcctttttttttttttttttttttgccttcctggcaatttgcatgcaacacctgattgattgtgtgggcaacacataaaaggtggcaccagccgtcctatacacaacttaatttttaaatcagaaaacgcttcagtctctgataattcctcatattctcttgaagttcgggtaatggagtatggtaatgcagatgcagaaaagcagcagaggtcaggcatagtgtgtgccttgaattagctgccttttaaatattgtctctgtttgatgtttagttttttaactttaatgtcttcacttttcccctctatctttagatatcacacttcagtggcttattcagcattcaaaatctagaagaagctgaagcatctcctgaagtcttccagtccttcttggctataatcctagaattattgtccgttcctctgaagtaattcccagaatacggtccttcctaaaccccagaaattgcctttttcagagtttatttctcatgtgcactgctgaagatgaatatccctaatccttcataaagaatcagctagagttgtcatgataaagtcagcacacacaaaaaggcttcttacacatacctgtcttaaaccatgtgtagagctttaaaaacagaaaaaaaaccccatatacttatgaccatcttaaatcaagaaaattgcatatttccattctggtctttctgggccagatttttatattggttttcagtaaatgtctatctataatatttcattatagagtccagtagcttaatactgacactgacttgatacagcatgaagtttctagtgccacacacagtatttagaaaacctttaggcgtgaatgactcatgtgggatatatgtaaacataatgtttattttatctcacaaatgcatgtgaaatgtataattacatcttaggaatccaaaatggtctgcagagagtgagcggaggcaccagatcaatgttggttctttgcactggtgagattctgcctgatgaatattaaagatatcctgctttctgagaactctatcaccagatggcagttgggatatgggaggaactaaagcatcctgttttgtatctgtccagatcattatttctgtctcttgttttttcttcctggttcaggatacttttttaaggggttgagaattgaagattttccaaaagcgttcatgaatttagagcattccacccaatataataaaacctgttaagaatgtcagtctttgttcaaacatctgtttgttctatctccagtcattaaatcagtgctgctgcatgacactcttaactcctgactttttatatccagtcataaagttgactttcagcacaaaagatacttataaacaaataaaaaatttttatttttctctcttactgatgtaagctttggcactcttttgactggtgccattagacatcttgattattgtgacaactctagacctgcctgctttatctaatgtaatcatgctcaatgtctacaggttgtttaataatcagtcacacagagaactgaggaactgatgctgtttgtttgcttctatgatacagagatgtctaaaaacttcaaatggacatgttttgtagtttagcgacttccgtatacataaagggacatattaatactggttcatttgtaaattattattcatatagaccactgtagtagataaaactctatggtacacctgcttatgtgttgcctcacactgtgtgtgattttgtttcttttgttaagcagcacttatgtagactgcatttccaaatgtgttgagcactcagagtgtagtcaacagtaagttcttttaatgaatatcagttttaatttatagactgccatggccttaaaaatattctgtacaatatactgcactgtgttgcacagacactacttgcttttctccattcatatttttatgagtagaatctgggcttttaaatttctcttcttattctttgaagcatgttgcatactaccctggtgggatggatggttctgtaaatgaagggatatttaaacttgctactgttgttcaacaccattaatggtcagtgtgaaccattacaaagaatgtggcaacttgcttgtgcctaaaaggaggaattggaactagaatgtgtgactctgtggggactgcataggtttgttaattgacctatagctaaaccttaatgtgtttgtgtgtctatacattgctttccgcatttcaagacatccagacgctattaccaacattttcctgtgcattaacctctgcatgtgaaaacttttaacagttactgaactatgtaaatatgtgaatttttttatttaggtggatgcattttttgtctgtttactgctcttctcagctttattcaataaacttgcattttaagggttgtattggcaattttaacttaaaatgtgcatcatgatggaaggtgcagacttttttggaagtttccgagaggagggtctatagaccatttgtcagaaatcagatcagccctcaaagaatggggtctgtgggctagttaaaatagaaataaacttttaaaatatccacagaattgatattgtgattttttgggggcgggggaaatgctactacttgtcaacggtcacaatacaccaaatttaggactttaagtggcaagtgctagtaaaacattttatgtcccagtttttacaaatcaaaccaagaccctgctaagcaaatgaagttgcaagacatgcctattcactgacttcagttcagaatggaaatattttaagtaccgaacatgctggttttcccacaaaggcacatttttagcataaagctttttgctagtttggtatcatctgcccataaaataagtcaatacttgagctattggaaaaataattgtgtatatttttatttgtttagaaaggttcagttagcattttctccatacgcatactacaattctgtacagccaacccttagtggccagttggatgcatgatttcgcgtttatttccctggaacgtcacgttgatgtgtttttgtcttttcactgcattactggagccatgtagtcaagcatcaagtttcatccacttctcaccattctcctaccaagggggtgagtgtgtgagagttgagggtgaggatgggggaacacggaggatatacatttagcttaattctaaatgtgtatctgcttttaaaaacttctaaacttataaagttggtctttgattctgtcaagtaaattgggtgtttgaggaactaactgctttgtctgtttgctccatgtaggattgagttacactgataccctgttgatttggtaattccagctgctccaagggtctggtgggttcagaactggaatggaagcttaaacataatgtagtgggcatcatgctgtaacatccagttggccaaatgctttactctaaaaatgtgccacagtggggaaagcacgatgtttgatgtttaaaatgtttttgttatgttacagacttttaaggttatgccctcaactgtgcatagcagtgaagagacttgaaaaggaagacagtaaagccttacagacttcccttaagtttgctgctctataagtatgcagcctgctgcaggtgtttcctgttggttagtaaataacctccacacattggctgtttaaaattcagctattaataaaaatgtgtacttttgtcattgctcctcttgggtgttcttagggaaaccaaagcaggtcattgtcatggtagacagactgcaataggactctcttaaaaatctaagccacagcagtagtcatttattattccattctattaaccagccctctcttcagtaagataattctattttgaaatcccaaggcatctggcatttaggtaatgcagatttcccaataatcaggagggggaaaagatactttagcttcattttactggggcttacagtagggatgtaggaaaagagttgttagcttacgatgctaatatagcttaattctgtggagagtactgggttggcatttgggagaatgggttctttccttggccattaactgactgtgtgactggtgagttgcagaaccccctcatggctccttaagttttcccatctataaaatgaacaggagaggatttctaaccataacttctgccactgacaggctgattctagcagcctagaaatttgcttggtggttaaaaagagatacaaaaacaccgatttggcctagtgaatatgttaatattacatgttccttcaatagaaggtaattcaaaaatacagaaatatttacatgttacaactttaaattttagcacaaaagctggagattgcagacattttacagaatgatacagtaaatttattttgtttgaaggaaattctgtaaatataccggcttatattttgaaaggcatttacaaattttagaacattttccccagactgcagaaaatgtttggtatgcactccagaaaagtgtatatacctactaccaatttgagggtaggtggtttagagctaaggtttaatcctttataactgctgtgttgctgggtttttgggggtttttttgtttgtttgttttgagatggagtctcactctgttgcccaggctggagtgcagtggcgccatctcagctcactgcaagctccgcctctcgggttcccgccattctcctgcctcagcctcccgagtagctgggactgtaggcgcccgccgccacgcctggctaattttttaatatttttagtagggacggggtttcaccatggtctcgatctcctgaccttgtgatccgcccacctcagcttcccagagtgctgggattacaggtatgagccaccatgcccggccagctaggttctgctagaatttatccagagctttggagaaacctggaatggttagaaaatactactcttaaaagtaaaggggctggaggaccaacaaaaccattgtatccccttttggacttgggaagtagaacattaaccacttgctaattatagcatctcccttaaccaattcttatctacaattgtgacttaccctcagtgttgtacaatgtgtatcacacaatgtgctagcttgtttctgtggcttaagagaattcaccatttctatctactacccaataggtgaattagataactcttccatttgtatattttattctgtaagaaaaattcaaattgctcttatttgtcatactattagctaatttataagcgctagccctcattcaaagaagggttaaggatttatagaattcctatattctctggaagcatcagtaacctaaaggctagagcatggtatgggcatgtgcatgatgaatatttttgatgtatagttcatatatttgtttcagtggtttggtgttagaactgctagaagggaatctcactatcttttcttcctttttgagatagtcttgctctgtcatcaggctggagttcagtggcgcaatctcgactcactgcaacgtccgcctcctgggttcaagcaattctcctacctcagcctcccaagtagctgggactacgggcatgtgccactatgccaagctgatttttgtagttttagtgcagatggggtttcaccatgttggccaggctagtcttgaactctgacctcaagtgatccacccgcctcagcctcccaaagtgctgggattaccggcgtgagccaccgcgcctggcgacttgtgctaacgttaaaccaaaattatggggggtcattgtttgtggactgagtttctgcactaggtcctagcagaccaaagtagttacatatattaagtgccacacagttacatggaaactttacagaccagtttttcctgaaaacagaaaatcccagtctgtctgaatcagaataataaggaagtcccttcttctttaacccttaaaaaaaaagtaacccgatgttaaccaatcagttatttttcattgttttgtttccttgctctcatcttacaaaacccactattctgctgtttctcattgggagctttcattctgttttgtagaatggaggctgccccattcataagttatgaataaacgccagttagatctgtaagtaaatttgttgtaatttttttctgacactaggaattgccaaatgacccttcacacgggaagtactagtttttgtttttaccagtcccagtcccctatgcctttttaaaaaagagatgaagtctcactgttacccaggtaattgcattggctatttacagccacgatcataggaaacgcagcttcaaactactggctcaggggatcttcctgcctcagcctctcgagtatcctgtatcttgctaacagagcatgttgacaaacttggatttgtgcccatcaaataagtttgaactgtaattatatacttttttttaggccttcagctttgcaaaacctctgcttttgaaatacttttttttttttgagacgcagtctcactctcttgcccagaatggagtgtggtggcgctatctcagctcactgcaacctctgcctcctggattcaagtgattctcgtgcctcagcctcctgagtatctgggattacagacgcccaccaccacgcccgggtagttgtatttttagtagagatggggtttcatcattttggccaggttggtcttgaactccggaccttaagtgatctgcctgccttggcctcccaaagttctgggattacaggtgtgagccaccacgcccagccgggtgctagttttaaaagtttcagagttgaaaagtattaataggtctcactatgtagcacggttgtaagtactttatatatatatatgatgtaatcacaactgtgataaacattgtcctcatcactcacccattttatggatgaggaaacaagtccagaaaagtaacttcccaaggtcactcttagggcagagctacgatttgaacacctgacttctgaatgtgagttcttagttgtcatctctttgcattccccagagtaaagccatttttacactgaaaaagtgcctcctttccttttttatcagtccctgatgcgcttgtgagattaccggaaaacctgtcacaaatcaaactgtttatcttaaagagttgattttcaagactggagttttctgattgggtatgggtgttgtcccaatcttatcagtacatttagcttaaggagagtcctaatcgaaaggactagcacaaaataacccatttctttcatttcagtttcattccagaaggaaacactttctgaacctagaccctaatgcctaggctatgccttgcagggcactaatgtcaaaactattgcttttgggtggcttggaaagagcagagggacctgtctgctcaagggccagctatttgaagtgcaaattgccctaaagtgtagtaactccctttctgcctagagccaacaggctctgagaattgagcccccaacctgatttcttccattatggcttgtggaataagctttacagttttctatgaagattaaataagcacacatgtcaaagtgttttgaaaaccatcagttttactatgaaaagcatctttcaggagttggatggttttctctggttattaaaagatttatttttataagagtttttctctaacatcaagacagaagctgtcctcaatgtggcctgcagttaaccaggtcaaatttaagttaaaatttgcaataaagtagccccggaaggaaacatgcaacatgcaactgaatattcacattcagtttgcaagttccaggaaggcagaagttcaggatcaagggctggagctgggctgccagcacagtccctaggcatccttcacagaggggaaaaagcagaagctgtgtagtctaaagaccctggctcaagctgtcttcgtaatctttttgctgcttgggctgctctcgatgtctcaatgttgggaaagaacaaggctcagccaacagtaaggaccttcctatgtgccagctaccatgtgctgtaatcaagtgttttcttagttccccttacacctcctctgtatttcagaaagtcctctaccctgaaaatgtgatgagagtgccacatgacaacttaccttcttatgcactccattggtcggccattcagccaatatcagatttgggggtctagtcaggtcttgcttcccaagcttttcagaaaccctgatgaaacaggcatagggtctaaacttagggagggcaaaacttacagccaactccaaatgcagcaagcaaaataaataagcgcctaaaccattgaatctttatgtgaaagccatagccctttagagctaacatttgcaatcttcttaattataggaagtagatacagaggggtaaagttatttaactgggaatctaccccacacctcaaaggttaggtcactaattgcgggtgcacaggagagatggtaggatgggagggacaggagaagacatgtttagatatatctggtaaataatttggtggtggtgggagccttcattcccacccccaacccgccccccccttttaaaaaaatcctatttccgagacaaaagcaatataacataactttgtatttcctgaaacttccagtttctaagaactgtccaagagtacttacacgcacattcccgagaccgttggagttgttcgataggtctagggagggatctggggatacgtgttttacaagcaccatgagcgattcttcaaagttgggtgtttgaatcaaaagagcagaattcatgataccgttttgtgcactccttgagctaaaaggtagtatcccaccctctccataaacagacacctaagttataaaacttatgcgctcgatatgcaaaaatagctcgttttatacagaaacgatcctttccttcttttccttatatatcttttaactgtcatcactcctaacctagacctagagtggctttttccggtcctagctctgccggacacacgctctgcccagagacccgatccacccaaggccaggcggtctggggtcacgtctgtgtccagcgtccggcgggcgctgccgtgccgctctcccattggctggaagttccctcgcgggccggcgcggctcctgctcgccacgccagcccatcgggctacggaccgcccaggggggcggggcttgggagttggggcggggcccgggtgaggggcggggcctcggggcgtcgcggacgtcctggcggcctactgcgtgggagggagtcctgggccgcgccccgcgaggccgggcccaggccgggccaatcccgggccactgggcgggcgaccgtggggcctggccggcccgccggagagcctgggggttggggacgatgggctagttcctggtgcgtcacgggggagttccttaaaggggaagcgagccgggctacggggcgagcgcggggtgcggtggtcggcggggaggcccccgcgctttaaaataatgcccgcggcgcccgcgcgaccatgcaatggcgagcgctcgtcctggggctggtgctcctccggcttggcctccatggagtattgtggctcgtcttcgggctggggcccagcatgggcttctaccagcgctttccgctcagcttcggcttccagcgtctgaggagccccgacggccccgcgtcgcccacctcggggcccgtgggccggcctgggggggtatccgggccgtcgtggctgcagccgccggggaccggggcagcgcagagcccgcgcaaggctccgcggcgtcctgggccggggatgtgcggcccagccaactggggctacgtgctgggcggccggggccgcggcccggacgagtacgagaagcgctacagcggcgccttccctccgcagctgcgtgcccagatgcgcgacctggcacggggcatgttcgtctttggctacgacaactacatggctcacgccttcccccaggacgagctcaaccccatccactgccgcggccgtgggcccgaccgcggggacccgtgagtagcccccgccgcccggggccgcgcgcccacgcgcttccttccgccctccgcgccggggtgcagccctctgtcctccggggcccccgagggcgccagggccgttagggtcccgggcagcgctcccgcgccctgtcccgtgtgagtccctgtgaagacccccgagcttgagggtgcggggtgggccggtggccttcctctcctgattctcccggaatctccaaacttcagaactgctgtccagctcagtgtcttacgcgtgaggatactgaggtccaggaccagaagggacagtggcagtgccaagggctggcttggagggctttccacttccatccgaccccttcctccggatgagcataaactctaaatgaaatctccatcatgccccccgtgtaaacgcagcctcagaacaagcctttacctcgcacccccacctctatcacattgccacacccacgtcttttctatgtaaaaagcctatagttgacttctccaaagccgtccattgagtttgaggcagaacggggttacagcctctccttcacaggggctgcttcttaggctgaggatagttaggtggtggggagggaagctatgtggcccacttttggggtccagatacttgaggtgaaattcactggatgccagattgactgtcaacgtcatcgccctgtacgatctgtctataaatcccccgcctctggtggcgtggttgtccgggaaggtcaggcagtcttccctgttcaccagccttgtttgcaaaggctgagctccaagggtcaccactgttgacatcaaagtccaagagggcagtacacccagctaaggacctcttacctgtagggaaggaatgtgcattgccatagaccctgttagtccaaatagttgactcccctcccctggatgggagtggaggagttggtttgctcagtgtcttggcaccgtctggggcaagcattttccttcacctggaggaaagcagtggagtccagtccttaggttctgataaggaagcctatagactaaacggagttgggtttttaaaatggtgtggttatttacacatttatgttttaaattgcagtttgagagcatgatttctaccgaagcaaggggacatcccaagctaaattcaaaggactgagccttttcaaaattctaggaaaccgatgagtttttcttgcttaaccatagcgtttatacgtataagtgtattttctatctcaatttttttgagaaaaaatattaaattttgaaaaaaaagtatttggcctttccagattttttgtttgttttttgagacggagtctcgctttgtcgcccaggctggagtgcagtggcgcgatctccgctcactgcaacctccgcctctgtggttaaagtgattctcctgcctcagcctcccgagtagctgggactacagactcgtgccaccacgcccggctaattttttgtatttttagtagagacggggtttcaccgtattagccaggatggtctcatctcctgacctcgtgatccacccgcctgggcctcccaaagtgctgggattacaggcgtgagccaccgctcccggccatggtctttccagattttaagaaatgaatgaattatttggctcacttaactagaggggactttatacctataaatgtattttctttcttagttttttttttggggggggggataaacttcatttaattgtggtcttttttttgttgtcagcctacatcatgctttgatgttttttctttttaaatcaacattaaagtttgaaaaatatcataaaatcccaccagctattttaaatttatttttgccactagttcctacccatatgtctatgcatgttttacatagttgcaatcatagtatgtgtacatattttggatcttaatttgtgcttttccactagtgctcttggtattacaagaagggagagagcacttccaataagtgcctttattcctgctcacagactgtttctcagattaccttttatcaggtggactgaagttgaaaacagtttaacggggaattgtgataacactttcatttgagaatatgacggtttggagagtgagttgatgacattttaatgtttttcttaatgaaccttaaaagcgcttctggagaaccttaagaatcccttcccagcaaagtgaggtggtggttgatttaacttgctggtctttgtggtatcatgtgtgctgttggcctttatttcaggatgaaggctgccgatgagtgttttggtttggttatgcattggtttggttatgcgtaagttaaggtcaggttgctttgagacagatgtgttattggaaagagggttttagaagtattgaggaggtggggatggcattagggaagggttgtgccctgagctgggtaggcccgttggttggtaaacctttgttgtctttgaggaggccaaagaagccttgcatggacgcctcacacttgccacttacaaacagtggaaaacttaattttttgtactctccttcctttaactcctctcaggctttgcttttttttaaatattttttaaaaaaatttatttttaatttttgaggatacacagtaggtgtatatatttatagggtacatgagatattttggcacaggcatgcaatttgtaataatcacatcatggaaaattgggtatccaacccctcaagcatttttcttttgtgttacaaacaatccaattatacttttagttattttaaaatgtacagttaaattattattgactgtagtcctcctgttatgctatcgaatactaggccttgaggaaagtttaaaaccagagtattgtcatgctggctttgaaacaggagggtacttcacatccccaaactaaataatctgtaataaaaatttttcatattttttgtttgtttgtttaattgacagggtattgttctgtcacccaggctggagtgcagtggcataatcattgctcactgcagccttgaactcctgggctcaagcagtcctcctgcctcagcctcccgaatagctgggactagaggtgtgccccaccatgctcggctaattttttttttttttaatttttctgtagaagtggggtcttactttgttgcccaggatggtctcaaacccctggcctcaagcagtcttcccgccttggcctcccaaagtgctgagattataggtgtgagccaccaagcccagccaaaaatctttcagattttaaaaaatcaaatgtattctaatgactcatttaacaagagtgaatttgccattagagtattatataaaaagtacacatagaaaatttcggtgctaaacactcttaccgtttctctgtagtcatatatgctccaaacttatcttgcctcaagtacatgtgacttgttcttggggaggtatcaggtaaggagttaacatgaagtgaataaaacctgaacactctaaaaagagcagatctgtctaagataactatgcaaagtcagttctcacatccttaatttgggttggaggatccaaatttaaagtttctttgagtaaatgtggatattatatttttgtaatcctgtgaatggttaactgtagttctggcttttgggcatgtgaccattctcaatttcttctcaactgtattgctattaaaacaacaaaacaaatctcaaattaagccaaacaaatattggcccctcaaatgcttaggtactactagctcaagatggcctcctctgcattcctctttctttggaaagtcctgccctctttcagagtcaggctcctcttgtttccgtgacaccatctaactgtttgaagatgattttcctttatttgctcagttcttcttttgattcctttcctttgagctgcgattctacattttaaccttatttgaggattgagtactgttgtgtattcacctgcatttccctttgtcttgtctctccagattatcaatcccttgaacgcagggactgtttcttatgttatctctgtgcctacaccacaccaggtagatttctgaacagctgttacaggttaagtatacatgggaatttaaatttaaaaacacatatgtttgattttgttagctacataatcaaaaattttctatcaaaggccatggttttctccatcttttctgttttgaggtgaactttaaaaatttacagtggggtgaatgccatgaacatttgtacctggtgaagtaagtggagcgtttagttgtgcggttcagccagctggttacagggaaaggtattgagttcttgctggatgaacttaaaggtatcaggttaggctggagattgacaagaatatctacaaagaacaaatccagagtctgagctgcatagtgggctggcataaatggagtcataataatttcatgctgttaggccagtagagttttatggtgtttttttttcttccttcatcctcactcccacttcccccttattttggcaccttttgaaagaggatgtagcaattatttggtaagaaagaattaaaagtgttctaatgagtaaataccccagatcttagagaggatttgtctgactagagtggagagaagaaaccccacagttactgcaagtaatttttttttttttttttactgtggcagctcattaatttttagtgactgggcattgtaaaaaatattttaaaactgggtctattttagttatagattacaaggcaaagcacaataaaacatagaaaggagttcagtgctcacagtgagtaccttccttccatgggcctgtgcaggtggatagaatgacacatgccgcagatctgggtgtgactcaggagaggggagttacatgtggttctcctgattaccatctagcttggatgctacatgatgagggagctgttttctgatgaggtgggctgttgaagcccactctgtttctaagcggcagagcaacagagtgaaatatttacacagagcagaacattcttgagttggcagaattgggcgtaaggatctccctgtctcctttgagcccctcctgcaacccttgcactttttgtaccttttttggctgtcacttgcgcttgagaggcatatttgaatccatagctcttgctttgaggggaccttttgctattgtataagtttatttccagaaaatcaacaaatagaaaaaacaggtacaattttccagccaagcagttttctgacttcccagcttataggaaatgagctagccctagttcctagactatagcccccatatatatctcgtttcaaaaaaacagtatctaaaattttttttttttttgagacagagtttcgctcttgttgcccaggctggagtgcaatggcatgatctcggctcaccgcaacctccgcctcctgagttcaagtaattcttctgcctcagcctccctagtagctgggattacaggcgcctgccaccacgcccagctaatttttgtatttttagtagagacagggtcttgccatgttggccaggctggtcttgaactcctgaccttggatgatccacccacctcggcctcccaaagtgctgggattacaggcgtgagccaccgcacccagcctaaaattttactataaattctttgctttagattagatggtgtaacagcataaaacaaggcaactggagggttcaaataaaatgagacattggagctgttatgcctctttcacataagccccattttccccagctgaggcacaggcctttcagagaccacagcaagccatcacaacacgagaggtgctgtgcaccagaagcttctctgactggaaggtgagataaggacccattagggtgatccgaggagcagatgaagtgctttgggatatgatggaagactgcagatatcaatgcatcttgctggaaataaaactggagcttttttgctttggttgctaataaaatctttaaacagttgtcttatgtcttctcttactatcattttttccaagcttctgcacttattttctggatttttgggaatgggacaaataaataaatgaagtccccagaatttctcaaactgtcctttattttactagttcttcatccctattctcccagatgtattagtttttttgttgttgacttttttgtaaagtgttacaaagacataccacagtgcctgaggagcttcacccttgtcatcctgaagttggtttcttaaggttgtttcagaatggaaaattggtgtagattatggggtgagaggtgtgtggcagaaacgtttatgtagctccagtcaagaagtgagaaaggcctcaattcctgcctaggttcatgttaaatgatatctcagaattaacggaaataatcaagaccctttggatgagttattaatgaagaaatggtgtaaagaagttaatttatacccccaaccatagggcagatgagtaatattgacactgtcaattaatgtatttacttctttttgtgtgtaatataggctgtggtgtctaatttctgtattaaagtattacaggtgggtcgtatgacaagggctcttctttagttcctaatgattgtgaaatcagagctttttaaagttggacaggaccaaggagattgtctatggtgataaacctgaatctcagagaggagatgactcactgcctcctgacttcctgtgagcattctttccactctggtacaagtgtgtctccacagttctgtgacttgattctacttatggacaccatagaaagtgttactttgggggtagaaagacctttgctgtattaattcacccataattagttcctgaataaataagagttgctggcaattatagtttctgatgggtgtttacttttattgtcttctcttttgaaataaagtctttttgttgaattttaattttctttttcagttcaaatctgaacatcaatgatgtactagggaactactcattgactcttgttgatgcattggatacacttgcagtaagtgttcacctttttttaaaaaaatgaattaagatgttttagagttgattatccctagttccctccagcagtgggaattccagggagcctgataagtcaaaatgtatcattagctttgataactgttatttattttaatgaccttaatggggagaacaagaaaagtgttgaaggttaaatgaggggaaatgtgattccattaaaaaaaggagaaggaatgtacgattgattttagggaacctatttttttttaaccagtttctatcttattccctaaaagaacccataatgaagctcattaatattgataattatagtcgttgctattccaggagtaaaagagagaagatctaagggttggcaggtaccctgaaatgtcatctagccactggctcccccaggagcaagttggagccctagcgcccatccttatgtggggctccctagaaacccttctcttttatttgccacttcctgttttgtggacactccatgcctgagctgccaacgtgggtgctggcattactgcctcatcctgtggttttgctcattgactctggagaactagaggcctttgagcagatatgcagaagcaccttgaaggcagtgtggcactcagtacatggtgccatgtctgtgtgcttcatctgcttcaccttttgccattaaagcagtttccaggggactgtattccagcatagtgttgttttaaaatcttcttagttaaggtgatttttacaacctctttgctttccttcattgtccagcaagtctttaccatgagaaatatcttattgcagtctagcccaaatgttgtacttttatttattcttgtttcttttaacatgccatagaagagtttaaagctgtctgttaggagatagaattggggccgggcgcagtggctcacgcctgtaatcccagcacttagggcggttgaggtgggaggatcagctgaggtcaggagtttgagaccagcctgaccaacatggtgaaaccccttctctactaaaagtacaaaaattagctgggcatggtggcgggcgcctgtggtcccagctcttcaagaggctgaggcaggagaaatgcttgaacccaggagtcagaggttgcagtcagctgagattgcgccactgcactgtagcctgggcaacagagtgagactccatctctggagacacacacacacacacacacacaagaattgggtaatgtgctagccaagtttgcattatgattgtctagtatcttgctagtagtagaattaccagaacttggaaagagcttgagagatcattctacgtcctcattttataaataagtagtagaaataggactaggcccttggtctaataggaaatctggggtactgatttagtataatttaaattacaaagcaacttagtttcccaatatctccttctgaagttattgctgctctgtttcagtcatttaccatcactgatcaaaatgtgcccagacaagtatgttcgaccttagagctaatttgttgatgataccagaggctgactcagcctacaagtgttgcttaaaggaaacgtcctaagactcaatgtatagctcatgaaagcctactccttgtccctgagagctttgtcatcgtcgtcgtcttttcttttcttttcttttcttttttttttttttgagagagtctcgctctgccgccaggctggagtgctgtggcgtgatcttggctcacttcaaccttcagctcctgggttcgagtgattcgcctgcctcagcctcccgagtagctggcttttttttttttttttgccccattttgtttttttatccctccatcttgcctgctattctgttgttcaccatactctcccccacacttaatggtgtctggtgcacagtagcagtgcaaatgtttgttcaaaaaatgaattctgactaatgaagcatttcccaacacagattccaaagatacttactccctgaaagaagagttctgtttctaaatgaacttgagaaattccgtatgtctggtcccactattagagagccacagtgcccatcagcattttaaagactctgagaagtcctacagtcaaacaaacaaacccatttagctcctctgtcccattcagccattttcaaacattagtgtgatttcagaacatagtcactcaggattctatagctatctgaccataatgataaactacaataagtaagagctgttgacttccttcaccttcctcacttgatttgagctcctgtcagcacctgcagcttcaccagatattgttgctggtaaacatctgtaaggaaacagactcatctctgtggttttcattgtagaatatccggcctttagtgcttcaggcttatttttcaggtgttacttctgttgaagttttccttttcttttgctaacatttaaacaggctttaacagatgtgctagggaaacactgtgaagatagcagtcccctgaccattggatgcaacttgcagcattattgcatcatcttctaaaaagaaagaactgaaagctagaaatgtctgtacttactctgtaggttacagcaaaataacgatgaggtggaaaaaatgtagttaggcacagcttggttttatacattgtagggagacatgagacatcaatcagtatgtgtaagatgtacattggttcagtccagaaaagtgagacaacttgaagtgctgggggtggggtgagggggcacttccaagtcacaggcagataaaagacaaatggttacattttttttgtcttttttttttgagacagagtcttgctgtgttgcccaggctggagtgcagtggtgagatctcggctcactgcaccctccaccttcccaggggttcaagcagttcttgtgcctcagcctcccgagtagctgggattacaggcatgcgccaccacgcctggctaattttttgtatttttagtagagacaaggttttgccatgttggccaggctggttttgaactcttggcctgaagtgatccgctcgctttggcctccctaagtatgggcttacagacctgagccaccgtgtccagccggttgactctctgattagcctttcacggaatatacagtttacctgtgacaaaggtagaggaatagtcacttatgcctttgtctggcttagtgaatctgcagttttacataaacagtagggcagaggaagcaatcagatatgcatttttcttaggtgagcagagggatgactgagttctgtcctttgtttgtacctgtgaagataaactgtcaatttacattgcctgggtgaaattcagcagaattgttttgaggggaagatcttgaggcccacaaggaatttccttgtaggtaaattgtaagggacgtatatagctttttttttttttttttttttgaatctttgtagctatcttatttaggaataaaatgggaggcaggtttgcctgatgcagttcctagcttgacttttccctttggcttagtgattttggggtcccagaaatttatttttctatcacagtatgtccttatgatgtcattatagtctcagggttgtcataaaatttagagtggaatgaaataattttgattcaggttaatctataaagtttgatgcccaactgtgcttcacataggagagagtggcttagtgtgacgtcgtatctacatacccaaaataggaatcataattctagatcactttttaaaaaggacatagagctgattattcatatgttttgtttcttttaaatcagtcactggttttatcctgtgctccaaaagatattaccactatttctcaaagtgtttaggcatctggataacaatcaacaagttcattcagttttccacatgttttggtctcctgggagccaagcacccaagctgctgatttatttgaggagcagagagaaagacatatttttgtttcttcagttttctgatttatttgtatacctgccagaagttttagaaaccacaatgcctggcatgttaaataagatcatagtgaagtttgctggagagtggagttgggaagatgaggagtgccaatgattttacaaggaattattttcacagttttgtcctttggagacaggactcttgagttggaggaaatgggccagccatgtgctgggaatatatgctaagaaataactgcttttctgtctcttgtgtttctactcctatggtagcaaaaccacatacagacatttaggtgacgtgactgggctgctgtgatgatacagcctcagtttcatttcaagttgctgtaatgacctgtgttcctctttttaaagataatgggaaattcatccgagttccagaaagccgtcaagttagtgatcaacacagtttcatttgacaaagattccaccgtccaagtctttgaggccacgataaggtaaaataatgaatattcataaaatgaattggagacttctttttatgtgtttaaagaaaaaaatacctttgagggtctttttgccacatgatccaggcagggagtccatatgggctttatgggtgcagtgtgcatttttcatgttcatatctgtcaaaactggaacaattatttcaaagtaatcacattccggactgaagggaaagacacgtttgtattttgttttgtttttatagattaaactctttttttttttttttttgaaatggagtctctgccacctaggctggagggcagtggtgcaatcttggctcactgcaatctccacctcccaggttcaaggcattctcatatctcagcctccagagtagctgggattacaggcactcaccaccacacctaagttttgtattttcagtagagatgagatttcaccatgttggccaggctggtctcgaactcctgacctcaagtgatccgcctgccttggcctcccaaagtgctgggataacaggcatgagccaccatgcctgggtacatttatgttttaacgggggtgtaaaataggtgtctgtctagtacagaatttcatggtttccctttatagtctgatttcattttcttctttcaccgtgtcctaggacaacccctacatatttctgaaggaaatgagagtttcccatcttaccacccacagaaaatcactgcttaccattttagtatatttctttgttaggtatatctctcacttctatttctctctctgtctctctctttttctctatttgtttagtggattgggatcatgctgtatacctagtatattgtatattgctttttttgatacattgtggttattttcctgtttacatcttttgaaaattgtatcaactgcataacattccagttcacagatgtaatacttatttaaaattaaattggtgaaaacctttgttctgacatatatcacagcctacttcagatctttagaatgggactttatgggtctacaaggacttaggtataagctggtagcctgctgcctcttagtaggtcattttttcctcctcctcttcaccttgcctctttaccagatgttacggtgttagggaagttgcttggcagccaaaacaacaaaaattacttagtatttgttgtcttacctttctctgtttttttttttttaatttgaattaaattaaattttttttttcattttagagcagggtcttgctctgttgcccaggctgaagtgcagtggtgctatcacggctcactgcagccttgaactcctgggctcaagcgatcctcccacctcagcctcccaaatagctgggactacaggcaaatgtcaccatgcccagcttctgtttttttatgagtgttttccccaagtgaaataaatcaggagtaatttaataatactaataggtaatatttattctgagaacagttagtacactcttatttttttttttaagagacagggtcctgctctgttacccaggctaaagtgtagtggcatgattgtagcagtcttcaatttctaggttcaagagatcgtcctgcctcagcctcccaagtagctactaggactactggtgtgtgccactacatgcggctaattttttttatttttaatagagacagggtcttgccttgttgcccaggctagtcttgaactcctggcctcaagagatgcatctctcttggcaaagtgctgggactacaggcatgagccaccgcacccagccaactcccttttcttaatgccctaagatttagattaccaaaattgttactattttaaatagcattgtttttggtagtctcgaataaatgattccctttctctcttttagtaatatggttaacaaaaatcaatcgtgtattcttagagctagaaaggaattcaagagtccattaagtcaggtctctctgacgtcaggcagttctgagtctatgtggatatgaacatacttctatctttctgaattggattatgtgcatttacaagcaacacgattgtattatctttttgttcttcctgtcattagggtcctgggaagcctcctttctgctcacagaataataactgactccaagcagccctttggtgacatgacaattaaggactatgataatgagttgttatacatggcccatgacctggcggtgcggctcctccctgcttttgaaaacaccaagacagggattccatatcctcgggtgggtagactggtttgaccctttgtgtttgacaattcactatcttcctgaattaaaattctttgcttactaatttatttgggagaaggaatgggatggaggtagatgagaaaagcagtgtccttagaagaatttggccttaaatatgatgtaaatattttaaaattcattcagcatttactgaacatccactgtatgaaaggcaaacagtgatatatctgacttattccttccccttaaagagtagatgttctgtgaagttcagtattcttaagtccatttacatgtgtgatttatattctctgctacaaagcagtgtggggagtttgtcttcatctctgacttgggtctgttttcccagagatcctcacatgggtattgcgggagctcagtgagtgttcttttcaatgcttcacgtggatctttcaaataaaggctgcacagaccagcaagttagctgctgatttaaatgccaggatctggaattagattatatatttgtgacatctgatttgccaagcccagaactcctctgggaattgagtcagccttttaggtaactgactgagaactgccagagcacagagccttcatgatgaaactggctgtcatattctggtagtgcctcctttcttgcccagtttgaggtttgtttaggtgctgagcaggagtgagttcatagtggttcatttaaaatttagaagaaattctatagtttgcctttgtctctaaccctaaagcctggtgcctgtgttaccatgaagaaaacctgctggaaagagaaggtttagtgaagtgttatagccattccctgaagacttgctcttattaataaagcaaggctctgctgttcttattgtcttgtttgtgtcttttaaatttaattcccgtattcacctcagatgtatcttggaaggcagagggcagactctcaccgtggtaagcttggtttattagctgagtgtagtctctgagacccggcttttcagctctgtggattccttgagttttgtcacagtctttgtctgttcccatccccaggtgaatctaaagacaggagttcctcctgacaccaataatgagacatgcacagcgggagccggttccctcctggtggaatttgggattctgagtcgactcctgggggactccacatttgagtgggtggccagacgagcagtgaaagccctttggaacctccggagcaatgatacaggattactaggtgtggcacctttcctcgccattgggactgcacactgcttggtccccttttcctttcatcttctctgggctctgccccctttttactcttcaactcaattgacaactcagcaagaattgtgtcagctctatctaatttctttatgtgaccctttgcagagaggctgcatggtctgatggaaaagcattaagcttttgtgtttgagggctcccttctgattcggatcccctggcatattccacttgaaaattattgttaatggaaatgccgtaaaaagaactgcctctgaggcagattttattgcttcaatgtaaggttctaaatataggaatttagagttactgatggagcagctttttccttttaaaaaatctgggcctgtggtagtagattgaaagtccagattaaacctgtgtgaggtggggttttttccctttagaatgtttggtgaagatgttacttaaaaattattatggaaaatttcataatatagtagagagaaagtatgatgaataatgacccctatgtactcatcatttgtcttcactaattatcagtattttgctaactcaaggtgttattttatttatttatttattttgagttagggtctcactgtgtcacctaggctggagttcagtggtgtgatcttggctcactgcggcctccacttgccgggttcagtgatcctcccacctcagcctcccaagtagctgagacgaccggcttgtgccaccatgtccagctaattttgtttattttatgtagagacagggtctcactatgttgcctgactagtctcaaactcctgagcgcaagcaattctcccaccttggcctcacaaagtactggaattacaggtgtaagccactgtgcccagcctaggtgttattttaactcatgtaactgtcttaagttctgaaatttatgtatacatttgttgtatttaacaacagcaatagaaataaagaagtcactcaaattgtcagcctatcaccaaatagttgaccagtgtcactcccgattgtcaactttttaggtttccatagaccctttcagcctggcctgtgtaacttctatatatttttcattataatataaacatatattttgattctgcctgacatttggcagatcatttgtttccaggttgttgccttgcattcataatgaccacttttgttgttgtttttattattaaaaaaaattatcttttcccttttctttttttttttgtcttttgagacagggtctccctccatcacccaggctggacggcagtggcacagtctctgctcactgcaacctcttcctcccaggctcaagtgatccctgggatcaagtgaaccccccatctcagcctcctgagtagctggcactacaggcacctgccatcgcacccagcaaattttttgtatttttggtagagacagagtttcaccatgttgcccaggctggtctcgaactcctgagctcaagcgatccacctgcctcggcttcccaaagtgctgggattgtaagtgtgagccatcatgcctggccactttttctttttaaaatcatctttttttggataaattcccaggaatggcagtactgggttaaagtctgtgaaaaactcttgggttttgaaatgcatcgtcaatctggaaaagcaaaatgagaaacctatttttattttgcattaaatgtttatccccatgtttgtgtcagtaaatgctatatatttagaagatgtctaggctaagttagtgataagactgataaaaatgttaggtccaagcaaccacctccttctcctgtatgccaaggataaaggtgctgaggagcagtgtggttggagtaggaggcctgtctccattcatgtcctccccgatgagacagctgggacctcaagtgccttgtttatttttgcaggcaatgtcgtgaacattcagacgggccactgggttggaaagcagagtggcctgggtgccgggctggactccttctatgaatacctcttgaaatcttacattctctttggagaaaaagaagacctagaaatgtttaatgctgcatatcagagtattcagaactacttaagaagagggtatgtctccctaacatctcctctgttgccttgtaaagcaaatagaatgcattctgaagcgtttgtattttttttaacacacaatcacagggtctgtttatctctgccctcaccttaccacctctcctagtttgtcagtcatctgggggcaaagagctgtgttatctttctgtcgctgcatagcatagtaccccagaacctagtggcttaaaacaacaagcattatctcatgaagtttcttagggacagtaatccaggagcagctgagccagtcattctggcccaggatctctcctgaggttgttgtcaagctggtggccagggccacagccatgctaaggcccaatggtgctgggagatccccttccaggctcactttggttgctggcagtcttcagttcctctttggctgttggctggagggctcagttctttgccaaggggcctctttgtaggtagcttatggccactggcttcccccagagtgagtgatctgagagaaaaagaaagaggccaaaatggcaaccacagtgctttcatgactagtctgggaatgatataccaatacttctgccagaccattagtcacccagatcaaaatgatacattcagtgtgggagggggctgtgcaagcgtgtggctcgcacggatggaggttctcgggggccgtcttagagacttgctgctactacaggggctgacacatcccagtgtttaactgtggctttaattgcagatagatctgcaatgcaggacaatgttttggttctaatactttacaaagaactgttaggattggtttttatacttggtgatagaaaggacagttaccacatttttttttctctctgagtttgtttaaaacattattcaccattttctgttgttcctccaggatgacaggagagagagagccatttgaagctacagtggcttctacgtagtgtcactctctttcccagatctttctttttttttttttttgagtcagagtcttgctctgtcacccaggctggagtacagtggtacgatcttggctcactgcaacctctgcctcctgcgttcaagcgattctcctgcctcagcctcctgagtagctgggatcacagccgtgcaccaccttgcctggctgatttttgtatttttagtagagatggggtttcaccatgttggtcaggctggtctcaaactcctgacctcgtgatccacccgcctcggcctcccaaagtgctgggattacaggtgtgagccaccacacctggcccccagatctttctttgtatgtatttctatgttaagtgtccagtttcagtgcaagttatagctactgagcttcctgcttggattttcttgggtccatttctacattgctgttgtaggaaccacttgtatgtgctatgtttaagtaaggggccttttgagtggaatttatttatttttgcttttcaaagccacaaactaaattgagcagtaatccccaagggtcttgctctgatgcatttctccaggcccatgctgtaggacattactagagaagagactctttgtaccaaaagaaccaagcttttctgctcaggtgaaatccagcataggcccatactatatactgaattctcttatgtggcagggctcttaaacccaaagctcaaagtgctttctgcagaatactgtgaaatcctgacatattacaatggctgcgttaggaactttgatcctgtggaaaatattatcttctgctagagtctaatgtagataattaaaggcagtctgtctgcagaggtttaaggaatgagttaggagaaaaaattaatgttaattccgtttaaatgaaactaccagcagctgctggagaggtagagatctgtcagtgagctttcttttcaccactgaatgtgctgcttgggtttgcaggcgggaagcctgcaatgaaggagaaggagaccctccactctatgtcaacgtgaacatgttcagtgggcagctgatgaacacctggattgactctctgcaggcctttttccctggactgcaggtattttgccatcagatttcctaagaataaccaatcaccagaaagggcttctccctccttttctttcttttttaataccctgagcattctctgtctcctttggatttgggaggtcactgacactatacgtcttcatctctctgtttgagaaattagtctccagaatattgaacagagccattccacacaagtgcaaaaccgtgcttgagaagtgactgtgtgtgatttttgtttttgtttgtttttgttttgagatgaagtcttcctctgttgctcaggctggagtgcagtggcgcaatcttggctcactgcaacctccgcctcctgggttcaagagattctcctgcctcagcctccagggtagctgggattacaggcgcctgccaccacatccggctaattttttgtacttttagtagagacggggtttcactgtgttgtccaggctggtctcgaactccaggccttaggtgatctgcccgcctcagcctctcaaagtgctgggattactggcatgaggcactgtgctgggctgtgtgagatttttggataatccatcgctcagttgtttattccttgttcatgagtacacgtaatctctttttctgtgtgcagctcacatcaatttggcattagtggccagatagggagggcatttatttgtctgggttgtcacttttgggttggttttgtctttaaccgtatgtgtaggtcaactaagaactcgggggcagaggagagcccaggcaggccctttgtgccatgtcttgtcactctaggaatggtatctcagcctgatgacctgtgtcctctccttaggtgctgataggagatgtggaagatgccatctgccttcatgccttctactatgccatatggaaacgatatggtgccctccctgagagatataactggcagctgcaggcccctgacgttctcttctacccactgagaccagagttagtggaatccacatatctcctctaccaggtactagagttgtgtttttttttttttcctttcactgcctcccctgaccccagcagttcattcttaatgaacatttgctgagtgatttagggttatgttgtttcatagtgactctgattgagttaccccctatccgtagtcttgttagtgttcagtgtcattcgtaacttcacaggacagagaaggcatctgcagtcaaatatgtttttaacctaatattctacaaagctgaatcatgtttttaccgtaggacttataactcacatctttaagtattcatgaggaagatttggtactaaggtgttttccaaatgtatgtgaccagaagacccgtttttaggatgcaattctgcatcagtgtactgtggagccccggtctgtgtaacaactattcagacaaaaagaaaattcattttcttggttgtaaaggaaatcatcttggattcatctggatgcctgtttttgtttaatgtttgtgtttgtgtgtgtgtgtgtgtatatatatatacacacacacacacacacatatatatgtaatagtgttcatcctttgtgaaattacttcagtggtagagggaatgtgactttaactgtgaaatgtcttcttcctgacggttgaagccaggtatttatacttctgtgtatgccatacatatatacacactgagagtcctcctccatccacatgcacagcagcacgagtggttaactcaccaagaaactggccttggtgaaattcagtaggccggtaacagatgcccaccgtgggccagccctagcaagcagggcctgagttttagaaactctggtagtggggagttttagaaactctggtagtggagctaacactaagatttgaatttatttattcaacaatttttttataccaaatccttgccgtttgcttcagatgaaaaaaggggaaagaaatcctgtgaaactggtagtagtcctcatgcctaaaaagggacttcatgagttttaggtaacctctcaaaaaagggaaaagataatagccacctgtttggcctttctgagcccagtagaaagactgtacacggaggatggcgtgccggttactggctgatttcttctcttaagcttagtcctgtggcctgtgagcttactcctctttgtttctgtcactgcttctttcatgttttccgtttctccttcacgttgacagagatgtcttgcactcttcagctttaccctccgaagccacaccctgtgcacttttaatctggagactgctaaccttgttgtttgttgctgcaatctggcactaggcatgaattaaagatccccaacttttaaactgtttgttggataaaggcttatcttcccagagaagtttttctctagtaaaaccatctaagagtatgtgtgagaagagtaggcaactgaggactgatttctcagggtgattagaaaggaaagggtggcggcctcctttcatacttcggaaagtcttgttcccatcagcctttcctcatggtgccataactggaatggcggcaaggtcctctttcctgtgcctgtgtcttaagtttctggagagttctgaggcaagatagaaattggatttgttctcagatatggtgctgtcagcgtgggcattgttttgtttctaatcatgatggcaaccaaagtagactattgttctaccctggaacagatggtcttacccctggctaaagttaaccaaatcacaggtactctttgatgtgaactgacggagtaccttagtcctctaaccattgtgaccctgcaagataaatgacctgggccctgtttcttcctttggctggcgactcgtctccatggggaagccccgcagtcaccatgatgtttgtcgatggcatgtcttccaagcccatgctggatcacattctctcgtgttctctctaggcaaccaagaatcccttctacctccatgtaggaatggatattctgcagagtctggaaaagtacacaaaagtcaagtcagttttctaagttcctacctttttctgtcagccacttttaatttatttcaaattgttttggggaaatatcctagtttgcattttaatttatagaaccaggtcattaatgttacatttacagggaaattgcttaccttttggtgtagtagaacctttccattgtactgagaactgccctttcttttccgtgaggttctagcagattatgggtgttcattctaacttctttcccctagttatataataacatatacgctaaaatgtttagggagtacagaaaatataaagcagtagaatattatcactgtaatctccacatacagagaaaactgtagtcagtattgaaatgtatgtacttataatcttttaaatatttttatatatgatgtgtgtatatatgtatatataagaaacatactctatatttcaattttgtgacatgcttttttttacctgctgtaagtttttttttttaagtactatcttaaataataagtcaatactcaaataataagtcaattctcaataataagtcaattctacaagtattaggactagaaatttaaattagtccttttacatttgttgccggtcattttcctggtgccacgttatgcttctggccagcaccccgccaccacgcccacaccctctaactcacctgataatttagcagccaaaagcacttgctaagtaaatttgcaaacaacccaggctataaaaaaggagagcccctcaatgtaaacatagtttcatatggtgttggatgactggttgattattctgataagagaatgtttctgcttcttaagtgaatcagcaggtgggaaggaagagaggcaggactgaccagatgattgttttgtaggtgtgggtacgccacgctgcatcacgtcattgacaagtccacagaagaccggatggagagcttctttctcagtgagacctgtaaatatttgtatctggtatgtgtgttgcaagatgaacccaggaatatttagtattgcttagagcaagcattcgcatagtcttccatctgacaggtacttactggctaaagctatgtgctggacattgtgcattcccaggatgcaaacgctgtcagaaccaaaggatattactatcttctttcatggtttccaaccttgttgaaaagtcatttgtcaagtaaaccaagaactgaacttatgattacaaactgtgggaaatcctggtaacgattgatacagaaccagtgttagttctgtatctaactacaggtggtcggggaagacgcctctgaggaagagagctgtgttcataatggcttctcacttctcttgatgtatgtgatcttagccaagacctgcagctcagccttgtctctgtccatacacacatcctcaggcacatgagtgagtgagtgtgtgtgtgtgtgtgtgtgtgtgtgtgtgtgtgtagagagagagaatttctggacctggacgaaccctttggtattacctaatgttcatatgttcatcatttccctcacaagaactacagcctacacagaggtcaggcgacttgctcaaagtatggcgatggctgtggcagagctgaggtgtgaactgtggtcctgactccctgtctggtgctctttccatctcaccgctctgcctcgtgcatacagccactctcgtgccccctgccactttcctcagtatggccacatagaaacagagggcaggatttccaggttagaagatagcatggcaactgagaacttgggcagagggtcagagatagaagcagctgtgataaattgtgtttatctagttccgtggttcctaggcctggggctagctgggtccaaatcaccctggggcccttgctaagatgacagccatattaagtcagaatcttcagaataagcgggctcagaaatctgtcattttgacaagtgcctccagtggtttcacatgagccaggttttggagctgctggtctaatccattaagacgatactcttctctgtctggggtcttttcacagatgactgcagaggtatgtccaccagcagcccatgtgatctgtccagtgggaagacagctgtcctgctgtcgattcctgtgtgtgcagtggttcttgctctccttgcaggtggctcagttctgctaaatcaggctggtcagagcctagctacatatttccatccagcagccactggtgtcagaaggacgttaacagggcgagttttagagtaaaaggaaggtgaccctggagggtgtgctagctgaaagaacctagagtctggggagaggaaaacctgtggtctaccctgttcttctcttgttactgtgtaaacattgacaagctgcactgaatctcatttttcctcatcttgaaatagtttaggtgaccaataaagtttcaaagagtttctaggtattcattcattcaacattcacagaacacttgccttctcctgcactgttgcatcccatattgggttagatgttctttctagatgctctttcgttccgtgtcacatgcaccattgagggaaaggactgtgccttgtgtccattgcgtcttcagagcccaacccttgttgtgcaagaagtgaagtgaatgttggcagatgtgttgggctctgtgctaggccctggggaaatggtggtggataaaacttggtccctccctgtcagcatttacagttcagggtctaggtgtgtgtgaggttgggtgtagttctagaattccagcaggagaactcttaggtagcacgtggaaatcatccagtgaacttttatagactacctgtgcttgggccttagtttcagaatttctgagtctctgcgtctgggcagggtatgtgtaggggagaggcaggtctgggcatctgagtttagatgaagcaggtgattctgccttgcagcctgggttgggcaccacagttgtcagtcaattccttttcacccagttgtcactgagaagcatgaggcccaagcaaattctactccctgagtagctgggacacgcccccatgattcagttcccagtgtgctacaattattggttgtatctttttctccgttccctctagctgtttgatgaagacaatccagtacacaagtctggaaccagatacatgttcacaacagagggacacattgtatctgtggatgagcatcttcgggaattgccatggaaggaattcttctctgaagagggagggcaggaccaagggggaaagtctgtgcacaggccgaaacctcatgagttaaaagtcatcaactccagctccaacgtgagttgctttttccaggggtgatttgcatatagaggaagagaagatactatgaattgcttagttgttcagacttcctgacagaaaattgatggtgtatgcagattgggagatttgaaaacacctcctaaagacaccatttacatagctgttgtcagggtatagggaaaccgcaggagcagcggtggcatcatcactgctggctgcaggtgctggtggggagagtggctacaggatcctggaaggggggagccttgtgggaggagcgagcactcagcaggagccacggctcagatctgactttcaaggccttgcctggagggagccggcagagtcaacatgtgacccctccccgctcccccagttgcctgctggagcatcttcttggctgcctggggcagaagctggaggccgagggagcctgttgatatgatccatcagtggacctggaggggcaaatggaagacattcagcaaaatcatttaccagcagcagaagggaaaaaaagcagtgatggtcacgatggtcccaatgaagatgctcttcgaagtgcagcaaacacccacattcatttaaagtggggctttactccacatgcctagattgtcctgagaagcagcaggaaaaatttggaaatggaagtccttgcatccctagtgaaagtatcaggtagttgtgttgatttgaatcaaataggatgatttggaagtgaggatagggaaatgtaggtcagtcaaaatttcaaatcttgttatcccccagggccttggtggtcaggagttcggcagcctccccacagatgggttgccttggcattaggggtgccctctcatcgccgactgtgcttcagtgcttttccgttaatgccccagtgaaggtcttcaccatcagtctatgaagtaaatcgataggccagagtgtagataaccacccccgcccccatttccatcagtcatggagcactgattgagtggacaaagcataatcgggaggaaggggaaggagggtgagagggggaagagttaataacagccagcatttgcaaacacataccagggttagcctttgcaccattctaaacgcttacgtacattaatctgtttacttctaacaacagccctgtgaggggtggttacttttaacatctccattttacagctgaagaaagggaggcacagagaggttcaggtcccacagtggagccaggatttggacccaggcagtgtcttctcttttaggaaggagacatctctgacctgccatactcactaatagatctgatcccatgattccaggcaccagggattcaggccctcagaagggctcccggttctggataggagcatggcctagtggggaatccacttccatcctaggcgtttgtctgtagtgctgttgaaacacagagggtagggagtaatctccagagaaaatcaaggcaggattccctgaggaggtcacttgctggagatccttgaaggatgaaaaggggtatcccagaaagggtgttcaggcagaagcagtagcacctgcaaaagcacagagatgtgggctggtgggggcagtcgggaccaatggaaggaccggccagtcttgatcttgccagggatgaggagcagggtgtagtaagttcaacttactacaaagcatggggaaaatgtttctttggagatgaagcagataatgaatgtatttagacaactgcttccagggatgtcacagttggttagttctcaagatgtgcatctgctttgaggaaaaaaagtggtgggggtgggggggttttaattaaagaaatagtcttaagcatttagagtttagtgagttgtgaatgagaaaaacatagctcagaaaaacacagtattttcaagtagcagaaatgttttctgaaattctgggcggactaaggaccccagggatgtggctttcagtcctggccacgaagcagttgctgcgatgccttttagcttccctggatctgccatttctttataaagtgagtgaggatgttaaattatgtcactggtcttcacctgagggtgattttgctcctcagggaacattggaacagcgtctggagacgtttttgattttcacagctgaggcgtaggagttgccactggcacctagtgggagaggcaaggggtgctgctgaccgtcctgcagtgtacaggcagcttccacaacagttacttccaaacgtcagtagttcacaggctgagaaaccctggattaagtcatccagtcacatttcctgagagagcaacatatgagtttttaattttccctcgtttttgtctttctagtgcaatcgtgtacctgatgagaggaggtactccctgcccttaaagagcatctacatgcgacagattgaccagatggttggtttgatttgatctgctctctgtgaggcctcatcttgaaccagaccttaacgaccaaacccagaccatgccaaagtccagtctgaaatgaaaggggacagaagtcttgctgtccatggtggtgtaggaatttctgtgcaacacctcaccacgtctggttaatccttgcacacttcagtgtttctctcctgttcaataaaatgccctgttaaggatataatttgaagtgagaagatacatggaaattgccctcttatgacatgttgatgttataagcacaatagatggggcatctttggattgatgttcacagctttatacttcagaacctaagtctcttcactttgctggcacctgctatactggagtattgctatgtctttaaaaaattttttttattatattttatttttttgagacagggtcttgatatttttttgggacagggttacctgggctcaagtgatccttctgcctcagcctcccgagtagctgggattacaggtgagcaccactgtacctggctagctacttctttgttagaggattgagaatgaaatttctgcaaaagggcccatggttcatttggtatccctatttaattgcattgaaaatgtcatcctttctgttgttagataattggggtcttcccctgatatccaaccgtgattttggatcacatgggagaaaaagtcatccagtttttcatgtttgcctcaagtaatctttacagtgttacaaattatttgcttaagaagaatggtcttaaccagaattcttaacagatagtctcttaggttattatgttatggtctaagaggttaactgacatcttttgggtggtattttgcattttgaatatgaacttacctgaggaactcccatagttccagaatcaggtgccttttagggagagaacaatacctaagattgtctgagcttccatctttctcatatttcctaagcaaggattctcacttctgaccatatttgggttagagttctgttttgtttctgttttctgtgtctagtgccaattagctaaatcagggagaaagaaatgatcacatgacttttagcatccttgagccatttctctgtgtaatacaggctttagattagtgccttatattggttttggtttggggcactggatgtcgcagctactgctatggtttcaggaggcctgtttagccacatggtgagaccgtggtgaaagggggatggaaattgcttggccagtctttgcctttcatcctgtaaaagtaagcatgtagaaggaggaagttgtgctaaaatgcctttgtttttttgttattattttcttagccagaacatctctctttgaactcacactgatacacacctgctactcttacacagtgcagcagggctgactcttagtctggcttccatgaagcgtcatgggtggaaacgcattctagtaaaaaaggtaggaaatccctaaaacttccagcctcacatagcacggttctcacctgtcactgttttcccacctctaaggatttcatgtacatcttttcaaagctagaaataagcactgtctaagtttatgttgcatttttagtcaaaagggagaaatcttattccttcttgaaaattttaagtgttatggttttatatagttcagttctttgagatttttgaaaagagtattttcagtaataaacgtgccatctctatctcttaaacatttattacaacaattgttttaaaatagaaaaaataaaatgcttctattttaccttttttcatttcagaagcattattctgtttattaacagtgtcccatctactgaatagaaaactttgagaataatatatatatatattttaaatgttttcactgactcattgaaaatgttaattacacacacatgcatgcatgcacacacgagcatacttgtacctttgtctctgggcaaacaggtgggactgttagtgacccatttgggaaaatagagcatctcagagaaggaggtgagttcttcctgcctgtgatttctcttggcgctcccctcctctcccgctctggcttctgtggcggcagtggtgggtaagcactccagtgttctcttaatgaggcactttgcctgtcactcgagcaagcctgggtgttccttcctcctcatgctcctggaatagggaatagggatctcatgcttgcaaactacacaatgctgcaggtgcttcccaggggccacaggctgtcaggaaacgtgttttatgttaagtcacaaacccacttgacttctgggtactggaattaataccagtgggtgagactgagggtgagtgagttagtacatattaatcctggttgttgagcttccagactaccccgtccaaagtttgatgctatgtagtcagtggtttgtggggctggatgccagaaggttctttgagccagtttcaaaggttacttgttttttttttttttttaaagtcagaatgttaacagctgtgatatatcctgcagggcttttgcagtttcttctgttctgtgttctgaaatactgggtagagaatggctgaggaggagattaccagagaagttgctttgctcagtgctttgccccaggattgcctcaaatctgagtggacttcatcctttgcggcggctctgagcctggcccatcttcctattcccacgtgtagctagtgtctagtgtcagctttgctcagtgtggtggaaacattttgcagaactgttgtagaaagctgccttatagttggcttgacaaagcataattctctcataacaaactttcaaatcattacagtagcttagctactttagttgatgtgaccgaggaatcccttctagaatcataggtggcaagggagggtttgctagctctccatttgcactggccattgtgaaaaaccagcttctgtattcaaatctttccttcatttttttaaattttttttttggcagcgcttgtgctggaacttactcattgtaactgaatcctcagggcttttcttgttttagatcatggactgtgcacgtgacacttaaataattttctatgtatttaaagaaaaatgcaccaggatggtgtctgtgcacgtgactattagaggagcgtctgtagaagtacctggtttggtcagtgcagttgtgcaatctgagggccttgtttcctcctcccctttccccttctccccaccaaaggaaaatatccctcttaatgatttcgtagttcagtttactgaatgattaccacctgtaattcctctttggattgtgtagactcaacatgagacattcctttctgctttctggagggcaccaggggcctttctctttgataaattttttttgtctgttgacaaaaacaaaaatcttttttcaaatgtagtgctggtgaaaaggtagggctgagtgattaccttagccacagggtggctgagcaggaactttagaagaaaatcctgagctttcctgtccattcccagcatccagctcctattctagtgcctcttccctgcagggcagggaccccttgggaaatcgaggaggtgggacgggctgggccctgtgtcccaggtttcacagggctcagggttatgctcccgcttgaatctggacgtgaatctggtaaaaatatcaagtacctgtggaactccctgattctataccctcttccttctttctgcaaggcagaggaataatatttttaaaggttattttgttttagttttaaatagcaaaacacaagctgcatttttatttattttgcataagaaaggtaaatctttttacaaaaaaaagtatagagttggaaactctgggaaaacttacggaaatacacaaatgcttctctgtaatgtgcaatatgctttgcaactgtagatgatattttatgtttaatctgtaaataagaaatgtatttaaattaaaagggatctttttgtaaaaggaccaaatgttcttttataaatgtaataaggaatatcttgctctttaaaatttattaggatttttatgagtaatttttattaaaagatttctttttttgagttgtcatcttgtttcttttttacattctcatgtacattacattacatgcaagacaaatgggagaaaagtctctaaaggaagtgcccatctagatgaataaaaccttgctttttatagctaagccctaagtaatacctcccccatggaattccactacatttttgtatgtcacactcttccattaaatgcccctcacatgcaggtcagaactgcttttcatgacttttgtcccagccctggccttcccctctgcatcagcctcctttctcttggccactgagttcattgtctattcttattgccaattagctgagtgtatctgggatctaaaaccagttctctgcgttatctaagcaaggcgcttcatttctcctcacctctgagagcagtggcacttcacggtctgtgtgggtgcagaggcccatgggaagcgtgtgggtagagggttctggagggctggcctccctccctgtgtgttgccactggggaccatggtgggatcctgaggaagggacctgctcctgctttgtgacatctgtgtcccagctttggtcacagacaattttgatacgggtttttttttttttttatttgagacagagtctcactcagtcacccaggctggagtgcagtggcacgatctcggctcactgcaacctctgcctcctgggttcaactgattctcctgtctcagcctccctgagtagctgggactacaggcacgtgtcacgacaccaggctcatttttgtatttttagtagcgacggggtttcaccatgttggccaggctggtgtcaaacacctcacctcaggtgatctgcccatcttggcctcccaaagtgctggggttacaggcatgagccaccacgcctgatgggcctttttaaaggccacgaagcatgacagggcgaaggagagactctcaaggctggaaacaccttgcccacattgagctctactattgtgaggggtggtggggttgtgtttgtcaagtcttgtgggtttgtgatcttgacaaaaccaagcaagtccagtgggccaagggaccaaatcaagagccacagggttcttgccttcctgcctttcccactccaggctgcctcagtagtgggagcaccaggccctttgccatctgtggagcaagtggagcccagcagtcctgtatgaacgctgtagtcagtgtcgggtggagtatggggactctgggccacacggtgctgggtacaattccaactctacccctaacttagctgtgtgccttgggcaagttacagacttgatggcctcagttttcctgtctagtaaatgggttgataataatagcccatactcaggatagttgtgaggactgggtggattcatatgtgtaaggcacttaacgtgtttcctataattatggtccagctggatttgacatccaggatcagacctagggcttaaacagggatgctggaggaagagtaagaacatggctggccatggggaggctgggctggcctcctggctttgtcctggatgtgtggcttgggtcaaggcactcaccttcacacggtgtcctcacttttaaaatcagagatgatagcacatcaactcctagggttcccgtgatggcaaaatgaattagaagctacatttgtcagcgtgtgaggcggcagctgctaaaatgtttacaggttatgtctctttgtcccttaaagtttttttttccttctttaatcaaggaaatatgctaatgtcttcctaactcagaaacccagaccaggaggtgcagagtggttgggtgtggtggtacctgtgcctcagcacacctggtctttgtgcttaagtgtctggcccagtctgctagtcagtggcctatagaatgaacagtccctccccactctggctctgtgtgtgtgtgtgtgtgtgtgtgtgtgtctgtttatgtgcttgtgtgcactcacgtgcatgtgtgtatggtttaaaagcctgttacattcaaacctcacccaagtcctgagcagtaaattctatgattccatttctccagcagagaaccctggaaagtaaacaatcttgcttcctgtcacagcggaacccactggaagcaacagcctgacgctctcttttagatgccgtcaaccttaaatgatgaaattcagaaaatatgatgaagtatattagatatatgattaagagtttattagatcccaaagctgggaataaccggttacccagggaacacagactccagaaaaatggggtcaatgctcccaagttagaagttaaggtcttgcttacataggtagaagacaaagatatctagtaggattaaaacatattccgtacgaggatggtttacgagttaacaacagttttgttacagttttgtttattttctgtacagcttgttttcatgtcctttccaatttaagagtccatttaacattccttcttgagacagtgtgatagtcatgaagtctttgtgtgagaaagggaagagggaagttaatctatagtgaagatcaacagtgaagaaggaaggagacttccctggtgccctttagtcacttcttacaaagcaatgtaggtaaggaagaaggctaatctatagtcagaaaaataaaggttacagatgcctgaactcaggtcccataatcacatttccttaaggcttgaaatatttaaaagttccaacagcttaaatttgaattacttattttcacggtgccattgtgaatggtttggttctagcccccgtatgaagagaagggatgtcgctgtctctccccagagggagtagctcgacctttggtcagagacgcaagtagaccctccccagggctggaggggcgaggctgggactgggctgcgcgcctgcttctggcttgccaggagcccagcaccaggtcctctgcagctgccagggatgaagaccccagaaggcacactgtgaatgccctttctccacaattcagaatattctctctgcctgtgtcggcgggtaggaagaaggctacttttggggacctacactgccccacaccacagagagctcctctttaaagagcttgcttctcaaacatccaccttttcaaggtaaagtctctcatcgtggggagctttgaagacgctctgctgcacggctgggtgcccttcaatgatgggctcgtcaaattctcgaagaaaatgacctgatcatttgaaaagcttaacgcctgcttaataaggcaccaaaaaggaacaagagccagttgccatcgttagaaaacctatctggaccaccctaaactgattttggggggtaaatactgacattttaaaataaaactttaacccttttaaatatatccattgaaatctgtaaaccgtcataatttgttacccgccatcatctattaaagaatatattccaatttatttattgggaattttagattgtctctttttctgcttgaattagtatttacatttcttcctccccacagaattttataccgatttaatatatttcaattctataaaatccttaacaattttctgtgttcataagtttctaagtattaaaaaagtctttggaattgagctgacattacaattagttgtataaacaacatatatattttgatagttattaacaaaataaaaatttattagaaaagtttccctttgttaaatgacagttttgtttttccacctctttaattgaattgtatggctgtggatgaatactgcttactgttggaatgagatgggtttcagcatgaattatattccttttttttttttttttttttttttttttgagacagggtcttcctttgttgcccaggctagagtgcagtggagaaaccatagctcactgcagccttgaactcctgggctcaagcagtccttctgcctcagcctcccaagtagctgggactacaggtgcgcaccaccatgcccggctaatttttgtatttttttgtagggataggggcttgccatgttgcccaggctggtctcaaactcctgggctcaagcaatcctcctgcctcagccctccaaagtactgggattacaggcataagccactgtgcctggcccttattttttattttatggatgtaatgtattcacacaaataagtgcacggaaatagagtttttattgtagatattacatatggatatctatacatagatataaatgtcttaattgtatgtctgaataatgtcaaaatttacataatactttatcataagaactcgtttttgagaattctgtgctgataaattaggctctctttcaattttgttgtaagcagacttggaaaacactgacttgcaaaaaggtaggtattcagctattagagtcattcatttttgcagtttctggaacatattccagaaagcccctccaaaacataccaaatgattattcattgtacctgttgttttatttagagaggctcaggtaacctgaaacactcagaaagtgctgggaaatttaaaaatacagttgacccttgagcaacacttagggatgccaacccctgctcagtggaaaattcgtgttaacttttgactcaacttaatcactaatagcctactgttgactggaagccttaccaataataaaacagtcagctagtacatattttgtaggtcatatatattatatattgtatttatatgatatagtaagctagagaaaagaaagtgttactttaaaaatcataaggaagagaaagaatatgtactattcataagtggaaatggatcatcatagaggtcttcatcctcatcttcacgttgagtaggctgaggagggggaggaagtggaggggttggccttgctgtctcaggagtggcagaggtggaagggatcacacagtgtgtctgtgtgtgtgtgtgtgtgtgtgcatggatgtgtttagccagggtctcccactgtccccaaggctggagtacaatggtgccatcttggctcatggtaacctctgcctcccgggcttaagtgagcctcctgccttggcctccaaaattgctggaattacaggtgtgagccaccacgcccggcctaccagtattttaagcagatatatgcaacacttgaacccaccacattagcaataggaggtggctataaaattattacagtagttcagcatgtactacagttaatttatgcagttatggtttaatactgcatctttacatttaattacataaatgtacagtgtgttcatgtaagttttaataccttttaactataataaattcacatgtgttttatggtaataaatgataaaatagactagtagctacatatatttgatgcatttatgacatatcttcttcttaaatgttttcaatatttctagcctacgtgatttgtctttttcaatttgtcaaaaatcccccccaaattttccagtgtagttattgaaaagatctgtgtattaagtgggcccacgcagttcaaacccatgctgtacaagggtctactgtactattaacttcaacacatctctgagagtagttttttaaagtgcctttatcttgtcacctcctttaactatatttgcaacaaaagctcagagctgtagctctagctcattcaatttagagagtgtatccatcgtataacttaattggctaagccagtccttgttttccagccaatcaaccctatcagccttatttgttgaaataaagataaaaaaagtctgatctaatgctaatagactgagcggaggagcccagcaaggcctgtctgtcttgattcttcttgacttctctatgcatcattgctttccttctgggtgtgggacaggaccctctctggaatgggggtcttaggacctgcagtcaaagaaggtaggtcaggtaattttttaaaatgtatttattattattattattattattattttttttttttttttttttgtagagacaggatctcactatgtcatccaggctaatctcaaactcttggcctcaggcaatcctcccatcttggcctcccaaaactctgggattacagggttagccactgcagccagccagataatttttttatttctttttaaaagtatttatattttaaaagtttatttagagatgggatctcactatgttgcccagggtggtcttgaactcctaggctcaagcaatcctgctgcctcagcctcccaaagtgctgggattacaggcatgagccactgcgcctggcccagataatttctttatggccagtttttacatagaaaggcggagagaaagttagagtaatatttttaagttttatggctggctttggggaaagagggttctggtttctatggcctgccttggaaaagagggattctagtttctacggctagccttggcaagggcagtggaactgagagaagggagggcaagagaaggtcagagaaaaacttttgcttctgaggccttcatttttggggtattgttttcagagccccaacagtagtgtttaatgaaaacacaatgatgtgcgccacacaatgccagcgggacttgctggacccccgaatctcaaagactacgtcctgaacacctgctcgggctcgcctgggtggcttggagagcacagagtaggaagctgccggccaacaggaaaaataaaacttttcctgctcccaaggaaaggctcctaaatataggctaagattttatgcgtgcatttccataagccatccactctgaaaatgggccgttttccaccaatgggcatcaaattcccgtgggatgattgcagttaacaataatatatagcatcacatagctggatggaagctattgagctttcccaacacaaagaaatggtaaatgtttgagatgatggatatgccgattaccctgatctgattactatacattatgtgcgtcaaaacgtcattatataccccatgaatatgtacaattattgtcaatttaaaaagtcctttgccatttagtttataaaaaatggttgcaaatactgctcacttccacaagagaccactattgcttcactttttccaaagatgccttttaaaaaagcagtttgaaaaacccagtggtacagaaaaagaaaatagtgttgtatgttttgttttgagatggagtttcactcttgtcgtccaggctggagtgcaacggcgatctcagctcacttgccacttccgcctcctgggttcaagtgattctcctgcctcagcctcctgaatagctgggataacaggcacccgccaccatgcccagctaatttttgtatttttagtagagatggggtttcaccatgttggccaggctggtcttgaactcctgacttcaggtaatctgcccaccttgacctcccaaagtgctgggattataggcttgagccaccatgcccagccgtgttgtatgttttaaagacagtgcgtagaaatgtaatttcatggtcctcaggatcttgtttctaaatcttggcttgtgcagctaattgaaacatgagtaatagtgatgaccacaatgatgacattgtgtatctctataggggcttagtcccaagatcatagctctttcatatgtattacacagttaacacaattggccaggcatggtggctcacacctgtaatcccagcattttgggaggctgaggcaggaggattgagcccaggagcttgaggctgcagtgagctgcgatcataccactgcaccccagcctgggagatagaggcagcccctgtctctaaaacaaaacaacaagcaaacaaaaaaagactcacaattctgtgatgtctcagtattctcattttccagagaataaaactgagcttcagggaaatgccaccaattgcatagttgagtcgtgatatttcagcaccaaggatgagtaaggagagggagaaatggagacctattatttgggaagagcaccttcctcggcattgagtggtttaattttcatcccatgaagctgctttcagcctgatatgaaatcaggttgaagataaagcttgggaagatgcccagcgtctctcagcactcacagaatgttgcacaattgggagtttcccgagacgaaagctcctgcagcctctcctccctgcagcctctcatcactagcttctaccctggatgttggcagcttccggtccggtggagcctcatctcctagagcctcctactagttcccaccctgcctgcagtttccattaacccatttggcagagagaaggcaggatttggagtcaatgttttagatttaaatctggactgtgctcattagctgggtgaattagtaaacctctctgagtctcagtttcctcatctgtaaatggggctaattctagctatttcacagggttttgtgggagattcaagcaaccaagtgtatcaagggcctcgcgtgtggtggatgggtctactgagcaaatcctttttccctttcttcctccttcgccctctgatcagctgcctctgtggtcattattcctagttctgacagcacttcacagaacacttgtttctgacctatcgggttctggcacaaccctatggtccttgggggcagtggctggcatgattgctaaacaattgctggatggcttggacagaatctacattgaactgtctcccgggggtgagggatgggggttctgaagtgagtggtcaaaggatcacagtttgagaaccacagccttgggagtttgctaggggaacctgcaccaaaggcttaccttcggggatagatttaatcacaatttaatttcatttgcaaatctggcccctctaggtggctccctgctgcaccttcctaaggaccctctgccattcagtagctgctgtatcaccttgggaataactactaggagatgctgtctttgacagcagaaaggctcagttctcaaactatggttcctggagctacagcagcagtggtggcaactcttgggccccacccaacattgaatgggaaactctgagatgggacccagcaacctgcgctgtaacaagcactccaggtgattcctcgggccagtggcagacaccctcctaaccctgacagatcttggaatctagtctcttccaaccttaggctggtaggggtaagggtgggtgtgggggttctgctccactcttctgagtgtgcaggcggtgaacatttattaagcacctactaggtgtgctgaccgctgatcactcattgtcgcatctatcttgccctgtcaactaaaccatatatttatagttgagaggtagattggtgtttgatatggtttggatctgtgttcccgcccacatctcatgtagaattgtaattcctagtgttggaggaggggccgtgggaggtgaaaggataatggggtggtttctcatgggttaacaccgtccctcttggtgctatcattgtgataatgagtgagttctaatgagatctggttgtttgaaagtgtgtggcacctcccctctctttcccttcctcctgctcaggtcatgtgaagtgctggcttccccttcaccttccgccatgattgtaagtttcctgaggcctccctagaagctgagcagaggccaccttgcttcctgtgcagcctgtggaacggtgagccaattaaacttcttttctttataaattactcagcctcaggtatttatttatagcagtcccagaatgacctaatgcagtgtttctgattcattcattcttttattcaactaatactaaacagtattatgtgccaggtattctgggtactggggatatagtgatgagttatgccttcacagaaataaatacatgcagaaataaataaatgaataaatgcatgcagaaatgaatgaatgagtacatgcataaatgaatgaaaatacatgaagaaatgaatgaaaaaataaatacctgctataatgctagagtggcaatagctttgagggcaaagcagaaccagaggatagaatgttcggtgtgggagaggggaatgcgcaaagagaagagggggccacttgctttttcttggatgatataaaggatgaatct

SEQ ID NO: 860 - DNA, 5233 bp, Homo sapiens
gggttggggacgatgggctagttcctggtgcgtcacgggggagttccttaaaggggaagcgagccgggctacggggcgagcgcggggtgcggtggtcggcggggaggcccccgcgctttaaaataatgcccgcggcgcccgcgcgaccatgcaatggcgagcgctcgtcctggggctggtgctcctccggcttggcctccatggagtattgtggctcgtcttcgggctggggcccagcatgggcttctaccagcgctttccgctcagcttcggcttccagcgtctgaggagccccgacggccccgcgtcgcccacctcggggcccgtgggccggcctgggggggtatccgggccgtcgtggctgcagccgccggggaccggggcagcgcagagcccgcgcaaggctccgcggcgtcctgggccggggatgtgcggcccagccaactggggctacgtgctgggcggccggggccgcggcccggacgagtacgagaagcgctacagcggcgccttccctccgcagctgcgtgcccagatgcgcgacctggcacggggcatgttcgtctttggctacgacaactacatggctcacgccttcccccaggacgagctcaaccccatccactgccgcggccgtgggcccgaccgcggggacccttcaaatctgaacatcaatgatgtactagggaactactcattgactcttgttgatgcattggatacacttgcaataatgggaaattcatccgagttccagaaagccgtcaagttagtgatcaacacagtttcatttgacaaagattccaccgtccaagtctttgaggccacgataagggtcctgggaagcctcctttctgctcacagaataataactgactccaagcagccctttggtgacatgacaattaaggactatgataatgagttgttatacatggcccatgacctggcggtgcggctcctccctgcttttgaaaacaccaagacagggattccatatcctcgggtgaatctaaagacaggagttcctcctgacaccaataatgagacatgcacagcgggagccggttccctcctggtggaatttgggattctgagtcgactcctgggggactccacatttgagtgggtggccagacgagcagtgaaagccctttggaacctccggagcaatgatacaggattactaggcaatgtcgtgaacattcagacgggccactgggttggaaagcagagtggcctgggtgccgggctggactccttctatgaatacctcttgaaatcttacattctctttggagaaaaagaagacctagaaatgtttaatgctgcatatcagagtattcagaactacttaagaagagggcgggaagcctgcaatgaaggagaaggagaccctccactctatgtcaacgtgaacatgttcagtgggcagctgatgaacacctggattgactctctgcaggcctttttccctggactgcaggtgctgataggagatgtggaagatgccatctgccttcatgccttctactatgccatatggaaacgatatggtgccctccctgagagatataactggcagctgcaggcccctgacgttctcttctacccactgagaccagagttagtggaatccacatatctcctctaccaggcaaccaagaatcccttctacctccatgtaggaatggatattctgcagagtctggaaaagtacacaaaagtcaagtgtgggtacgccacgctgcatcacgtcattgacaagtccacagaagaccggatggagagcttctttctcagtgagacctgtaaatatttgtatctgctgtttgatgaagacaatccagtacacaagtctggaaccagatacatgttcacaacagagggacacattgtatctgtggatgagcatcttcgggaattgccatggaaggaattcttctctgaagagggagggcaggaccaagggggaaagtctgtgcacaggccgaaacctcatgagttaaaagtcatcaactccagctccaactgcaatcgtgtacctgatgagaggaggtactccctgcccttaaagagcatctacatgcgacagattgaccagatggttggtttgatttgatctgctctctgtgaggcctcatcttgaaccagaccttaacgaccaaacccagaccatgccaaagtccagtctgaaatgaaaggggacagaagtcttgctgtccatggtggtgtaggaatttctgtgcaacacctcaccacgtctggttaatccttgcacacttcagtgtttctctcctgttcaataaaatgccctgttaaggatataatttgaagtgagaagatacatggaaattgccctcttatgacatgttgatgttataagcacaatagatggggcatctttggattgatgttcacagctttatacttcagaacctaagtctcttcactttgctggcacctgctatactggagtattgctatgtctttaaaaaattttttttattatattttatttttttgagacagggtcttgatatttttttgggacagggttacctgggctcaagtgatccttctgcctcagcctcccgagtagctgggattacaggtgagcaccactgtacctggctagctacttctttgttagaggattgagaatgaaatttctgcaaaagggcccatggttcatttggtatccctatttaattgcattgaaaatgtcatcctttctgttgttagataattggggtcttcccctgatatccaaccgtgattttggatcacatgggagaaaaagtcatccagtttttcatgtttgcctcaagtaatctttacagtgttacaaattatttgcttaagaagaatggtcttaaccagaattcttaacagatagtctcttaggttattatgttatggtctaagaggttaactgacatcttttgggtggtattttgcattttgaatatgaacttacctgaggaactcccatagttccagaatcaggtgccttttagggagagaacaatacctaagattgtctgagcttccatctttctcatatttcctaagcaaggattctcacttctgaccatatttgggttagagttctgttttgtttctgttttctgtgtctagtgccaattagctaaatcagggagaaagaaatgatcacatgacttttagcatccttgagccatttctctgtgtaatacaggctttagattagtgccttatattggttttggtttggggcactggatgtcgcagctactgctatggtttcaggaggcctgtttagccacatggtgagaccgtggtgaaagggggatggaaattgcttggccagtctttgcctttcatcctgtaaaagtaagcatgtagaaggaggaagttgtgctaaaatgcctttgtttttttgttattattttcttagccagaacatctctctttgaactcacactgatacacacctgctactcttacacagtgcagcagggctgactcttagtctggcttccatgaagcgtcatgggtggaaacgcattctagtaaaaaaggtaggaaatccctaaaacttccagcctcacatagcacggttctcacctgtcactgttttcccacctctaaggatttcatgtacatcttttcaaagctagaaataagcactgtctaagtttatgttgcatttttagtcaaaagggagaaatcttattccttcttgaaaattttaagtgttatggttttatatagttcagttctttgagatttttgaaaagagtattttcagtaataaacgtgccatctctatctcttaaacatttattacaacaattgttttaaaatagaaaaaataaaatgcttctattttaccttttttcatttcagaagcattattctgtttattaacagtgtcccatctactgaatagaaaactttgagaataatatatatatatattttaaatgttttcactgactcattgaaaatgttaattacacacacatgcatgcatgcacacacgagcatacttgtacctttgtctctgggcaaacaggtgggactgttagtgacccatttgggaaaatagagcatctcagagaaggaggtgagttcttcctgcctgtgatttctcttggcgctcccctcctctcccgctctggcttctgtggcggcagtggtgggtaagcactccagtgttctcttaatgaggcactttgcctgtcactcgagcaagcctgggtgttccttcctcctcatgctcctggaatagggaatagggatctcatgcttgcaaactacacaatgctgcaggtgcttcccaggggccacaggctgtcaggaaacgtgttttatgttaagtcacaaacccacttgacttctgggtactggaattaataccagtgggtgagactgagggtgagtgagttagtacatattaatcctggttgttgagcttccagactaccccgtccaaagtttgatgctatgtagtcagtggtttgtggggctggatgccagaaggttctttgagccagtttcaaaggttacttgttttttttttttttttaaagtcagaatgttaacagctgtgatatatcctgcagggcttttgcagtttcttctgttctgtgttctgaaatactgggtagagaatggctgaggaggagattaccagagaagttgctttgctcagtgctttgccccaggattgcctcaaatctgagtggacttcatcctttgcggcggctctgagcctggcccatcttcctattcccacgtgtagctagtgtctagtgtcagctttgctcagtgtggtggaaacattttgcagaactgttgtagaaagctgccttatagttggcttgacaaagcataattctctcataacaaactttcaaatcattacagtagcttagctactttagttgatgtgaccgaggaatcccttctagaatcataggtggcaagggagggtttgctagctctccatttgcactggccattgtgaaaaaccagcttctgtattcaaatctttccttcatttttttaaattttttttttggcagcgcttgtgctggaacttactcattgtaactgaatcctcagggcttttcttgttttagatcatggactgtgcacgtgacacttaaataattttctatgtatttaaaaagtacctggtttggtcagtgcagttgtgcaatctgagggccttgtttcctcctcc

SEQ ID NO: 861 - protein, 651 aa, Homo sapiens
MQWRALVLGLVLLRLGLHGVLWLVFGLGPSMGFYQRFPLSFGFQRLRSPDGPDTSGPVGRPGGVSGPSWLQPPGTGAAQSPRKAPRRPGPGMCGPANWGYVLGGRGRGPDEYEKRYSGAFPPQLRAQMRDLRMFVFGYDNYMAHAFPQDELNPIHCRGRGPDRGDPSNLNINDVLGNYSLTLVDALDTLAIMGNSSEFQKAVKLVINTVSFDKDSTVQVFEATIRVLGSLLSAHRIITDSKQPFGDMTIKDYDNELLYMAHDLAVRLLPAFENTKTGIPYPRVNLKTGVPPDTNNETCTAGAGSLLVEFGILSRLLGDSTFEWVARRAVKALWNLRSNDTGLLGNVVNIQTGHWVGKQSGLGAGLDSFYEYLLKSYILFGEKEDLEMFNAAYQSIQNYLRRGREACNEGEGDPPLYVNVNMFSGQLMNTWIDSLQAFFPGLQVLIGDVEDAICLHAFYYAIWKRYGALPERYNWQLQAPDVLFYPLRPELVESTYLLYQATKNPFYLHVGMDILQSLEKYTKVKCGYATLHHVIDKSTEDRMESFFLSETCKYLYLLFDEDNPVHKSGTRYMFTTEGHIVSVDEHLRELPWKEFFSEEGGQDQGGKSVHRPKFLKVINSSSNCNRVPDERRYSLPLKSIYMRQIDQMVGLI

SEQ ID NO: 862 - DNA, 6165 bp, Homo sapiens
gggttggggacgatgggctagttcctggtgcgtcacgggggagttccttaaaggggaagcgagccgggctacggggcgagcgcggggtgcggtggtcggcggggaggcccccgcgctttaaaataatgcccgcggcgcccgcgcgaccatgcaatggcgagcgctcgtcctggggctggtgctcctccggcttggcctccatggagtattgtggctcgtcttcgggctggggcccagcatgggcttctaccagcgctttccgctcagcttcggcttccagcgtctgaggagccccgacggccccgcgtcgcccacctcggggcccgtgggccggcctgggggggtatccgggccgtcgtggctgcagccgccggggaccggggcagcgcagagcccgcgcaaggctccgcggcgtcctgggccggggatgtgcggcccagccaactggggctacgtgctgggcggccggggccgcggcccggacgagtacgagaagcgctacagcggcgccttccctccgcagctgcgtgcccagatgcgcgacctggcacggggcatgttcgtctttggctacgacaactacatggctcacgccttcccccaggacgagctcaaccccatccactgccgcggccgtgggcccgaccgcggggacccttcaaatctgaacatcaatgatgtactagggaactactcattgactcttgttgatgcattggatacacttgcaataatgggaaattcatccgagttccagaaagccgtcaagttagtgatcaacacagtttcatttgacaaagattccaccgtccaagtctttgaggccacgataagggtcctgggaagcctcctttctgctcacagaataataactgactccaagcagccctttggtgacatgacaattaaggactatgataatgagttgttatacatggcccatgacctggcggtgcggctcctccctgcttttgaaaacaccaagacagggattccatatcctcgggtgaatctaaagacaggagttcctcctgacaccaataatgagacatgcacagcgggagccggttccctcctggtggaatttgggattctgagtcgactcctgggggactccacatttgagtgggtggccagacgagcagtgaaagccctttggaacctccggagcaatgatacaggattactaggcaatgtcgtgaacattcagacgggccactgggttggaaagcagagtggcctgggtgccgggctggactccttctatgaatacctcttgaaatcttacattctctttggagaaaaagaagacctagaaatgtttaatgctgcatatcagagtattcagaactacttaagaagagggcgggaagcctgcaatgaaggagaaggagaccctccactctatgtcaacgtgaacatgttcagtgggcagctgatgaacacctggattgactctctgcaggcctttttccctggactgcaggtgctgataggagatgtggaagatgccatctgccttcatgccttctactatgccatatggaaacgatatggtgccctccctgagagatataactggcagctgcaggcccctgacgttctcttctacccactgagaccagagttagtggaatccacatatctcctctaccaggcaaccaagaatcccttctacctccatgtaggaatggatattctgcagagtctggaaaagtacacaaaagtcaagtgtgggtacgccacgctgcatcacgtcattgacaagtccacagaagaccggatggagagcttctttctcagtgagacctgtaaatatttgtatctgctgtttgatgaagacaatccagtacacaagtctggaaccagatacatgttcacaacagagggacacattgtatctgtggatgagcatcttcgggaattgccatggaaggaattcttctctgaagagggagggcaggaccaagggggaaagtctgtgcacaggccgaaacctcatgagttaaaagtcatcaactccagctccaactgcaatcgtgtacctgatgagaggaggtactccctgcccttaaagagcatctacatgcgacagattgaccagatggttggtttgatttgatctgctctctgtgaggcctcatcttgaaccagaccttaacgaccaaacccagaccatgccaaagtccagtctgaaatgaaaggggacagaagtcttgctgtccatggtggtgtaggaatttctgtgcaacacctcaccacgtctggttaatccttgcacacttcagtgtttctctcctgttcaataaaatgccctgttaaggatataatttgaagtgagaagatacatggaaattgccctcttatgacatgttgatgttataagcacaatagatggggcatctttggattgatgttcacagctttatacttcagaacctaagtctcttcactttgctggcacctgctatactggagtattgctatgtctttaaaaaattttttttattatattttatttttttgagacagggtcttgatatttttttgggacagggttacctgggctcaagtgatccttctgcctcagcctcccgagtagctgggattacaggtgagcaccactgtacctggctagctacttctttgttagaggattgagaatgaaatttctgcaaaagggcccatggttcatttggtatccctatttaattgcattgaaaatgtcatcctttctgttgttagataattggggtcttcccctgatatccaaccgtgattttggatcacatgggagaaaaagtcatccagtttttcatgtttgcctcaagtaatctttacagtgttacaaattatttgcttaagaagaatggtcttaaccagaattcttaacagatagtctcttaggttattatgttatggtctaagaggttaactgacatcttttgggtggtattttgcattttgaatatgaacttacctgaggaactcccatagttccagaatcaggtgccttttagggagagaacaatacctaagattgtctgagcttccatctttctcatatttcctaagcaaggattctcacttctgaccatatttgggttagagttctgttttgtttctgttttctgtgtctagtgccaattagctaaatcagggagaaagaaatgatcacatgacttttagcatccttgagccatttctctgtgtaatacaggctttagattagtgccttatattggttttggtttggggcactggatgtcgcagctactgctatggtttcaggaggcctgtttagccacatggtgagaccgtggtgaaagggggatggaaattgcttggccagtctttgcctttcatcctgtaaaagtaagcatgtagaaggaggaagttgtgctaaaatgcctttgtttttttgttattattttcttagccagaacatctctctttgaactcacactgatacacacctgctactcttacacagtgcagcagggctgactcttagtctggcttccatgaagcgtcatgggtggaaacgcattctagtaaaaaaggtaggaaatccctaaaacttccagcctcacatagcacggttctcacctgtcactgttttcccacctctaaggatttcatgtacatcttttcaaagctagaaataagcactgtctaagtttatgttgcatttttagtcaaaagggagaaatcttattccttcttgaaaattttaagtgttatggttttatatagttcagttctttgagatttttgaaaagagtattttcagtaataaacgtgccatctctatctcttaaacatttattacaacaattgttttaaaatagaaaaaataaaatgcttctattttaccttttttcatttcagaagcattattctgtttattaacagtgtcccatctactgaatagaaaactttgagaataatatatatatatattttaaatgttttcactgactcattgaaaatgttaattacacacacatgcatgcatgcacacacgagcatacttgtacctttgtctctgggcaaacaggtgggactgttagtgacccatttgggaaaatagagcatctcagagaaggaggtgagttcttcctgcctgtgatttctcttggcgctcccctcctctcccgctctggcttctgtggcggcagtggtgggtaagcactccagtgttctcttaatgaggcactttgcctgtcactcgagcaagcctgggtgttccttcctcctcatgctcctggaatagggaatagggatctcatgcttgcaaactacacaatgctgcaggtgcttcccaggggccacaggctgtcaggaaacgtgttttatgttaagtcacaaacccacttgacttctgggtactggaattaataccagtgggtgagactgagggtgagtgagttagtacatattaatcctggttgttgagcttccagactaccccgtccaaagtttgatgctatgtagtcagtggtttgtggggctggatgccagaaggttctttgagccagtttcaaaggttacttgttttttttttttttttaaagtcagaatgttaacagctgtgatatatcctgcagggcttttgcagtttcttctgttctgtgttctgaaatactgggtagagaatggctgaggaggagattaccagagaagttgctttgctcagtgctttgccccaggattgcctcaaatctgagtggacttcatcctttgcggcggctctgagcctggcccatcttcctattcccacgtgtagctagtgtctagtgtcagctttgctcagtgtggtggaaacattttgcagaactgttgtagaaagctgccttatagttggcttgacaaagcataattctctcataacaaactttcaaatcattacagtagcttagctactttagttgatgtgaccgaggaatcccttctagaatcataggtggcaagggagggtttgctagctctccatttgcactggccattgtgaaaaaccagcttctgtattcaaatctttccttcatttttttaaattttttttttggcagcgcttgtgctggaacttactcattgtaactgaatcctcagggcttttcttgttttagatcatggactgtgcacgtgacacttaaataattttctatgtatttaaagaaaaatgcaccaggatggtgtctgtgcacgtgactattagaggagcgtctgtagaagtacctggtttggtcagtgcagttgtgcaatctgagggccttgtttcctcctcccctttccccttctccccaccaaaggaaaatatccctcttaatgatttcgtagttcagtttactgaatgattaccacctgtaattcctctttggattgtgtagactcaacatgagacattcctttctgctttctggagggcaccaggggcctttctctttgataaattttttttgtctgttgacaaaaacaaaaatcttttttcaaatgtagtgctggtgaaaaggtagggctgagtgattaccttagccacagggtggctgagcaggaactttagaagaaaatcctgagctttcctgtccattcccagcatccagctcctattctagtgcctcttccctgcagggcagggaccccttgggaaatcgaggaggtgggacgggctgggccctgtgtcccaggtttcacagggctcagggttatgctcccgcttgaatctggacgtgaatctggtaaaaatatcaagtacctgtggaactccctgattctataccctcttccttctttctgcaaggcagaggaataatatttttaaaggttattttgttttagttttaaatagcaaaacacaagctgcatttttatttattttgcataagaaaggtaaatctttttacaaaaaaaagtatagagttggaaactctgggaaaacttacggaaatacacaaatgcttctctgtaatgtgcaatatgctttgcaactgtagatgatattttatgtttaatctgtaaataagaaatgtatttaaattaaaagggatctttttgtaaaaggaccaaatgttcttttataaatgtaataaggaatatcttgctctttaaaatttattaggatttttatgagtaatttttattaaaagatttctttttttgagttgt

SEQ ID NO: 863 - protein, 651 aa, Homo sapiens; identical to SEQ ID NO: 861

SEQ ID NO: 864 - DNA, 41995 bp, Mus musculus
  misc_feature (1)...(41995): n = A,T,C or G
tcttttttctcatgggatctacattcattgactcagtcagaaagaaaggatgttttcaaataacacctgtactacacacatacagactacttacatagaatttacattctattagttataagacaatctagggatgccttaaagtatacaagcagatattcacaagtcagtagtatgccactttatatagaaacttcagtatctttgaatttgggaatctattgaggcacttgaaatgaatctactaccacacctaagaactttctactattgttaacttgagtgtcctaattatttgccttgaatcaagcagtgtacttcagcctcaagaccactgtgtcaagagttcctgtggcctactgacactctatggacactgcctcagtcagctttgcctctgaccccaattctgctgcagtgactactcccaaggaactctgtcacgaggttgaccccatgtctgctctttcgttgcactgcgtatccctgttgcagctatctactctctgtgctggagccctggtggccatccgtgtttacttacaccgcttcctttaccagtctctttcagctcggactggacaactggaagaggaaatggaagtttccaggttagctcatttgctgcatttgtcgtgctttgaaatagccaaaatgctccagcgtgaggaaccactaggtggcagggctgcttcactgcctgcctcatcgctttctttattcctttattgtctatacatcaactgcagcaaaaatacagtttctttaaaacgaatcagttgcttttaaatcaacttgcttactgctacgcaactgctgaaaaactaagaaaactcacatactttgctctgaatatccactgtgatgtcactaattcctttcggagctctcacagaggtcagattactgcagaagttttactgccttcggcttaaaaaggcgtgggaaaagcaaataaaccagtgcctgttgagcacacggccagagctgattgttttccctctagttgtcaacgcccagcaggacaaagatctttaggttaaggttcatggactattaggctgttgtttcattcataggattgtggccccatctctcctttcccagaaggtcgcttcggaggagatggaatttcagctgcttcctgagacagaagcaggtgcaggcacatccttccttcagttacgtccccacaggaatccaacccgtcaggtgggaactcttaacaaaatggactaggagggacagagaagggaggagatgtggagcgaaggccaagaatgctaataaagcccttgtcttacagcaccaaggacggagaactgctgtagacagttggcgggatgagacatacagctaggtgtggtagtgcacatttgcaattccattacctgggaggccaaagcaggaaggtcacgggttctagggcaaccagtgctacttagtgagactgcaaaaataaacagacaagtttttaacatatatatcatttagagttaaatgtaaaattaagatacaaatccttgggggctgtagctggaaggacagaagggagaggcaaactagcaaaaaggaaaagttaaagtcaacttaggtaacacagcacagtcgatagaaaatatggaaaaccaaaccagcaaggtataacattcataaacaaggaaacgttattttgaggcatgaaggtaataagaaaataaaactaagctaaaccacccaaccaaacaacaaccctgaaaacacaaagacctagtaatccttgtgtctacacaacagatggaggcactaggtaatagagtaagcggtactgtgtggtttcctaaccaccatcttgttgtaccttaagaatgggctcgggtgagagatcgcttggaagctaaagtcctcgctactnnnnnnnnnnnnnnnnnnnnnnnnnnnnnnnnnnnnnnnnnnnnnnnnnnnnnnnnnnnnnnnnnnnnnnnnnnnnnnnnnnnnnnnnnnnnnnnnnnnnnnnnnnnnnnnnnnnnnnnnnnnnnnnnnnnnnnnnnnnnnnnnnnnnnnnnnnnnnnnnnnnnnnnnnnnnnnnnnnnnnnnnnnnnnnnnnnnnnnnnnnnnnnnnnnnnnnnnnnnnnnnnnnnnnnnnnnnnnnnnnnnnnnnnnnnnnnnnnnnnnnnnnnnnnnnnnnnnnnnnnnnnnnnnnnnnnnnnnnnnnnnnnnnnnnnnnnnnnnnnnnnnnnnnnnnnnnnnnnnnnnnnnnnnnnnnnnnnnnnnnnnnnnnnnnnnnnnnnnnnnnnnnnnnnnnnnnnnnnnnnnnnnnnnnnnnnnnnnnnnnnnnnnnnnnnnnnnnnnnnnnnnnnnnnnnnnnnnnnnnnnnnnnnnnnnnnnnnnnnnnnnnnnnnnnnnnnnnnnnnnnnnnnnnnnnnnnnnnnnnnnnnnnnnnnnnnnnnnnnnnnnnnnnnnnnnnnnnnnnnnnnnnnnnnnnnnnnnnnnnnnnnnnnnnnnnnnnnnnnnnnnnnnnnnnnnnnnnnnnnnnnnnnnnnnnnnnnnnnnnnnnnnnnnnnnnnnnnnnnnnnnnnnnnnnnnnnnnnnnnnnnnnnnnnnnnnnnnnnnnnnnnnnnnnnnnnnnnnnnnnnnnnnnnnnnnnnnnnnnnnnnnnnnnnnnnnnnnnnnnnnnnnnnnnnnnnnnnnnnnnnnnnnnnnnnnnnnnnnnnnnnnnnnnnnnnnnnnnnnnnnnnnnnnnnnnnnnnnnnnnnnnnnnnnnnnnnnnnnnnnnnnnnnnnnnnnnnnnnnnnnnnnnnnnnnnnnnnnnnnnnnnnnnnnnnnnnnnnnnnnnnnnnnnnnnnnnnnnnnnnnnnnnnnnnnnnnnnnnnnnnnnnnnnnnnnnnnnnnnnnnnnnnnnnnnnnnnnnnnnnnnnnnnnnnnnnnnnnnnnnnnnnnnnnnnnnnnnnnnnnnnnnnnnnnnnnnnnnnnnnnnnnnnnnnnnnnnnnnnnnnnnnnnnnnnnnnnnnnnnnnnnnnnnnnnnnnnnnnnnnnnnnnnnnnnnnnnnnnnnnnnnnnnnnnnnnnnnnnnnnnnnnnnnnnnnnnnnnnnnnnnnnnnnnnnnnnnnnnnnnnnnnnnnnnnnnnnnnnnnnnnnnnnnnnnnnnnnnnnnnnnnnnnnnnnnnnnnnnnnnnnnnnnnnnnnnnnnnnnnnnnnnnnnnnnnnnnnnnnnnnnnnnnnnnnnnnnnnnnnnnnnnnnnnnnnnnnnnnnnnnnnnnnnnnnnnnnnnnnnnnnnnnnnnnnnnnnnnnnnnnnnnnnnnnnnnnnnnnnnnnnnnnnnnnnnnnnnnnnnnnnnnnnnnnnnnnnnnnnnnnnnnnnnnnnnnnnnnnnnnnnnnnnnnnnnnnnnnnnnnnnnnnnnnnnnnnnnnnnnnnnnnnnnnnnnnnnnnnnnnnnnnnnnnnnnnnnnnnnnnnnnnnnnnnnnnnnnnnnnnnnnnnnnnnnnnnnnnnnnnnnnnnnnnnnnnnnnnnnnnnnnnnnnnnnnnnnnnnnnnnnnnnnnnnnnnnnnnnnnnnnnnnnnnnnnnnnnnnnnnnnnnnnnnnnnnnnnnnnnnnnnnnnnnnnnnnnnnnnnnnnnnnnnnnnnnnnnnnnnnnnnnnnnnnnnnnnnnnnnnnnnnnnnnnnnnnnnnnnnnnnnnnnnnnnnnnnnnnnnnnnnnnnnnnnnnnnnnnnnnnnnnnnnnnnnnnnnnnnnnnnnnnnnnnnnnnnnnnnnnnnnnnnnnnnnnnnnnnnnnnnnnnnnnnnnnnnnnnnnnnnnnnnnnnnnnnnnnnnnnnnnnnnnnnnnnnnnnnnnnnnnnnnnnnnnnnnnnnnnnnnnnnnnnnnnnnnnnnnnnnnnnnnnnnnnnnnnnnnnnnnnnnnnnnnnnnnnnnnnnnnnnnnnnnnnnnnnnnnnnnnnnnnnnnnnnnnnnnnnnnnnnnnnnnnnnnnnnnnnnnnnnnnnnnnnnnnnnnnnnnnnnnnnnnnnnnnnnnnnnnnnnnnnnnnnnnnnnnnnnnnnnnnnnnnnnnnnnnnnnnnnnnnnnnnnnnnnnnnnnnnnnnnnnnnnnnnnnnnnnnnnnnnnnnnnnnnnnnnnnnnnnnnnnnnnnnnnnnnnnnnnnnnnnnnnnnnnnnnnnnnnnnnnnnnnnnnnnnnnnnnnnnnnnnnnnnnnnnnnnnnnnnnnnnnnnnnnnnnnnnnnnnnnnnnnnnnnnnnnnnnnnnnnnnnnnnnnnnnnnnnnnnnnnnnnnnnnnnnnnnnnnnnnnnnnnnnnnnnnnnnnnnnnnnnnnnnnnnnnnnnnnnnnnnnnnnnnnnnnnnnnnnnnnnnnnnnnnnnnnnnnnnnnnnnnnnnnnnnnnnnnnnnnnnnnnnnnnnnnnnnnnnnnnnnnnnnnnnnnnnnnnnnnnnnnnnnnnnnnnnnnnnnnnnnnnnnnnnnnnnnnnnnnnnnnnnnnnnnnnnnnnnnnnnnnnnnnnnnnnnnnnnnnnnnnnnnnnnnnnnnnnnnnnnnnnnnnnnnnnnnnnnnnnnnnnnnnnnnnnnnnnnnnnnnnnnnnnnnnnnnnnnnnnnnnnnnnnnnnnnnnnnnnnnnnnnnnnnnnnnnnnnnnnnnnnnnnnnnnnnnnnnnnnnnnnnnnnnnnnnnnnnnnnnnnnnnnnnnnnnnnnnnnnnnnnnnnnnnnnnnnnnnnnnnnnnnnnnnnnnnnnnnnnnnnnnnnnnnnnnnnnnnnnnnnnnnnnnnnnnnnnnnnnnnnnnnnnnnnnnnnnnnnnnnnnnnnnnnnnnnnnnnnnnnnnnnnnnnnnnnnnnnnnnnnnnnnnnnnnnnnnnnnnnnnnnnnnnnnnnnnnnnnnnnnnnnnnnnnnnnnnnnnnnnnnnnnnnnnnnnnnnnnnnnnnnnnnnnnnnnnnnnnnnnnnnnnnnnnnnnnnnnnnnnnnnnnnnnnnnnnnnnnnnnnnnnnnnnnnnnnnnnnnnnnnnnnnnnnnnnnnnnnnnnnnnnnnnnnnnnnnnnnnnnnnnnnnnnnnnnnnnnnnnnnnnnnnnnnnnnnnnnnnnnnnnnnnnnnnnnnnnnnnnnnnnnnnnnnnnnnnnnnnnnnnnnnnnnnnnnnnnnnnnnnnnnnnnnnnnnnnnnnnnnnnnnnnnnnnnnnnnnnnnnnnnnnnnnnnnnnnnnnnnnnnnnnnnnnnnnnnnnnnnnnnnnnnnnnnnnnnnnnnnnnnnnnnnnnnnnnnnnnnnnnnnnnnnnnnnnnnnnnnnnnnnnnnnnnnnnnnnnnnnnnnnnnnnnnnnnnnnnnnnnnnnnnnnnnnnnnnnnnnnnnnnnnnnnnnnnnnnnnnnnnnnnnnnnnnnnnnnnnnnnnnnnnnnnnnnnnnnnnnnnnnnnnnnnnnnnnnnnnnnnnnnnnnnnnnnnnnnnnnnnnnnnnnnnnnnnnnnnnnnnnnnnnnnnnnnnnnnnnnnnnnnnnnnnnnnnnnnnnnnnnnnnnnnnnnnnnnnnnnnnnnnnnnnnnnnnnnnnnnnnnnnnnnnnnnnnnnnnnnnnnnnnnnnnnnnnnnnnnnnnnnnnnnnnnnnnnnnnnnnnnnnnnnnnnnnnnnnnnnnnnnnnnnnnnnnnnnnnnnnnnnnnnnnnnnnnnnnnnnnnnnnnnnnnnnnnnnnnnnnnnnnnnnnnnnnnnnnnnnnnnnnnnnnnnnnnnnnnnnnnnnnnnnnnnnnnnnnnnnnnnnnnnnnnnnnnnnnnnnnnnnnnnnnnnnnnnnnnnnnnnnnnnnnnnnnnnnnnnnnnnnnnnnnnnnnnnnnnnnnnnnnnnnnnnnnnnnnnnnnnnnnnnnnnnnnnnnnnnnnnnnnnnnnnnnnnnnnnnnnnnnnnnnnnnnnnnnnnnnnnnnnnnnnnnnnnnnnnnnnnnnnnnnnnnnnnnnnnnnnnnnnnnnnnnnnnnnnnnnnnnnnnnnnnnnnnnnnnnnnnnnnnnnnnnnnnnnnnnnnnnnnnnnnnnnnnnnnnnnnnnnnnnnnnnnnnnnnnnnnnnnnnnnnnnnnnnnnnnnnnnnnnnnnnnnnnnnnnnnnnnnnnnnnnnnnnnnnnnnnnnnnnnnnnnnnnnnnnnnnnnnnnnnnnnnnnnnnnnnnnnnnnnnnnnnnnnnnnnnnnnnnnnnnnnnnnnnnnnnnnnnnnnnnnnnnnnnnnnnnnnnnnnnnnnnnnnnnnnnnnnnnnnnnnnnnnnnnnnnnnnnnnnnnnnnnnnnnnnnnnnnnnnnnnnnnnnnnnnnnnnnnnnnnnnnnnnnnnnnnnnnnnnnnnnnnnnnnnnnnnnnnnnnnnnnnnnnnnnnnnnnnnnnnnnnnnnnnnnnnnnnnnnnnnnnnnnnnnnnnnnnnnnnnnnnnnnnnnnnnnnnnnnnnnnnnnnnnnnnnnnnnnnnnnnnnnnnnnnnnnnnnnnnnnnnnnnnnnnnnnnnnnnnnnnnnnnnnnnnnnnnnnnnnnnnnnnnnnnnnnnnnnnnnnnnnnnnnnnnnnnnnnnnnnnnnnnnnnnnnnnnnnnnnnnnnnnnnnnnnnnnnnnnnnnnnnnnnnnnnnnnnnnnnnnnnnnnnnnnnnnnnnnnnnnnnnnnnnnnnnnnnnnnnnnnnnnnnnnnnnnnnnnnnnnnnnnnnnnnnnnnnnnnnnnnnnnnnnnnnnnnnnnnnnnnnnnnnnnnnnnnnnnnnnnnnnnnnnnnnnnnnnnnnnnnnnnnnnnnnnnnnnnnnnnnnnnnnnnnnnnnnnnnnnnnnnnnnnnnnnnnnnnnnnnnnnnnnnnnnnnnnnnnnnnnnnnnnnnnnnnnnnnnnnnnnnnnnnnnnnnnnnnnnnnnnnnnnnnnnnnnnnnnnnnnnnnnnnnnnnnnnnnnnnnnnnnnnnnnnnnnnnnnnnnnnnnnnnnnnnnnnnnnnnnnnnnnnnnnnnnnnnnnnnnnnnnnnnnnnnnnnnnnnnnnnnnnnnnnnnnnnnnnnnnnnnnnnnnnnnnnnnnnnnnnnnnnnnnnnnnnnnnnnnnnnnnnnnnnnnnnnnnnnnnnnnnnnnnnnnnnnnnnnnnnnnnnnnnnnnnnnnnnnnnnnnnnnnnnnnnnnnnnnnnnnnnnnnnnnnnnnnnnnnnnnnnnnnnnnnnnnnnnnnnnnnnnnnnnnnnnnnnnnnnnnnnnnnnnnnnnnnnnnnnnnnnnnnnnnnnnnnnnnnnnnnnnnnnnnnnnnnnnnnnnnnnnnnnnnnnnnnnnnnnnnnnnnnnnnnnnnnnnnnnnnnnnnnnnnnnnnnnnnnnnnnnnnnnnnnnnnnnnnnnnnnnnnnnnnnnnnnnnnnnnnnnnnnnnnnnnnnnnnnnnnnnnnnnnnnnnnnnnnnnnnnnnnnnnnnnnnnnngtcattggggactggacctatggcctctcacatggtaagattaaaagggcactatcactgagctatatccccagcctatatgtggtcttttgcatctggcttctttcagttaacatggcatccaagtttgaccgtgttgtagcatgtacctgtacttcagtactttttatgaggtagcttatggtagagttcttacctagcacatgtaaaacactgggtttgcaatcaggcaccacaaaataaaagtttcaacagaactttttaaagactaaatattaacctgttgtgcaaataccacatggatttcaggttgtttctagttggaggctatatgcagtgtttgtgaacaacttgtttgaatgttttctcttctgagtataatatgcttgctggtagaataggtaatatggtggatctatgttacgcctctttcagaaaagctaaactgaattctaacgtggctgtcacattttgcatcgacagcagcaagatttcattgctccacatccttcctataagagatgatttttgcttttcaaacttgccatttgaatagttatcataaagttagtgttagtgtacatttccctaatgattggtgatagtgaccatgtacttcatgtacttatattggtctttcatgtaccttttccaaaagctctgatgcaagtcctttgtaaagcaggatagaaaggagaaattacaaggacctgagaagcaaaaggagccgctctctcaacagctgagaatcacagattccaaaacacttagcaactgcttgaggcctttctcctttctcatctcagaacctataattttctagaactctcatcagaaactccatttagtaaagggcatgtcctaacccctttgtacaaccctagtggcttccggttttattagagtgtaatcccatccaaggtacttctgaaacatcctataatctcatttatgaaaaataaagaaggaataaagctttcttttccatttgagatgtaatttcagagccactaagagttgttattctgaatttctaggcttaaaatctatgctaacactgtctttaataaagtttgctgttttgagagggctacactttcaggtgctttttttgttttgtttttttgttttttgtttaagacagccttggctgtcctggaactcattctgtagaccaggctggcctcaaactcagagactcaactgcccttgcctcccaagtgcggggattaaagatggtaagccccaccatctgccccacctcccaaacatttatttatggaggtgaggatctcacggtacacttgtggaagtcagggggcaacccatgggagtttgttctctccttccacagtgtgggtcctggggatagaatgcagatggccaggcttgatggcagacaccttttacatgctgggccgtttgtcagaccccttttttattttttactaaactacaacgccgctttctacgatactggctgctcctaaactctttgatgcatccaaggcaaggatccggtttttacctttctcattgtccgtgctgacaaggacagtgtggctccatgcctcagctgctgctgccaccactgaaactttaaacaatttttattatttatttatttatttattggtgaggatgaggggagaggcagagagagagattgcaatgcagtgtcataatgcccttggagccagacttggctgtcagagcccctgaagttacaggtattgagagcggccagaggtgggtgggtgctgggtaccaaatttgaattctctggaaaagcaagccttaatcactgagccatctgtccaccatcgctccccccccccccccccaaaatccggctgtctctttctgttgagttctaagtttcctcttttaaaatgttacatttggggctggtgagacgtcttagagggtaaaggctcttgctacccatcctgattagctgagctggatcactggaacccacgtggtggaagagaagcaacttctgccaagttgtcctctgacctcaggtgtggcacacaagctccctccacacacacaggaaatacatgtaactaaaatataggaaatgtaacctttggcatatatagagaaacatgatctgaaaaccgcaggctaggctaggggctatactctagttacagcacagcttgccggtccctgcagaatccaagccgggtatggtggcgcacacctgtagtcctagcatcccggaggcagagacagcggatatctgtgatttccaggacagaacgatcgacaaaacgagcaggccagtcagggctacatagtgagactccaatctcaaaaagaaattccaagtaaagagtgttgtgcaagacgggaatgggggagaagaatctctttagcctcggtttctctggctttaagactggaatcaagtcccagtctcaccccagtgctcgacactgagggcagaggaagtagaacaaccgagcatccgctcgctaggagagcgccctccgcagtggttccctccgggcaggtgaccggcctaccggccgttcttcctcttccgggtcagagtgcacccaactgcgcacagctctccgcgcacactcccccgcctaccccggagcgtgggagcaccgtgccctccgaggcctgacttccgtttccgggctggcacctcggcttccggcggcgtgctcgcggtgcggagaccggaagggtctgtgcttgctgccggtaactggccgcggctgggagtggccgggtgggtgggacgcaggggaagacggcggtggcttcgtataggtcggtgctggggctgagcgtctggactctcgctgggcttcgcagagggtgggagtgagagagccactgcccttcggtccgaacagcccttctgctctccacactgtccgtaggagttgtgttcacagtggcgaacggtgacacggtggaaccgcgttcacctctgtggcctgttcttggttggcacagcattagggacaaggaagatgttagcttaagccacggcgcttttgaaaagctggtgggaggtgtgggccctccatcacggtaacaccactccagccccttcaacctccacaaacactcccacaggacgtctgtattactagcttcagacatttccaaggtgtccccagcatgcgcgtcattggatctcggcgtcaccacatagtaggctttcagatatttgtaattgtttagatagtggaagttgagttaatctttaataaattcactgcccacttgtctacatggcggaaagtagatacctcacccatacattaaaagttttgatcattagtccagaattgtgttgttctcgttaaaatcttctgtctttgggaaagagagatatatttagtttccagttcgaaactaggcaggagtaacttgcttcctggacccgcgagtgtgggaagcaagaatttttaactctgaaccactacagcctcacatcctgaagtgctaagctgaaagagcaacagaggagcttctctattcatgttagcaaatgtaagatggtgcttaccaacacagatgagcctaagccaagcactgcatgcagtggaaacactcttgtcttttctcctgatgagcctgcatattgcttgtttagtcacgtttcactgcctgtaatccgtgcccttatttatactacagttttaactcgataggtacattgaaatacaaaaagagatggcattgtttccctttttcttccctgtattgcctctagagactgttggtccttttagaaacatctccatcatgtcttgtgacactcaagaagctaccagagagtgcctgggtatgaaccttgatggcaacaaagagcctgtgtcgctggtagaaagcggcgtcagaagtgagtcggagcatctccaagtcactattggagccactgtacccactggctttgaacaaacggctgcgggggaagtgagagagaaactgaagtcggcctgcagaatcagcaaagaccgcggaaagatctattttgatattgcagtggaaagtctggctcaggtttgaacaaaacagtatttaaattagtcttggttattttatgattatttttctggtttatagacacccctcccccccttgggaatcctttactctgttctgcttaaagtagctgcattttctgttgtgtactaatttatgaaattgactagtttactatgttgctgtttataatgtctttgtaatgtatattcagtttagtacattttagcgttagtttaatatggtttagaagtgatcgtagcatttcctgatgatttattcaccgaaatgaaatacctaccaatgtctatgacacgtaaatttactttagcaaaagtttgggtacacacaaaagctgaggtttccttttcatccttgtcaaagacattgtttttaaaagatttttattattttatgtgcattggcatttgcctgcatatatgtctgtgtgagggaatcagagcccctggaactagagtctaaactgaacctgggtctttctgaaagaatagtcagtgcccctaaccactgagccatttctacagccccttcaaagacattcttgatcaaaagtacatgattacaggtgagaagcagaggttagcaaactgccattgcgttgaaacaaaagctaccagatttctttactatacaagtagcatagggtatggcttgttaactgttgtcttgctagtgtatcccaagctggaagcatataacatgcaatagacactcacaaaatacttgtggtttttgtaagtaagcaagcattttcttgatgccttcagtagttttttgaagattgggcactattgtcatcagtcattaggtttaagaagaaaagtagtttgtctgcagtaattcagctatcaccgaactagagcttaaactgtatgtggtttcttttttggaggggagagataggaggttgagacaagagtctgatgtagccaagttagcctaaatttcactatatagctgagcgtgctgcccctcccaagagctgggagtgtaggcatttgctggtagatccatgctctttgcccctgccatatgcagccaaaagacatgagagaagaacaaggataaagcctcactgtgttaccctccttccctttcccagaccagagttactgcctatatgacatttcggactatatactttggtctcagtgaccctttctatggggaagagtggaaattgatgggtaaccaaagagatggaacactcgggatgggaaaattttgtctttatatttctcccctctttaaaccaatgttgttgcctgtatgacattatcacagtggcccttctcctgggaaaagcaggaactgatgggtaaccaaagaaatggactacatgggatgggaaaaatgttaactataaaatacaggcaggaggtgctactttaaacctattttacttagttagacatggtagctttctcctggaatgtcagtactggggacactgagtcaggggaattgtgagttggaggcaacccagagcaacatagcaagaccgtatctcaaaaagataaaaatgaaccaattttgtacttcttttcttttaaatatttaactgtagatagcttctgttatttacaagtatgttcagaaatttgtttctaacgtttgtttctctcccctaggttcattgtctgagatcagttgataacttgtttgtggttgttcaggagtttaaagattaccagttcaaagatacgaaggtgagctattccaagcatggtctttcccagagagcttgttctctgcagtgtactacctgcttgtcacactgtcacttagccttgctattggtttatttctttacagtgttgagaatataacaaaaaccaagcatgtgattacagtaagccttttcacgaaaatccagaaatctctttagagcccatctgtactggctagttttgtgtcaacttgacacagctggagttatcacagagaaaggagcttcagttgaggaaatgcctccatgagatacaactgtgaggcattttctcaattagtgatcaagggggaaaggccccttgtgggtgggaccatctctgggctggtattcttgtttctataagagagcaggctgagcaagccaggggaagcaagccagtaaagaacattccttcctggcctctgtatcagctcctgcttcctgacctgtttgagttccagtcctgacttcctttggtgatgagcagcaatgtggaagagtaagctgaataaaccctttcctccccaacttgcttcttggtcatgatgtttgtgtaggaaaccctgactaagacaccatcccagaagctgcttttaaaagtcacttgttaaagaaaaaccctaagttatagggaaaaagtcttagattagctcgacagatagtacagatggtttgcaactagaattgcttccaacatgtgaacaaaagacagagaacacaaatagcattccctccccagtttgcttttgtcctgttttagcttcatgttttgaaatgaagccaaagcaacatttaataccccttcagttgttaggacaacagctttgtctccagcctgtacttatcatctgagtcctaaatattcagctgctgtttaatctgaaggttgcaaacagacctcagtaacactttagggttttttccctatatctctttctggccaagtttccagaatcaagtgcttaaaacttttcctgtcaatattatattaatgtctaatttagagctaatctttcttaaaagaactgtggtatgctgtctaattctctgttttttattaattttccagattattttggaaagccaaagtatccccaaatcagtaaaactaatctgggatcaggggcttaatgataaagcactttcttcattagatcctagtaaagaaaattaacagtaactaaaaggctaacagaacccatagcttactaaaaattcaaacagctctaaaagaatatccattgaaaatagctaaaaattgtattgcctataaaaataacttcagcattagaaacattagtattataatccttcatactcattttttttcttccttagtgatgtcctggtggtttgaacccttgacttttacatcctcagtgagcactcccactgaactacatcccctgcttaactctgaagatttctgatagttactaccaactgaatgataccaaaaacagttttagaggcagtcttttgaaaagttatactgctaagtatttggaaattttgaaggtcagttttatgcatgagtaaatgttattgggcatcctatcttaaatcctcttccacttaaattaccagacattattaaattcttggatttttgtcatcttaatttttttgttgttgtttttcttctgtttttttgttactggatttctctgggtagctccccggctgccctggaacttgctatgtaaaccaggctgtcattgaactcacagagctctgcctgtctctgcctcctgagtgcttcgattaaaggtgtgtgtagcccctcccaccctagcttatcttaaaatttgtataattgaggcagttctgatctctaataagaggtgaatttgatgtactagaagtctacatcagttaatcgttcaaagttgccttagaaatcactgtaaagcaggttcgtgaaggcagaggaaggggatcactgttggtcagatgccctgcacaagctgggggatctgaggtcagtccttagcatctgcataaaagctaagggggacagtgtaagatgtgacttcgtcacgaagggaatagaggaggcaacctggctgaatgagttccaggttgagtgagaggtcttgtctctttgttttgttgttgttgtttgtttaagacatgaattctctgtgtagccttggctgtcctatggactgggctgttctcaaaatcaaatctatgcctgcctttgagtgctgggattaaaggcaggtgccactactatcaaccagaccaaattcctggatcaaaaagtgagtccagaccctcagtggtggctcatacctttgatcccagcactgggaggcagaagcaggaagatctcttgagttagaggctagcctgggctacagagtaagtttagaacaagcagcactacatagagaaactcttgtggccccccccccccccaccaaaaaaaattgagatgcaaagcaatcagggtaagacactaactttgacctctggctaccacacttgcacatgcatttatacaaatgtgtacacagccgggcggtagtggtacacgcctttaatcccaacacttgggaggcagaggcaggtggatttctgagtttgaggccagcctggtctacagagtgagttccaggacagccaaagctacacagagaaaccctgtctcgaaaaaaccaaaaaaaaaaaaaaaacccaaccaaacaaaaatgcacaaatgtgtacacagcaaaatgcacatgtaccacacacccacacaacatttttgatataaatttcaagtctatacaaaggaaatttctgtcttgactatgaaaaattattaagccctttagattatgagtgtaaattgcacacactcccccagtgaactctcattactacttttttttttaaagtatgcacatgtataacacaaataaaatttaattttgattcttattaaattaacatataaaataaagggtaaagttggttggtcttgtgttttcatttgtttggtttttgctgtgttttagagaggggttttcagggtggtttcctgtttgtttggtcttagttttgtcatatttctgtcgtgcattctttttcttttaaacttctctttatataacgattttttcatgcactgtgttttctcttttggagctttaagggtttttttgtttgagaagaatctcactatgtagaccctatacagacgtgctgtcgtagaattcactgtgtagaataaactggcctcaaattcacggaaatccacctggttggtgagaaaacttgagggatcttttcctatcctccccgacccagcactgggatggtctgaggagcaaaccacctctcctgctttttcagatgcgtgctgaggaattgaacttaggtcctcgtactagtgcaacagtagtggtaccaactcagcatctgcctaactccctgcatttatttatttgtttagtttacgttttctttaaactctgtaaactccatctcctggtgactcagcgcatttcatttctgcttctaagtctgctgtgaggtcttatttaccaggcattttcttatatttttgatgtcatcatcttttgtttgtttgtttgttttgcctctaaatcatactgtttaacagagttctatggccggttttctggggcgagtgttctttcctgcaggtgtttccttcccctgtattttttttgtttattttgtaagttctgtgttgataaaggtttgaactttggaattttgggatgaggcagtttctcttaggctcctgagggtgaggccatgaggaagagctctccctggaatgactggggataaacaggccttttcctcctcactttgtcctatttttattgttttattgaagtataatttttgctccaccaagtgaattgttataatctttccttcctccctggcctcgggcatcagacttcagagtgagtcatcaaggaaagcacactaacttctgccatgttaatgaactatagagacaaaaggtattttaaaagtgattttgtttattgtatattttatgtatttacatttcaaatgttataccctttcctggtttcccttctggaaccccccctatctcattctcccttctcctggttctatgagggtgctccccctcccacccatccccactcccacctcaccgccctggcattcccctacactggggaatcaagccttcacagaaccaagggcctctcctcctattgatgccagacaaggccatcctctgctacagaagcagctggagccatggctccctccatgtgtactctttggttggtggtttagtccctgggagctctggggggtctggttggttgatattgttgttcttcctatggggctgcaaaccccttcagctccttcaaacctttctctagctccgccattggggaccccgtgctcagtccaatggttggctgagagcatccacctctgtacttgtcaggctctggcagcacctctcaggagacagctatagcaggctcctgtcagcaagcaattcttggcatccgcaatagtgtctggatttggtgactgtatatgggatggatccccaggtggggcagtctctggatggcctttccttcagtttctgctccacagtttgtccctttagacaggagcccttctgggttaagaatttggagatgagttagtggccccatctgccaacagggggccttgcctaacctctgaatatggtctctacaggttctccctcccctttgttggacatttcagctaatctcatccctgttgggttctgggagcctcttgcttttctggcacctgggatgtgctggtggctgcccctagttccccatcttaaaaagtgaatttatctagcatgctaagtgctagattagagggtaaaatgtggctgaagtgactgggaaactgagtatttaatttcctccaggtttgttttgttttgaaacagagtctcactacatccacacctggcctggaacttgttttgtacaccagccagccctgcctcaagctcacagagacccatgtgtctctgttgggaaggaaaggtgtgcatcaccacacctggcttctccatctttaagtcatttaacgtctgtactgtagatgtttatatagattgtataactctgtttggctagagcttgctctgtagatagcagtccttcgtacttcgcatttaaatatttaaccacaccatccagtaactgtgtctttgttgtttactcttggagtagtagtagttgaatttaggaccccgtgcactgtatgtaccactgagctctatccctggccctcttactttttattttgagatatggtgctaatgtgttatctcagttggctctgaacccactctgtagctcaggaaggcctgaactgcaactttgcctcgggttccttagaaactgggactataagcccgtgccaataaacctagcctgacagctatatattaaccaccctttatgtgcctctgctattgtaggtgtatggtctgtagcaaaggtcaaggtagttaaggtcttttcaccatggacttagaggagtggccttgccagtaagcaagtgcatgagcctaggaactgtgggccatacttagtactgtaaagaaagtccaagtgaaggggagaacagcataggggagctcccccacgtttacttcttaaaaagataatcatgggagccaggggcgacggcgcacgcctttaatcccaacgttcaggaggcagaggcaggtggatcgctgtgagttctaggccagcctagtctaggacatttgaggctataaagaagagatcctgtcttaaacaaaacaaaacaaaaaaattaatcatactgtttaaaatctagacagatgatatttttaagcttcttatagtttttgcccaaattcagaagatccgaaaggaagtcatttatagacatgttgtcttactttctgtctgctgccttttattcacctgcttccccaatgctgtgcatctgatctgccctctgctccattcttctttagtagcatactgtttatatatcctcaccattgaaactggaatttccttcattgcaggtattatcttgtttatcctttggtctgtactctcccaccatccccatcataaggaccagagttgtctacaaggaaagtaggcacttatttgttcagttacaatggtgagaaacaaaaggctttcattctccatcatttgcaggaagaagttctaagagactttgaagaactggctggaaaactcccatggtcagaccctttaaaagtctggcaaattaacaccactttcaagaagaagaaagcaaagcgcagaaaggcaaatcagagtgcaggtaaagagaaggctgactgtggacaaggagacaaagcagatgagaaagatggtaagaaaaagcatgccagcagcacttcagattcacatatcttggactattatgaaaatccagccatcaaagaagagatatcaaccttagtaggtgatgtcttgtcgtcttgcaaagatgaaactggtcaaagcttaagagaagaaactgaaccacaggtacagaagtttagagtcacctgcaacagagcaggagagaaacattgctttacctccaatgaggctgcgagagattttgggggtgctattcaagagtactttaagtggaaggctgatatgaccaactttgatgtagaggtgggtattagcttttattgatgatgaaaaagatctgtaatgtggctggggagatgggtcagtgggtaaagtatttgctgagcaagcttgagtacttgagttcagattcctagaatccacataaaagccagagtaaatgtatgaatgttaatcctagcactgatagttagagacaagtagtgtcctggagcagacaagctgaaacggcaagacccaggttcagtgagagactgtttcaaaaataaagtagaatggtagaaagacaatgtaaacttctgtcttttgtacagtcacccacaaaagaaaaaaaaggttctcatacatttgtaaaatttccagacagctagcacaagggccattgaacagtggccgtaaagctagaaggatgttaggaatagcatgacttgtggagatagatggataggtattgattgaaatttttactcagtaactctctagacttggacaagattgtctctttgagcctctgtttcaaatggagccaataatagtgtgtacctttaaggtctataccctggagggcaaatggaatggtttcaagtgtttggtatagtttgttggtatatgataagtactcaatggatagattgtcagaactcaagtagtggtggcacacgtctttaatcctagcactcagaggcagaggatctgttgtgttttcaaggcaagtctggcttacatagtgagttccagaacagccagggctatgtagagaccttgtcttgcaaaaccctaaggtgtgctctgtctctgtgttgtgtgtctctgaccttggcattgctatgtccggcagaagaaagatgagtcttcccccccccccttttttttttattccaaatttaggtgctggactcatacctacagccttgcacatatggacaagcaatgtatttctaaactatatcccagtcttcttatttctttctttcttttttttttaaaggtttatttattatttatttattatatgtaagtacactgtagctgtcttcagacactccagaagagggcgtcagatcttgttacagatggttgtgagccaccatgtggttgctgggatttgaactctggaccttcggaagagcagtcgggtgctcttacccactgagccatctcaccagccccagtcttcttatttctaatctagtatttttctacattatatggatttctagattgtaacttaacctaaaataaacttacttctaccttagttggaaattctgctactaaacaataatagaatatagttttcagaaccttctatcagggttttagagctaatcttcatctagagccagctttgttctttttaaagtcagctaggttcttaaaaccaaatgcctcctgttagcttgagtatccttgtgactactgggtgacttttgttgataatggtaattggagttctttaaatttctgatggtttatgtaggtccttagcagttgacatttttaccaagaagtcaatttttgtttcatttgggatactcaagcctggggcatatcactctctttgtaactttttttttttttttaatgtcagacaagaacaattctccattctatattttcttacacagctgtaagaacaaagaggctaacaaaggccatgtccagaagtctccaaggtagcacagaagacaaatcctgtatgaactggtgtctctgtgtcccaggctcagagggcttcctaggaaatgaggccatgtgaataagatatgtaggacagggccttgcatgttagagtgttagctctagacctctgcctttggtaaggccatgatgaggacattttagggggaatactggggaacattttatcttcttagaatgtttgtgagttaggaaaactaggacaaaggtagtcataatcagacattgttataaaactaccaggagctgggcgtggtggtgcacgcctgtgatcccagcacttgggaggcagaggcaggcagatttctgagtttgaggtcaacctggtctacagagtgagttccaggacagccaaggctacacagaaaaaccctgtctcaaaaaaaaaaaaaaaaaaaaaaaaaaaaaaaaaaagaaagaaagaaagacaaactactaggaaaacaaaataaaagcaaacatgacgtggtgtcagctttggataaagggtatgttttgagaggccaccgttaaagtgtttgaagtgttcttcaaaaacacgtagtaatttaaaaaatatatgtagaccaaatgtggtggcacatgccttggatcccagactcaggagacagagactgtcagatctctaattttaaggccagcctggtctccatagtgacttccatgccagccaaagggcacagtgaaacacacacacacacccaggcagtggttgtacacacctttaatcccagcatttgggagacagaggcagatgaatctctgagttgaggccagcctggtctatagagtgagttccaagacagccaaagttacacagagaagcctgtattgagaaaataaaaggtggtagaaaaaaaaaaaacccaaaacatacatacatattttaaatctataccatcaaaatatgttcatataataaaaactgggagataacttattaatagcctgtgtgtggggggagtaaaaagaataaaatgttttaaaattaaatgaaaatagtacatatactatttcatttttgttaactccaaaaactgatacaactaacttataataatagtggttagattaatgatcacccaggaaagagacaaaagagaactttgtaaagggtactgagtataggtcagagctcactgaaatgtatatgcagaaggcttacacctctgggctcactaggtaggcagatttaccactaaggttgctgacctgagttcagttcctaggatgcatggtagaagttgtcctctgatccccaaacccaatccatacacaaacacaaataaatacgcaaataactgaattttatgtactgtatagtaaacctgtaaagtataattcaatcagaaagtttgtataggctggcaagatagcttagcagttaaaagaattgtctgctctttcagaggatacaagtttaattcccagcacccatacggtaggtagctgtaactctagttccaagggatcacacacctctttctagcttccatgggcaccaagtgtgcatgtggtgcacagatatacattcaggcaaaacatttgtgcacatagaataaaaatttaaaatgttctgaaaagaaagttctctgtgttgtggctgttatgtatgtataagccatgcttggcttttacttgggttccagggataaactcagatcttcatacttgccaagcaagtactcttcccattggctcacctcagacctagccctggttttgttgtttttatcttaattcaaaaagtcttaataaggaagacatgtatctctttcttgtgatcacagcatttatgaggcagaggcaagaggattttgagtttcagtccagctagcctatctaagaattcaagccaattttggcttcaaggctctgtttattttactcttttaaatttatttatttatttattttgttgttgtttgtttgagacagtctttctatctagtcctggctgccctggaactcactgtgtagacctggttggccttgaacttacagagatccgcctgcctctgccttctaagtgctgggattagttagagcacttgggaggtagtaccacagccagataaggccctggattgtttttaagggtcttgttagtaggtacagttcgaagactgttgactttctcgtttgtctctaatttgatgtaggttctcctgaacatccatgataatgaagtcattgttgctattgcactgacagaagagagtctccatcgcagaaatattacacattttggacctacaactcttaggtcaactcttgcctatgggatgctcaggtaacagaaggggattttgctgtccatattgtaatgaacactttgctctgaattaaatcactcattttctaaaaaaaaacaaaacaaaaactcccaaaaccattttcttagttagaattacaaagtacctattttctcttcagtatttactgttgtcagtttttgatgcagaaaacaccacgtggatggtttattagtattcttggttatacatgtgagagtggtgttgtgtgtcttcagcgaggagctgcttctgtcgagagaggctgtgctgctttaggcaatagagtgaagcagaggagatccttgtgatgtgtgagtgagtacagaccttgtctgttgagtgacagtgctggcatgcagcttggtagcctgagtgctgggatcatggtacatatcaccacaccccatttactcatagttttaaatgttacactggctgtaacctagggatcgtgttgggactttgacaagtgcaagacaagcagcctgcctctgttgtcagtcttacgttcttggtgttttctttctcaaataagtctttttcccccctacacttgagatttcagtactgcaaaatgggcttgacatgggatgccaaagattattcatgtgctcaacttggcagcacatacactcaactaaagcaatatagagaagattagtatggcccctgcataaagatgacagacagatttgtgaagtgttctatatgaaaagaaaaagaaaaagaagaaaaggtttactcatgctggagagatggctcagagctttaagaatgtctgctgctcttgcagaggacctaagtttggttcctaacattcaggttggtagataacaacaacctgcaacttcagctccaggggattcaacacctgtcttctgtaggcaccagcacatacatactttaaaaatcccacccacacatatgcatacttaaaaaaaaaaacgtggtgactgactttagggctagagagatggctcaacagttaatgttgatgctggttttccatatgaccagagctcagttctagacttccatgcctggcagcttacaacagtctttaattccagctccatactctcttccaatatcctcttctggtctttgggtacacacacagaggtactaacacacatgtataaataaaatgtgaaaatatttattaaaaaattttgttcataaggattaaatgcagaaacatagtcagattatcttattctgtacagttcctggcatgatctagtgagttacataattacattttcttccttttcaatttttgcttcctcttttgtcatggtcacagttcctcacaactggaacacattaagttagtaacagaaaacttaagagaaacactcctaagcttctttcactaaacagatatttactatctgcctccaaccatgattatagaaaccagcatacagagttgagtgctggtattaaaaactaaatagaataaaaaagtaatgattgggctgaggagacagcctggtgcactctccgcacaagcctaaccccagcctcacagcatcgctattgtcaataatcctagcattgaggaggctgagacaggaggataccccaggctttctggccagccactctaactgaatttgtgagctctaggttgtgaggtaaagagcaattgagaaaggtgcccagctgagtgcagtggcacatacctttaatctcagcacttaggaggctgaggcagatagatttctgtgaactcaaggccagcttgggcttggcctacatagttccaggacagccagggctctgtagagaccctctctcaaaaaaaccaaaacaagaggcaagcagggtggtggattgggatgccagatcttgatttctatttttggctttcatgtgcatgtggcaaacacaagtgtacagacacatgaagtgataattatgctgaggattgcggtggttggagagatgagcaaagattataccagatccacaaaaaacccttgggcgattctcaagaaaggcagaaactacagggctagacagatggctgttccagagaacctgggttcaattcctagcactgacatggtggctcataatggttaataacttgcctcaaggggtcagatgccctctttttgatttgacaggcagtgctcacatgtgatacagatatacatgacagcaatatatccatagacataaaggctaaaaattaagaggtgcagaaactagatagtagaaaatgcaaaggactgctttcctgtcttctaaaagcttgtgtgttctggcttagctcgcctgtgcacttgactgcctgtcctccagttgcacatgactggctcaaacgacccagggttacttgctctttattccacattcctaagaggatttgagtgacataatttgatcaagtgcccaattctggcccattaacaatgactggcattacaggcttgcccaagaatccgtcttatgagggagatcattaacatgcatgatgcaaggtctcaaacagaatagaaaaatcagataaaacttagtaacctgaggactggtaagtaacatttaaagctagtcacatgtagtcttgactccttattttgtgtcctaggaaaaatgtttctttggatcattttgtctgttaaatggtaatagggttgtttaaagaatttcaagtgtataaagttaaagcagttattttatgttaaggactgtatctccatagttaaatccaaaatgaaaggagactgaatgtctggttgtcagcaaatgcccactaaaaatctccctgcctcagcttcctgagtgctaggataacaaatcagtatctctcgctctctcccctaccaccagaagcattgtacgcataggcgagggctgctactgagtgtcaaccccaggctgactttcaaaccataaattgctgatccttcacgctggtgtgcagatcctatgccagtagtagatcccagtcttagtttttggttggttttcacatgtgctggattgttttctccctccaggctctgtgaacctaagcctactgatgtaatagtggacccaatgtgtggaacaggggcaataccaatagaggtaataacagctttttatttttacataagcaagtgatctattcaaaatggtgggcaaattggatccaatgagaaaaaccccaaaagtttgaaaaaacttctcatagtcagggtaaaagttctgttaaagcattgtaagcattgatttcacacagccaagtaccgtgtggttagatggtgaaagctgaagtggtagagaagcgagctgagaacggcaaactgataagcctttttccctgtaatgaatggacgaggcactaggttgaacagcagaggataactgagggggtcataaacgtccacataattagagcttcctggagtgaataagtgggaaggagaaaccacagcattgcagctcagtgccagggcatctgcatgcaaaacaggtgttctgggcttgatctccagcactgcaaaacaaacccataagaatacctaaattgccgggcgtggtggcgcacacccttaatctcagcactcaggaggcagaggcaggcggatttctgagttcgaggccagcctggtctacaaagtgagttccaggacagccagggctatacagaggaaaccctgtctcggaaaaaaaaaaagaatacctataagtattctttatgtttgttttgagatgggggtcttattatgtagccctggctgtcctcaaactcacagggattcacccatctcctctagggcacaaactacctggccgtttgaccttttttttaaaaaaaaaacgtattttaggaaatctgacaaggctacatacccagtgaccatcaataattttcagaattgctacaacactcaaaaaactacagaaggtactaggtggtggtggtggcatatacatttatcccagtactcaagaggcagaggcaggcagatctcttgtgagttccaggacagtcagagctgcacagagaaagccagtcacaaaaacaaaaacaaaacaaaacattacagaaggcaaagtaagaaatgggaagatgttttctttctttcttttttttaatccttttgaggcaaggtcttggtatgtagcacaggctcaccttgaattcatggtaccacaggttgtgttgagcgggcagaaattggacagatgagcaagcccaaagcaacccacaaagggaaaaataatctagtataattaggaaatctctggtctgactttgattgggagttaaaatccaagaggaaaatgcacctagtttgaatgttccactggtggtggctagtgagtgactacttcttgagatctgaacaggagctgaattattatagtcaagaattctggaaaccaaactgtagttctccatcattaaaccatgacttatctgcgaaatggcaggtaaactgaccatgatgaagaaacacacaatcaaagtagacatcagaataaaaggggtggggtgggaaaaccagattaagccatttccacgtaaaagtaggcatgagagagagtacctacgtggaaacttcagctgagtcatgatggaaactgaagggtctgtgtacagatgtgcccattaaattatctaatacctgtcctagaagacactgagatttagaagtactgtaaatgtagcccaaggtaggaaatccatcctggattaaacattaaaataataattaaaaaaaataaaaaggttggcaagcacagatcacacctgtgagttcttcctgtatccctgcacacccagtttatggcatacttgaacattcctcttgtttgctgtcattatagaataatagaccagaatgtcatcatcctaaagggtctgggcaaaatagttatgaagtgctgtattcatgcatgcatgtctttgtggcagaaacagtaccatagtatgtcactttgtttcacaaatatgtcactgcttggcatttatatgctgctgacattttttacttaactacaaaatcttttcagaaatgtggttatcttttaaaagctaaactcacaatccaagacagcataggtctggttagttaggtaaatttttaaaaatcatgttaattaagagaatgcagtcccttatatgtgccagccattgccgggtagaaagaaaatactagacctatctggaaggaattgctggattacttaggcagaggtgatagacatagtttcaaatgggctaagtcagcaacagaggtgtgcaaagtgcttctagcgctgacattgatgtcatagtggatgacattggagccacatttctagtgggtgaaagttcagtaggcagaagaacagggaagacatttctggcaaggaaatgaatggcacggattgccatgttactgagagttggccatagtgacttttcccttttctcttgtggcatgtttaaccaacactcctgtctcatagggggctactgagtggtctcactgttaccatattgctggggacaataacccactggcagtgaacagagcagcaaataacatctcatctctattgactaagagccagattaaagatgggtaagtttaacttcaatgattgcattgcatcttttcaagtctctctccctactgacttggaattattattcacccccagtgctttgtggtatcattatagccaaatgaacagtatgagaagtcacatctaatttactgaaaaacatttgtaattaatttaactaccatttccatactttattggaatgttatttctccttttttgttcattattttttgtcttttcccaaaacggtacagtatggtataggttttgttatagtataggttttgttatgtagaaaaggcacgcacgtgcccttattccagaggcagatggatctgagttcaaggccagcctggtctacagagtgagttccaggacagccagaactacacagagaaaccctgccttgaaaaaccaaattaattatttagaacaatatgagttgaaagaagcatgaaagtcattaccataacttttaaactaccagttatctctattagtagccatggcctgtttaaatcctccaattgctttgcttctgaaggctggtggattaggtttctgtttatatctgtatatgtgtgggggcctgagagtgccatggagctgtgtcatggtgtggaagtcagaggataactagtgagagttgggtctcttcttcctgtgaatcaaattccttttgtctggcttagggcagacacctttgccagctgggtcatttctctggccttttagacacttttttacatgtaagctcattttccctggtattttcttaaccatacatcctttgaaaaccagtcttaaccatttaaaaaacttgtatttcagttatggacatatttcttcctatgttactttaacatttctttttagaaaaacaacctttagaaattcagactgcagaatgttttttattgtatttatttgtgtgtggacatgagggtagaagattgaagtccaactgaaggatttaggtctctccttgtaccacatggtccctgaggatcaagctcaggtcatgagacttaatggccagtaccattatttgctgagccatctcattagcttgggaaaatatattgaaatatcttacctttgtctccacagaaaaacaacctggggtttgcccattgatgctgttcagtgggatatctgcaacctcccactgagaactgcttctgtggatattattgtaacagatatgccatttggaaaaaggtagaaattggattctttttaaataaataccatgagtttaccttttattgtactgtcttctcagtcagaaaaacatgccataattcatttcactcactgtaccattacatggtcctattccacattgtaggctgagaagcacttgcttcttggacagatttctactcgtggtttgtcttcaataagctaagttgcagttgtttaaaaaaaaagtgttctgatagaaaactatacactggactaactctataacactggactaacagtttccttcattggcatagaatagaggctctggcctgtaaaagatgactgcttcacacctaagatttgttcttgtctcatgtaagaaactacctatttaccttttgcaatagattaaacttgaccttcttttataggatgggatccaagaagagaaattggaatctctatccagcttgccttcgggaaatgagccgtgtctgtagaccagggacaggcagagctgtactgcttactcaggacaagaaatgttttaccaaggtactatacacgagagttaaatcactcacctccctgtttgtacacaatacatttatttggtgccctcaacagaagaggatgttggatggaccccctagaactggagttatagttgtaagccacaatgtatcagaaactgaacccagatcctctctaaaaacagcaagtgattttctgagtcaactttccaacccaccacccatagcatttaagtgggaagattttaggttgttttagaatcagactggtagcctaatgacttatgttttttgtgtgtgccaggccttatctggaatgggacatgtgtggcgaaaggtccatgtagtctgggtgaacatcgggggccttcatgctgcagtttatcttctaaagcgcactgctcaagcctttgttcatccttcagatcaagatgaaggaagagaccctccttggtaaagaaaagagtgaagacaacttattaatatttgtagttcctaacactggaaatatcagcataaagaacttgctttgggagaaaaatagcagaaaagtaacttacagtacaggttacactgcttgaccactccagaatgcttgatttctagcaaggtgattgtaatggtatttcttaagaagcctacactgcttggcttctaagtgtcagaacactttaggccatattctattgcttgtgcaacctactgttttatggtctaaattctttgtatcatctcagaagcagaagcatcccttaagatctacagttttatcatctgccttaaaataaatatacaacctaaacagagcaaagatgcttgtgtgactattataatattactaagtagtagaaacaccagtagatgtatggaaccaacaagcctaattaaagaaatttctcttttagtgtatggaagcgttattttccaaagccctccccacccccaaagtgcctgtcagtcttagggggtagagggagctaatgtatctttaaatgaaaatgtaaactgtacactgtactgcttactcaggacaaagatttaccaaggtacctcaggagagttaaaatcacccacctccctgtttgtatacaatatgtaggtctggggccctcaacagaaaagggtgttggatagacctcctgacttgggagccctgttattcctgcctagctggttgttctgttttcgagttgtactgatttttcctcagatagtcttgtgggactatcattatataagtaacctcattacttatcagttccttaacagtgcctcctaaaagtaatccttgtttgagctttatggaaagttatttatttaggaaagtctggcttctttcagcttagattttcagtgtgatgtttctattagaataaagggcacagacaatccttcctttgagaacagaatccacattggcaccatagtcagtggctttttggaattagtaactggagaatgaactggtattatgaaatttttaaaggttttataccctagataggcaattttgcaatcacaaaataatacattattgattgaatataaacttaaaattccatccttgatcaaaggaaccacttttacctcaaaccaaggtgatcacagaaccaagatgtacaactatgattgtttcatcaccatttaccaagttcctgacataatctttgccagtaagcatttaatatttactgaacaaatgaactactttttatgctaagttctcaagttaatacaccaggtttgtacttggttcaccatagctttaattctattaagtatatttaaaaaattgacttaaaacactacaaatatagtggacactgttagcttcatctctggctggtaaattttgctaacctggttacgtgaataggaaataagctatgaagtttctcctctagacaaggtttttgtcacatagccctggctggcctctgcctcccaagtgttgggaactaaagataagcaataccatgccaggtggaaggcttcttactgtgtttgtgtgaaattatgtgtaccagtgcaggtgcctgtggaggctagaagctggtgttaattggcagtctatgagctatctggtgtgggtgatgggatgagaagtcaagtcctcctctagagcagcctgggatccattgccacctttcacttagtttgtttggatggtttttgcatcaggataaagttcttgctcatcagttgtgaagatgttagccacttaagacaccagtttcagcccaagttcttcctgcctgccttctgtgacccacgtaaagcaatacatgcttttcaagaaagacctctcagtcctgtgtgctcagtaccagttttctaggctctttaggagccattcagtgttcactatgtacatctttctagagaagccatttctcaaaatttaaaactttctaatcttacctattcctaaaattttgaaacactagcataaatcttatttgagatttttttgggggtgatggtggtcctattttcaggactagatcaggatgtagctcagtgagaacactaacctaggagtttgaaactaaatttctgggttaaaaggcccagatggctggcatcttctgtatttaattgataagggataagtattagtcaggtgaaatcaatgtaacatggagttattatatacatcttccagaagttggtctaggttcattttgtatgaccaaatcattaagagtccaaattgtcacactcctaacaatgtacaagttcctccaacttacctcaaagtttgaatttaatcacacttgtcagcataacaagccagcctccctccctccctccctccctgacaaaagggatgcccaattccaactgtgaagacccaaacttgtcagtctttcaaaaggatgtttgaagtgtaagtgcatgcccccctctttggttcacaccacaaatgaacagtgccaaggcactccccactttttctttcaccattagggcaaatggcaacataactgttctagacaaaccaatagattaaaaagtcattccacagtttgactatttaggacataggtttattgccaaactttcacataactaaaacaagcacagtgacaagtcaagccacatttgtaagcttcatccatttgtaacatttatgagttatagattagagtttatatctgtggggaaaatttttaatataacaagctgttatattgctcaaaagaaccactgagtatttcttttcatctgccagatattcagcaatgacaactatatggttttaaattttctaagctattacactttccttcaactaatacagcaagtagcttatttcccttctgaaatacttcagctttttaatttctagttcaaagcttctgacagttttgctttctaaaacacgaacaagtctgcatttaaaatgttcaataacattcaaaacaatctgacactcattgaaatgactcctttcaaaatgactacacaatattgctcgcaccaacacaaaagttagtatgttgcaaaagacatgctatattaaactctctaaagacagtatacatttaagaaatgttctggacaaacacttctacatgtcagttttatatatattataacacaaacggtgttaattgaataattaagcattttaaaagcatgaaactacaaccattgttcataaataagttctaacgttgtggttttataatttggaactttggggaaatgttcaaaacattttatgacaaacacctttatcctcacatacaaagaaagctacaatacttaaaatggtaattgcataacacattgcatggattatacaaggtgtaacttaagagtttaattcatacagaacacatatgttctacctacactacattagaaaaatccaaactgcatagcaacatttaacacagtgacattactgtcactgaccatcatgcctctgcttgcttctgagaacataaatggcaacatcttgggattatgaacatcatgttgatctcgaagacctgttgctgctcagacagcagaaatatagccttaaacaagcactgtcctgtcctcaaggaatgatctaaaggaggaaaaacaataattacacaattaatattcttaattaagactttaagagccatggcaatgttcaagcaggaccaaatgtggtgcagtgttgagggcaatctgggaaggttccttaagaagttatgttctgagaccattctcagtggctcaacaacacttggtcaaaaattttaattctcccctcagagaaatggagtagttactccactttcaagttccttataagcttaccatcaaccttatagtacactctagatgtcctgaaatatttctatcagaacaaggtagtataaagctggtaggtatacaaaacgctagactagtttctatccctgacccttaatctgctagtatatccgtaggaagttgcttaagtgccactagtaccaacagcctctgttagagtgaacagtagattttaatgaagggccaataaagaccacttaagactactgactgaattaaaaatccacccagtggagttagtattggttatagttatataacaaaatatccaacttagccaggcgtggtggtgcacgcctttaatcccggcactcaggaggcagaggcaggcggatttctgagttcgaggccagcctggtctacaaagtgagttccaggacagccagggctatacagagaaaccctgtctcgaaaaaccaaaaaaaaaaaaaaaaaggaaaaaaaatatggcttgaaaacatgctattgttgtcaaaaggagatccaaacaagtatttctttgaacaaaaattatgtagaaaacagggtgataaagaacaagggctttttaaaaaaggccagcattatttgagatatacaagtgactccaattcaagcctaaaggccactcaatgctcactaacagtgctaatcagaatcaattccttagcccagtcaaaaatagtcctgaatatcttctggataaacatgtcctccaacatataaactagtatacactaacaaaacgtctcaacttcaaggtgaaatgcttgactcctagacttgtgacccagcaaagtgctctataggtagggttactaggtcagagagtcttgcctgcaaaccacaattatacaattccaccaaatgtaagacatgtaaaaatgacttatttagctcaggttttgaaaattaaaaatcaaacccacaaagacctaactttcacattaagtacaaatgtttaacatatataacatgttttgccttgatatatgaaatcatatgacatcacctgacaggaaacttaagtttatttgaacaacaatcagcctaaggtaggcctagcacatgatcaggatagtgcagggaaacccaaagaagtgcttctgagtataaaccaagagacctcgaaatagcagctttgttctgtatctcatgggctttaactatcacttgaaaacaatttcacaaatcacaaaaccaacatttgtttagtttccaactctgcctattcaccggagaaatccatgtcccaatttgatgggggaaaacttgaatgaaatattatttggaatattttaatatccctgtgtatatgcagatggtttaaagacaggtaaccttaactgtagtttcttggttgtctgccttgttttttgaaatatgctctcaccaggagcctgccaagtaactactcttgtgtgctcagcaagtcctagggatcccttaagcatgctctaacaggcctggcttttttttttaaaaagtaggttgcggtgataataattcaagttttcatcacttgaaacacattttaccaactatcacccaagctcccttagtgtgtcccctataaaagaatctgacctgcaagttccaaaagtattactacattttaaccttagtattcaggagacaaaagcaggcagaactttagtctacatatcttgttgcagatcaggcagagatacatagtgagaccctgcctcaggaaaagctatcatttttatattcacagtaagcaaattaacattaaaagtcagaaattcttaatttgactttggctgtgaagaatttggattctctggatttgaaactagaaaatctgattaagcgatgcaacagtttctgtatactaaaactctaagacccttggttctaaagataccacatttaaaaaaaaagttaagtataagacaaaaagccttaatagctcttttataggggagggactcatttaatattagtccacctcactcctcataactattttatgaggtttattatataacccattttttaaaaaaaaaattaaaggacaattttagtgtttgaaagatttcccaaccccaccctggaaatcaggctgcaaatctcagcagctgcccttagaaggcaaaaagccatgccatttaagccatgggaagttagtagcaaacaagagaccacatggcaggaaggaggctttaaagaaagcccacagtgtcaaaagacccaaccaacagcagagacagaaaaaataatacccaaatctcatcagaaaggtagacggatttagccacatccatagtggctcattagggaatgcttcaattataattttatgaaatctcagagcccccctccccaacagggtttctgtgtgtattcctggctatcctagatagaacttgatgtgtagaccaggctgggctcaaactcagagatctgcctgtctctgcctccagagtgctgggattaaaggcataaaggcaagcaccaccactggctggctaaactctggccctacatttttgaaatccaaaattatcattacttgctttcatgtttagtaatggctgcagacttagctttcagctttgtatagatgaagcacaaaagttaagtaaagctagcagtttaaacaaataggatactagaagttcaatttttatttctttattgcttagtgtaagagaaaagacattaaagtctgcattggtcttctgtatcccacaagtctgcagttatggctcctctgtccacagttacacttcaaataaaaattagttccttggtaacatttccagtgcttaaagagtaatttgattattggctaccatattggaacaaacacaaagtatttcattacttcagtaaattctactggagacagtattctctttaaaaaaaaaaaaaagaagaagaaggaggatttatttatttaatgtgaatacacttgtggtcttcagacacaccagaagagggcatcagatcccattacagatggttgtgagccaccatgtggttgctgggaattgaactcaggacttctggaagagcagtctgtgctcttgaactccgagccacctctccagcccctggatagtattattatagagcacaagcacacacaacacaacaacctaaaaaccaagcttcacaaatacatttgttgcttaatcattttacttgtgtttggctacaagtcaagcaaaattataggtcctgaagaagcttggcaaaatcacatttagaccagcaataacgtgtagaatgccatgagtcaagccagtccaagagaaagcactgcttaaatagaaaaaatacaagctcacaagaccttaggtcaggaaagacaacaaacacctgaactttgcattccaaaaggaaccaccttttacagatgtgtacaatgacaaaattttagtaagcagtaatcaataccatgtggctcaataatgaaatataccttttaatgtcttaaaatatcagcctggcaatatgtaagatacatcaggtaatattgggggaggagacatccacctggaaaccattaatggttaatagctcagtttataaatggagaaaaaggagagaggcattcatgggagtggaaagttaagctttaggttggattctcaatacatctattgttgtaaaactccctggactgagaataggcccaaatgtggaacaccacctgacgggagaggtgatagacactgaaaattaaggatcaaggcaaaggatcaacaaaaagtgtactaaggagttataaaagaactgcagtgttgaggccccagctacagcctcgatttgtggtgtatgtaactaatctgtctggtttcatgagtcatcagacttctaagatcaggaaagggaaaatgccaatgctctgtctaggggttggataagccagtataataaatgaaaatggggctaaaatgagtgttctaaaataccttttgataaggctgcagaaggagcgggagaaatggatatgaagtactgggctctttaaaaatgattaaaattctgcttacatagtctaactcgcgacactgtaatttcatactgtagtaaggatctcaagcaggagagtataaaactcgggtgagcatgtctttaatctacctcgatggaaaatactccgaggcggatcacaagcaataataacctgtagttttgctgcataaaaccccagatgactacctatcctcccattttccttatttgcccctattaaaaaacttcccgacaaaaccgaaaatctgtgggaagtcttgtccctccaattttacacctgttcaattcccctgcaggacaacgcccacacaccaggttagcctttaagcctgcccagaagactcccgcccatcttctagaaagactggagttgcagatcacgagggaagagggggaagggattctcccaggcccagggcggtcctcagaagccaggaggcagcagagaactcccagaaaggtattgcaacactcccctcccccctccggagaagggtgcggccttctccccgcctactccactgcagctcccttactgataacaactcagagcgactttgggagagcaagtgcttcctgcctccaaaacagcccaactgagccctcgctccttccctccactccccggagtgcgcgatggaggtctggctcagcacgcccctcttgaggcaactcaagtcggaaacgtgcttgcacccgccccgcagccgctcagccctactgcccgtccccgcccccagcgcgcgcttcctgccacgttgcgcaggggcgcgcggccagactctgcggcgcggggccgaggggagggccggaacctgggagcgcctcctcgccgcccccgctggccggcggatggactcaacttgcacgaacacgagccaatggcaagggccagttttctgggccccgagagccaatcagacgacgaggcccggccggcggcgggtaaaacgactcccccagaggaaggggagggtgggcggccgctcgcgcgcgagctacttttcgctgaccctccctcccctcnnnnnnnnnnnnnnnnnnnntcccccgccccgccagaggccgaccgcgcccgcacgtccagctcgcctcaccccacctacctcccgccccacccagtgggcagagcgaggctgccggcggctgcgcactccggctgccgttaactgacaggcgccttacgccaaccaaaacacgccatttgtgttttcacacacggcgggaggaaaagaagccaatcagcgacgagacgtcggccggaagcgctcctccgctgcccccccccccccgagccatggccgcgtccggtggagacttttccgctcccttctccctccccctccggttgctgcagggcggaccgcattcctgcccaccacccgcttgccccttccagcgtcacgactcgtacccggctgtctcacagaacggctccaccacgctcggagggcctgccgcggccgcccatccccgcaaacgcaccaagccgccctcccgccagagtcccgatcccctacctagccgaggctctctgaggagccggagccccaaagcacagcctcttctttaggcggccccggcagcctccgctgattggcggcgcaccggccaataagtgtggggcggtgggcggagaggccaatggcgcggcgggagggggcgtgtcccgcgtgcccctggcgccggcactgggaatccccgtgcggtcagtggcgtttccgctcgggcagcgggctgagtgagctgccgccgctgccgccgctgccgccgccgggggaggggcggccgccgcccgcctgcgctcagagactcacgcagccctagtcccgccagtccgccaacacagtagtgccggccccctccgcccctggccctccccctccccgcctcgggctcgctccgccttttctgccccccacccccacctcacgggtacgggccattcccggccaggaaacgccgtggcgccgcgttgggcctaactcgagtctcgctgcctcccgggagtgccgtgcgccgcagcccgggcccaggccccggcagcgcctgggtcaaggtaagggtccaacagaaaagagacaccgaaccacacgaccgggccccgggggaaagaagggtcacctcagtctccctgcgttccctctcctcggggtcgtgggcctgggcctccccagcctggtagcaggaagatgcttgcccttttcgtcttctcagctacctttacacaccattgcaccgctcttgcccagagagaaaggctctccttcatctagtcgaccccactacctttttaatgtcttccctgggtcaggactcttcccctccccctactctggtctcccctttttgcctgggtattgcctactccacgtttatacccttttcaggagaggcctcccaaccctgctctcaaaatacacatacttttttttctgtccctgagccccccacctcccctgttcttgcggccttgtgacaactctggtcgctcgtgggggcccagtcctcccctccataatcttcctgaacgcctctcctctggttttccagttcctatctcagatggctgctgcttttcccacaccaaagacattaccttcgccacccccacctcacattcttggactccct

SEQ ID NO: 865 - DNA, 2111 bp, Mus musculus
ccgtttccgggctggcacctcggcttccggcggcgtgctcgcggtgcggagaccggaagggtctgtgcttgctgccgagactgttggtccttttagaaacatctccatcatgtcttgtgacactcaagaagctaccagagagtgcctgggtatgaaccttgatggcaacaaagagcctgtgtcgctggtagaaagcggcgtcagaagtgagtcggagcatctccaagtcactattggagccactgtacccactggctttgaacaaacggctgcgggggaagtgagagagaaactgaagtcggcctgcagaatcagcaaagaccgcggaaagatctattttgatattgcagtggaaagtctggctcaggttcattgtctgagatcagttgataacttgtttgtggttgttcaggagtttaaagattaccagttcaaagatacgaaggaagaagttctaagagactttgaagaactggctggaaaactcccatggtcagaccctttaaaagtctggcaaattaacaccactttcaagaagaagaaagcaaagcgcagaaaggcaaatcagagtgcaggtaaagagaaggctgactgtggacaaggagacaaagcagatgagaaagatggtaagaaaaagcatgccagcagcacttcagattcacatatcttggactattatgaaaatccagccatcaaagaagagatatcaaccttagtaggtgatgtcttgtcgtcttgcaaagatgaaactggtcaaagcttaagagaagaaactgaaccacaggtacagaagtttagagtcacctgcaacagagcaggagagaaacattgctttacctccaatgaggctgcgagagattttgggggtgctattcaagagtactttaagtggaaggctgatatgaccaactttgatgtagaggttctcctgaacatccatgataatgaagtcattgttgctattgcactgacagaagagagtctccatcgcagaaatattacacattttggacctacaactcttaggtcaactcttgcctatgggatgctcaggctctgtgaacctaagcctactgatgtaatagtggacccaatgtgtggaacaggggcaataccaatagagggggctactgagtggtctcactgttaccatattgctggggacaataacccactggcagtgaacagagcagcaaataacatctcatctctattgactaagagccagattaaagatggaaaaacaacctggggtttgcccattgatgctgttcagtgggatatctgcaacctcccactgagaactgcttctgtggatattattgtaacagatatgccatttggaaaaaggatgggatccaagaagagaaattggaatctctatccagcttgccttcgggaaatgagccgtgtctgtagaccagggacaggcagagctgtactgcttactcaggacaagaaatgttttaccaaggccttatctggaatgggacatgtgtggcgaaaggtccatgtagtctgggtgaacatcgggggccttcatgctgcagtttatcttctaaagcgcactgctcaagcctttgttcatccttcagatcaagatgaaggaagagaccctccttggtaaagaaaagagtgaagacaacttattaatatttgtagttcctaacactggaaatatcagcataaagaacttgctttgggagaaaaatagcagaaaagtaacttacagtacaggttacactgcttgaccactccagaatgcttgatttctagcaaggtgattgtaatggtatttcttaagaagcctacactgcttggcttctaagtgtcagaacactttaggccatattctattgcttgtgcaacctactgttttatggtctaaattctttgtatcatctcagaagcagaagcatcccttaagatctacagttttatcatctgccttaaaataaatatacaacctaaacagagcaaagatgcttgtgtgactattataatattactaagtagtagaaacaccagtagatgtatggaaccaacaagcctaattaaagaaatttctcttttagtgtatggaagcgttattttccaaagccctccccacc

SEQ ID NO: 866 - protein, 505 aa, Mus musculus
MSCDTQEATRECLGMNLDGNKEPVSLVESGVRSESEHLQVTIGATVPTGFEQTAAGEVREKLKSACRISKDRGKIYFDIAVESLAQVHCLRSVDNLFVVVQEFKDYQFKDTKEEVLRDFEELAGKLPWSDPLKVWQINTTFKKKKAKRRKANQSAGKEKADCGQGDKADEKDGKKKHASSTSDSHILDYYENPAIKEEISTLVGDVLSSCKDETGQSLREETEPQVQKFRVTCNRAGEKHCFTSNEAARDFGGAIQEYFKWKADMTNFDVEVLLNIHDNEVIVAIALTEESLHRRNITHFGPTTLRSTLAYGMLRLCEPKPTDVIVDPMCGTGAIPIEGATEWSHCYHIAGDNNPLAVNRAANNISSLLTKSQIKDGKTTWGLPIDAVQWDICNLPLRTASVDIIVTDMPFGKRMGSKKRNWNLYPACLREMSRVCRPGTGRAVLLTQDKKCFTKALSGMGHVWRKVHVVWVNIGGLHAAVYLLKRTAQAFVHPSDQDEGRDPPW

SEQ ID NO: 867 - DNA, 377 bp, Mus musculus
gctcgcggtgcggagaccggaagggtctgtgcttgctgccggaaacatctccatcatgtcttgtgacactcaagaagctaccagagagtgcctgggtatgaaccttgatggcaacaaagagcctgtgtcgctggtagaaagcggcgtcagaagtgagtcggagcatctccaagtcactattggagccactgtacccactggctttgaacaaacggctgcgggggaagtgagagagaaactgaagtcggcctgcagaatcagcaaagaccgcggaaagatctattttgatattgcagtggaaagtctggctcaggaagaagttctaagagactttgaagaactggctggaaaactcccatggtcagaccctttaaaag

SEQ ID NO: 868 - protein, 108 aa, Mus musculus
  VARIANT (1)...(108): Xaa = Any Amino Acid
MSCDTQEATRECLGMNLDGNKEPVSLVESGVRSESEHLQVTIGATVPTGFEQTAAGEVREKLKSACRISKDRGKIYFDIAVESLAQEEVLRDFEELAGKLPWSDPLKX

SEQ ID NO: 869 - DNA, 43684 bp, Homo sapiens
aaggccacagtctctagggctgttgttgatgctgagcctatgtggctttatcatcattgtccctgctgatcttgctggtgattctgctttgcctttggcaccgtgttgctgctgcagtgaccactgctgagggatcctgtccctttctttgctcatttgttgcacttcctgcttcctgcagctgcccctttgtgcaggagacctgatggctatccatgtttacctacaacattctcccttgtcagtgctcttttcgttcctctgatatcacacagggaggagagaatggaagtttcccagattcaggacattcgctgtatttgactcctatactaactcaatttgtgttttctgtgctttgcaaaagcagtgtttcagcaggaggaaccactaggtggcaggggtgctgcattccccagctcatgaccttcttccagtaatctcagttataaggatacagttcctttccaaacgaatgagctgcttttaaatcaacttacttatcaacatgaaattcaaggagaagaataaatttcatatacattctcttgaaaatttactgtgatggcactaagtccaccaacaagctctcacaggggttatgttactaaagcggttttatagcccttggcttgaaagggcacgggaaaagtaaataagcctctgcttgcttagagcacagccaaagctgattgtatttccctctagttgttaacacctgacaggacaaaggtccttcgggttaaaggttcatggactcctaggctattatttcattaataagattatattaatagatacatctcttatctctcaatgaggtcccaaaaggttttcttgggggagatggaatttcagtagtgtactgaatgaaaagcaggtgtaggggcatccttctttcaattacatccccacaggaatccaactggccaagtgggatcttcttttaacaaaatagattggggagtacaaggaagggaggagaggtaaaggccaggagtgccaatgaaacccttgtctcacagtgcgggggatcaagagatgctgtgcataactgacagaacaagaagatgtttaatactaatatatcccttacacttaaaaggtaaatttaatgtagaggaacaaactacattgggttgtagctataatggcagaagaaggaagggggcgacaggatggtggtaatgttaataggctaaacttcaagtaccataacaaagtccgcagataatagcaaaaattgaaaaagcaagaaatggcactacaaacgtgtcttttagagccatgaaggtaatcaccatagaaacgaaaagcagaagtggctaacagtccttgcctctctctgcaggagaggaagaaggtgggcaagggagtggctgtgctatctgactttctacccaggaccttgttttactttaagaataggcaaggaggccgggcgcggtggctcatgcctgtaatcccagcactttgggaggccgaggcgggtggatcacgaggttaggagatcgaaaccatcctggctaacacggtgaaacccggtctctactaaaaaacacaaaaaaaattagccggacatggtggcaggcgcctgtactcccagctactgaggaggctgaggcagaagaatggtgtgaacccgggaggcggagcttgcagtgagccgagattgcgccactgcactccagccggggtgacagagcgagactccatctcaaaaaaaaaaaaaaaaaaaagaataggcaaggataggaagacattaaggtaaaaaagatatccaggtttgtgggaacaagcaccactgagctcctcctcatttgtgtcactatatctgatatgaatcatcacacttaatcatatgcttgtttactctttagtttaatataaccactacttccagttagaaagaaatgagtggcttcaatttctacatgtaatgttacctgtctcaaactggcattttctagcaagatccattttagtcaatattttccaaggaggtcatctggttctttctgatataaacgaacataccatttttctttgtaataaaccagaaccataaagagcatatgtgcccacttgtacttactttgtgacagtttagcctcgttcttggccatgcatctgtcagcaggacatggttactctaaaccagcaaatctgctaagtctgaccctcaaacttcctctcctttcttttcaaacccaaatctaaaacaccagcaatgacagcccatccttcaaaacaccccagaatttgacagttctcaccacacccacccctaatatcctagtttgagatatcatcatctctcacttggaccaatgaaatcacctagtaactgcttccattcctgctccctaacattgtccaggcagcagccagagtgattgtctgtttgttcgtttgttttggtcaggcacggtgataatttgtgagacactgacttctacgatgtatccatcccatctctcttccacctctatcctgctcactcctctgcagcctcactggccacctggctattcctaggccctgctgaatatgctgaggccttctgcctgggatgctcccctcctggctatctaaatagcttgctctgttgtttcattcagggtctactttgtcaccttatcaaagaggctttacctgaccacctgacatacaatagacatattcctccacctctccagcaccgtccaccaaccaccttgcttaatttttctccctaatgcttattaccacagaaatgtgatgtatatattttctgtattatctgtttcttccattagaacacaagtaatttataaagtaaagacatttatttctcacatttctggaggctggaaagtccaatgtcaaggtgctggcatctggtgagggccttcttgctatgtcaccccacggcagaaggcagaagggaaagagaacacacatgagagggagaagggagcaaaactcatccttttatctggaatccactcctgcaataattaacctacttccatgataacagcattaattcattcatctaggtagagccctcatgatctaatcacagcttaaagatcccacttctcaacactgttccaatggggcttaagtttcaaacacatgaactttggtggcacacattcaaaccacagtaacatactaccggtgaacaacatgggatagagagatatttcctgaaccgtgagacctgtttatgggactttttttttttttttttttttttttttgagacaggatctcactgtcacccaggctggaataccatggcacgatcttggctcactgcaacctccacctcccaggctcaagcaatcctcccacctcaccctcctaagtagctgggaccacaggtatgcactatcatggccagctaatttttttttttttttttttttttttttgagacagagtcccgctctatcgcccaggctggagtgcagtggcgcaaactgggctcactgaaagtgctgcctcccgggttcatgccatcctcctgcctcagcctcctgcgtagctgggactacaggcgcccgccaccacatccggctaatttttttgtatttttagtagagatggggtttcaccgtgttagccaggatggtctcgatctcctgacctcgtgatccgcccgcctcagcctcccacagtgctaggattacaggcgtgagccaccacgctcagccaatttttgtattttttgtagagatgaggttttgccatgttgcccaggttggtctcaaactcctgagctcaagcaacccacctgcctcggcctcctaaagtgctgggattacagccatgagccactgtgcccagcctgggacatgattttagatagtacaaagataggcattaaataacaccaaatcaggtcaagagaatattttcttttgatgacttaatctctctcattatgtcaagaaaatctcattattgctagtttgtctctaatatttgtaatttgtatttttttatattattttattttggggggtgggtgtggtggctcatgcctgtaattccagcactttgcaaggccaaggcaggcagatcacttgagctcaggagttcaagaccagcctgggcaacatggcaaaaccccatctctactaaaagtacaaaaattagccaagcatggtggtgtgagccagaggctgaggtgggagagtcgcttgagcctgggagccagaggctgcagtgagctgagatcgcaccactgcactccagcctgggcaacagagtgagacctcatctcaaaatatatatacattttttttaattgataatgggatctcactatgctttctgtctctatatatttgcctattctgggtatttcatgtaaatgaaatcatgtaggtatttcatgtaggtatttctcaacaacgaaagacatgtggtctttcgtgtctggcatcttagcataatatttcaaaagtccatccatattgtagcatgcatctgatggtcttaaactcctaggctcaagtgatcctcccacttctgcctcccaattagctgagattacaggcacacaccaccatacctggcttgataatttatccttaaggaatagagaatgttactcttctggggagtatgtaaaagaaaaaaaaaaaaaaagagtataaaatgggccttacattagagcctaagagcctttgcaaggaacagtgtctgaccagaatttaataactttgctttgttttcattgtatttattcttaaggatactatttattttcattatttgcctggtaatgtgttaatcacatttaagtctcccaatataagtctaggagggaaatgatgagttacccatatgaccaaagtttcctttttcctttataaaagttcacataacacaaaattccccatttgaaatttttttttttttcttttttgagatggagtctcactctgtctcccagactggaatgcagtggcacaatcccggctcattgcaacctctgcttcccaggttcaaatgattctcctgcctcagccactcgagtagctgggattagagatgcacgccaccacacccagctagtttttgtatttttagtagagacgggctttcaccatgttggccaggctggtctcaaactctgaaatattttaaactgtaaaattcagtgtttcttagtatattcataacaatgtgtgaccatctttactacctaattccagaacattctcatcacttccatacgaaactctaccccctttagctatcacctgccaaccccctacttcccccagccctaagcaaccattaacctgctttctgtctctatatatttacctattttgaatatttcatatgaataaaatcatgtatgcctgtataacacatggtcttttgtgtctggcatctcagcatagtgtttcaaaagtccatccatattgtagaatatatctgtactttggaaaaactctcaaaccatgcttctcctctgctctcacaccaacacaaaaacagtcaagacttctgggaccccaaaatatgtggggatttctcctcatcagccagcaggcaagcaatcagttctgcagcggacaccagctgtgtgttctccaactcaatttcaacactatctacctagacataatgtcagatcctacaggttaagggttcagtctccaagactatccccacctcagatatcagttgcaagtttgggtctccagaacttctgaccaacaggctttaagttggggtttccatgaccccctctttgggttcaactgatttgctggagcggctcacagaacccagtgtaacacatattttctggtttattacaaaagatattacaaaggatacagatgaagagatgcatagggcaagggataggggaaaggacacccatcagagggcccttggccctctgaaggtttactgaaaaatctactcacaagaaggcagattaataaaagaagaggtatacaaatttattaaaccatgtacacagggagaatcacagagtgattgcccaatatcccaatggggttcagaagcttaacaccatcttgaggttacagaaagaacacggacttggatcctggcaaaacagattatggtggggggatataaattctatttaggggcaataaatggttactagggagaatgattggatggggaacagaaattaattcattaatagttctctttggaacttaaatgatcctcagggacagtcatgatcttataaaagggtccgttcaggtacattcttggtcttctttcctgtaatggataatgagacaaggaggggagcaactgttctccttggagggtccatactatctttatgtagatagggaaaaagtctcttccaacttgatacctaagagtttttaactcaaaatcctcattataccagggagccatattttgggataaaattccctgcactccctctgacctttcatgaagacttcattggttgctcatgattgaagcatggacaaccatgctcatgattgaggcatggacaaccatatcaaaaagtgattggacaaaaaaatacatgctctaaacccagcaaggtctgtctattcagatgcctcttggcctctctgtgcagcattccttcctccaggatatggggtagggccctctctggaatagatgccttacgaccacaatcagattagagtcttgccaagtaggcaggtgaaaggagggcaagagaaggtcagagaaagagattctgtttactgcaaaatgggctaggaaagttatgagctaggaactgtggatgaaaaccaatgtatcatatcacagtattccattcctttttatgaccaaataatattctactctatagatataacacacttgtttgtctattcattagctgatgaacatttgggttgtttctactttttgactaaatcaataaggccgctaggcacatttgtgtacaagttgttgtttttgttgtttagagatgggaacgctctctgttgcccaggctggagtacagtggtgcaatcatagttcactacagactcgaactcctgggcccaagcaatcctcccatgtcagcctcttcagtgtctggtaccacagatgagtgccaccacacccagctactttctaaattttttgtagagacaggtctccctatgttgtccaggctggtctcaaactcttgggctcaagcaatcttcccgcctctgcctcccaaattgctagaattacaggcatgagccagcatgcccagtttgtgtacaagtttttgtttgaacacttgttttcagtcttcttgggtataaagctattacagatgttccttgacttacaatgggattatatcccaataaacccaccatacgcagaaaatagtgtaagttaaaaatgcattataacccataagcccattgtaaagtcaaaaaattgtaagtcaaaccatcctaagtcagaaagcatctgtagtggaattggtgagtaatgtgttctatgtttaattttttgacgaaaggctaaattgttttccaatggacgtgtattagtccattttcacactgctgatagagacatacccaagactgggcaatttgcaaaagaaagaggtttaatggatttacagttccatgtggctacggaggcctcacaatcatggtggaaggtgaaaggcacttcttacatggcggcagcaagaaagagaatgggagaagcggaagtggaaacctcttatcaaaccatcagatcttgtgagacttattcactaccacaagaacagtatgcagggaatcacccccatgattcaatcatctcccactgggtccctcccacaatatatgggaattatgggagtatacttcaagatgaaatttaggtggagtcacagagctaaaacataccagggcatatatcattttgtattttcatcagcaatgtataagtgctccattgccccacatactcattagaacttggaactgttgattttttgttttttacttttagtcattttgatgagtatcccattgtgattaatttgcaattccctaatgactaatgatgttcagcatcttttcatgtgcttattggccatttgtccatcttttggagaaatatctattcaagccctttacatatttttcattttatttttgagacaaggtctcactctgtcacctgggctgaagtgcagtgatgtgatcataactcattacagcctcaacctccccagctcaagctattctcctgtctcagcctcccgagtagctgggactacaggtgagtgtcaccatgcctagctaatttttgtcatttttttgtagcgacagagttttgccatgttgccagagctagtctcaaactctgagctcaagcgagccactcacctcagcctcccaaagcgctgggactacaggcatgaaccaccactcccagcccctttgcacatttataaattgtgttctttttggttttgttttgttttaaattcggtttatctttttgttgttgggttcctttcacaataagttaacttttgtcaactgaaaaataaaaataaaattctatgccccccaactgactgaacaggccctctcttggccaaggagaccctagaaaaaacttggaagctgagttcctactcatgacaggatgggaagtcggacacacctctttataacccctccctctataatcgccattagattttctttcctaagggttaaacagaaaccagcccttttgaaagactcactccaccagcctgatgctgaccctcccatttgcagtttcaatagaacaaccgactagcattccttcctgataagagatcacccaccatccagggagtggttctggccagtctacagaggacgtgcagtgagggttttcacatcccctgcttcaccttttgaagtcaagcggtagaaaactctacccttggatcatgctaaggccaccattttttaaacatgggatccacagagaggcatgaagctcaactgcacatgcacaaattgctcctttcataaatattcgtgacccctcttacagtttatttaacatgtatatttggccactgtgtttagcataaatccctgtcttattcttccaaccctggaagtgcctgtttttggcttctgactggaagctaggcttcccagtctgtcaaaatggctaccatgcaggttcaactctttttttttttttttttttttttttttgagatgatgtcttgctcccagactggagtgcagtggcacaatcttggctctctgcaacctctgcctcctgggttcaagcaactcttctgcttcatcttcccaagtagctaggactacaggtgcaggccaccacatccagctaacttttgtatttttagtagagatggagtttcaccatgttggccagcctggcctcaaactcctgacctcaagtgatccacccgcctcagcctcccaaagtgctgggattacaggcatgagccactgtgcccggccaggttcaaccctttatgagaaataaagttcatctgattgggcacagtggctcatgcctgtaatcccagcactttaggagggctagacagaagaatcacttgaacccagatgttcgagaccagcttaggcaacatagtgagccccactatttctattttttttaaactaaagaaaaatatgaagtaaacagtgctaaaatagtgatggcaatacagaaatcaggaactagtggcatgacattttgagaaagatatttaaataagctggagagactcggtgtctccagctttaaaacagaaatcagtctctgccacttcataggtgctagaacaaaagagacttgttccaaatgagatgacgcatgtgaagcgcttacccagtgctcggcaaggggaagcactctctaaacgttagcaaataccatggtaggacacaaggcccctgactctccgctttcagcttactgaagatcctcaaaaccaacagcacacagcttccagcgcatgctcctttccccaagaccttgtgggggaacccgccgccagcgcggagccaccgtgactcgtagcctgacttccgtttccgggggcggcttccggcggcgtgacctgaccgcaagaggccaatggagtgtgggagctgaaagggtcttcgctggcggccggtaactggcggcggttgggaacggccgagtgtggctcttctggtgtttcagcttggggagagaggggtggccttcctcttgcagttgaggccggcgccgagccggacttcagccggatctcgtggcggagcccatcttgctccctctcccaggcctttacccgctccctaggattcccgggccctgtaggtgggagttgggagacgtgagttctctttcattctgcgcctctcattggctctctgaccttgtgcggaacgcgtcctttagctgacctcagctgcattttttagaagatggagattgtattcacagtgactgtcagctttttaacggcgggaactgacgtagtgttaaacactgtcgtgtatcgctggcacagcacaaggacattataggtattctgtactcaattaagttattttgagtcacagaccttttgaaaatctcgtgtaagctatggcccctccacctctctaatacttcccccggcccccaccccaagcacacacaaaagcttatgcataggaaatttgttttactatttcggattacttccaagatctctctcctgatgcccatctatggatcccagagtctggcaagtagtaggcgtttgaacatttgtaatcattagatagtaagtattcagttaaccatttttatttttaattttttcttttttttttttttttttttgagacagggcctcactgtgtcacccaggctggagtgcagtcctcccacctcagcctcccaagtagctggactccaggcgcccaccaccacgcccagctattttttgtgtttttggtagagatgagattttgccatcttacgcagattggtctcgaactcttggcctcaagcaatctactcacctcagctccccaaagtgctgggattacaggcatgagccagtgtgcccagcccagttaatcatttttaaatgcatgaaatgctatttcacaggagggaagaagatagatagcctattaataagttttaattattggcctaaccaggtactactctcacttgtctcctaacgactctaggaaagaggtattactaattacttaattacatttgaaggtttgggagaattaatttgccataagtcattcaacctatgatggtggaggcaagaattcaaacctgtatctatctgaaactccaaaagccccatattattattattattattatttattttatttatttatttatttttttgagacagagtcttgttctgttaccccagccggagtgcagtggcatgatctcagctcactgcaatctccacctcccggattcaagcaattctcctccctcagcctcccaagtagctgggattacaggctcccaccaccacacctggctaatgtttgtatttttagtagagacggggtttcaccatgtgggccaggctggtcttgaactcctgacctcaggcaatctgcccgcctcggcctcccaaagtgctgggattacaggtgtgagccaccacgcccagccaagccctatattcttaactaaccatgttcttaacatctagatgcagaaatggatttgaatgtgatctgcagtttctgtcgtagttatgaaatggcttttgtcaacatgggttaccccaaagcaaacattgcatgctatggaaatacttcttgtctctttttctcccatggtatctgtattgcttctttaataataacatcatgttttacagcctgcactctgtgcccatgtttattcaaccctttttactttggtgactgtttatcagatgtgttgccttgttcttcctgccctccagagcccatgtttttaattataactgaaatatgagatgataatatttgggctttatttctttttcttttaaaggacagtactgcttttaaagagacagtgttagggatcttggaagcacagccaacatgtgtgacattgaagaagccactaaccaactcctagatgtgaaccttcatgagaaccagaagtctgtacaagtgacagaaagcgacctcggaagtgaatctgagcttctagtcactattggagccactgtacctactggctttgagcaaacagctgcagatgaagtcagagagaaacttgggtcatcatgcaaaatcagcagagaccgtggcaagatatattttgtcatttcagtggaaagtctggcacaggtttgaatggagcaatatttaaaatagttttctaagttgatcattttatggttacttttcattttatagacccttctggaatcctttctgattttcattgctctgccccaaatcaggtgattttaaagttactgcattttctattgagtactgatttgtaattttgactgtagtttcagtatcccttaggaccaaaagtgtttcagatttttggaggggggtggggggagttttggaatatttgcattatacttgccagttgagcatttcttttttttttctttttctttgagacagagtcttgctctgtcatcaggctggagtgcaatggcgcgatcttggctcactgcaacctccgcctcccaggttcaagcaattctcctgcctcagcctccccagtagctgggactacaggcgcccgccaccgcatctggctaatttttgtatatttagtagaaacggggtttcaccatcctggccaggctggtctcgaactcctaaccccgtgatccacccgcctcgacctcccaaagtgctgggattacaggcctgagccactgcgctcggcctgccagttgagcatttctaatctgaaaatccgaaatgctgcactgagcatttcctttcagcattgtgttggggctcaaaaagtttcagatttttagatgtgggctgctcaacctgtagtaggattgctacatttttagaggtgatctagtatttcttgaggattgaattcaccagaaagaatactgttcaacttaagaaattctctaagtatctcagtatttatttacttcagcatatagcagatgtttaacctttggtgatgaaacataaaagagattttccttttaatttgcatcaaaaattcttgctcagaagtaattaggactcactcaaggtaaaaagtgaaggtcagaaaactgcaatctcactatcataaagctgatatatctcattaccacataagcagtgagagggcaaggattgttgtctatttttttttccaccaatatatcccacgctcttagtgtctggcatatagtaggtacccagaaaatatctgtgggatgaattggtaagcaaatgttttccatccaatattttagccaataccctcagcagctttgtgaagataggcactattattatcctcattaatcattaggcttaggacacataaataatttccccagggccactcagctagtaatcacagaactggagctcaaatcccctgcttttaaccattgcagcatacagtgtaccctagaaagtcatcgaggaaatatgatacagcccacctgagtggcttcacctttctcttctcccacaaaagacgtgttgcccacaaaacacttcatgcttctctctttccatctgccctttttccctttctctaggggaaagctgattagtaaccaaagagatgagaaactagggagatgggacattttaaaaatacaaaatatagttagtagctgctttaaaactatcattcctaattttttaaatacttaattgttgatagcttgtgctgttcaaaagctttctcagaaatgtgtttctttttttttcacccaggttcattgtctgagatcagttgataacttatttgtggtggttcaggagtttcaagattaccagttcaaacaaacaaaggtgagctatcctaaacatggtggctgatttttggctgtcttccacaaagagattatttccatttttcatagtctgtgaaagtttagcattactgtagtctttgtaatagagaatactgggaggcttttacagtaaaatctagagttttgctgacagtctatcccaaaagatgttttttgaaaattagtattgaaaaccattaaagtttataagaaagaagaaaacaccttgttttacttgtaagagatataaaccttagatttgctttgcttttacatatatttagttccaaaagagaattgcttccagaacatgaaccaaagaacaagtgacagtttgtgtcttctacaaataacacttcctcaccatcctgcttttgctctgctttcttctctttcttcattttttgaaataaagccaaaataacatctaaatactccttcagttgttaggacaacagctttgtctccaatatgtatttagcatctgaatcctaaatattcagctgctgcctaagctgaaggttgaaaatagattgcagcaaggctttaggttttttccacactgctttttggttaggtttctagagttaaccgcttaaaaacatttttctatcagttttacgtatcttagaaataatctttttaaaaacaactgtgatacgctacctaattgtctaacttttatttattggcaagcatgttgatttccaaaacgttattcaaaaacgagtcaaagttgtatgaaccctcagcctagaaaacaataagaccagacctaaaagaagtcagacttaagggcctggcgtggtggctcacacctgtaatcccagcactttgggaggccgaggcgggtggatcatgaggtcaggagatcgagaccatcctggctaacacggtgaaaccccgtctctactaaaaatataaaaaattagccgggcgtagtggtgggcgcctgtagtcccagctactcaggaggctgaggcaggagaatggcgtgaacccgggaggcggagctggcagtgagcagagatcacaccactgcactccagcctgggcgacagagcgagactccatctcaaaaaaaaaagtcagactgaaaatagataaaaattgtattaagtaaaaatctaacttttagaaaagcttaaagcaattctaatgagttctcttaagtattcagatgataatcatgaatttattagtccccacccccctcttttaaaaaatattgagatggggtctcactatgttgcccaggctggtctcaaacttctgggctcaagtgatcctcccacttaagcctcccaaagtgctgggattacaggtgtaagccattgcacctggcccccattccccacctccacccgcgcatattttttttttttttttttttgagacagagtcttgctctgttgcctaggctggagtgcagtggcacaatctcagcctactgcaacctctgccacctgggttcaagcgattctcctgcctcagcctcccgagtagctgggactataggcatatgccaccatgcccggctaatttttgtatttttagtagagacggggtttcagcatcttggccaggctggtcttgaactcctgacctcgtgatccacctgtcttggcctctcaaagtgctggggttacaggcgtaagccaccgcgcctggcctccatctgcctttttaaaagtatgaacaaatctgtgatttatatgggtttttaaagactagttaatacatgtatttggagcaaacttgtaaagactgaatggatatagagtgaaaagtaagtctttgttcctatatcctcatgctatgcagctccctccctggaggcaacaactgttagcaatttcttgggtattattctggagatattttacgaataaatgtattttatttacacaaatgaaagcatagcatacatacttttctgcgctatgcttttttttcatatacaagttgagtatcccttatctgaaatactcgggaccagaaatgttttggatttttgtttgtttgttttttgaaatattctgggttgggcatggtggctcacacctgtaatcccagcactttgggaagccaaagcaggtgaatcatgaggtcaggagtttgagagcagcatggccaaggtggtgaaacaccatctctactaaaaatacaaaaattagccgggtgcggtggcgggcttctgtaattccagctactcgggaggctgaggcaggagaatcacttgaacccgggaggcagaagttgcagtgagccgagatcacgccactgcactctagtctgggcaacagagcaagactccgtctcaaaaaaaaaaaaaaaaaaaaaaaaagaaagaaatactctgagggtggaacctatgtataaataaatccaagattcatttgtttcatatatacgttatacgtatagcttgacggtaattttatatgatttttaaaataatttatacatgaaacaaagtttgtgtacactgaaccatcagaaagcaaaggtgtcactatctcagctacctgtgtggcatcatgttggcacttcaaaaaaattttaggttttggattttggactttgagattaggaatgttcaacctatatgttggagatcctggcagtatcattgctggaattggctgcgtatactccattgtttggctgtataataatttaaccagtcccattttagggcatgagggtttttcacattcttttgctattacagtggtgcaacaaatacactatgtaaattcttgtacatattcaaactgagtgtcatctttgtgtttatcccattgatacttattgataatgacaactgtttagtcttagttttgtcatgctcatactttttgttttttcttaatttgaaaaatctttacattatgtctttacttttttcatatgcctgtgttttctaatagtttggaaggtttatgtgtgtgtgttctagctgttacctttataactacaatttgatattatctaccttatctaccatatatacacggtattttttgaatccctgctaaaagcaatgatgaaattggcatatttatacttttttcctttatttttcagttatttttcttagtgttcacccttaaacttttaaatatacttacattttatttatcagctttaacttctatcctttgacctctgggtgtaagagatgagggtatcagtatgcccatttacatgccagtttgtaacatttaccttctgctttataatcacaatccctacacttgttttcattttagtgatataattaaatagattataggcacattatttgtccttttgttataatttgtatctgttgaatggcatgagttcagaaatgtttgtctttcacctttatatttggctgatagtttgggtataaaatttggagttaggctttctttccttaagaatattgtagtcagtgttcattctcttttgtaaaagatttatttttttagacaagatcttgctctgttgtctaagctggagtgcattggcgtgatcatagctcattggagccttgacctcccaggctcaagcagtcctcccatctcagcttcctgagtagctgggactacaggcacgtgccaccatgcccagttaatttttgtatttttttgtggagacagagttttgccatgttgcccagtctggtctcaaactcctaagttcaagtgatccacttgcttcagcttcctaaagtgctgggattacaggcatgagccaccatatccagcccagactttttttcttgtcattatttcccaaacaatacagtataacaactatttccatagcatttacattgtatcaggtatcataggtaagatagagatgatttaagttactcttgagaggatgtgtgtaggtcatatgtagacactataccattttatatgagggacttttgagcatctttgggttttggtgtctttggcggtcctggaaccagtgtcccccacggataccaactgtccataagcaaagtagaggtttatttgtttgattatagtggtgagaaatgaatgaatttctttctctgtcctttacaggaagaagttctaaaggattttgaagacttggctggaaaactcccatggtcaaaccccttaaaagtgtggaaaattaatgccagttttaaaaagaaaaaagcaaagcgcaaaaagataaatcagaattcaagtaaagagaagattaataatggacaagaagtcaaaatcgatcagagaaatgttaaaaaagagttcactagccatgctttagattctcatatcttagattattatgaaaatccagccatcaaagaggatgtatcaacattaataggtgatgatttggcatcttgcaaagatgagactgatgaaagctcaaaagaagaaactgagcctcaagtgctgaagtttagagtcacatgcaacagggcaggagagaaacattgctttacctcaaatgaggctgcaagagattttgggggtgctgttcaagattattttaagtggaaggccgacatgaccaactttgatgtggaggtaggtataggctctgactgtggtgattgaagaatgctgtcacagatttgtagaatttccagactaacccaatgttatgcacaattaaactgaggaaatagtagggtgtggttaagaagagcataggctatggagacagatttagatccaaattttaactccacaactgtataactttggactagatagtctctgagcctctgtttcaaatggagccaataatattatgtacctttaaggttatcctgaaggataaatgaggtacatttaaaatatttggtgcaataccttgcatacactaagtgctccatagatggaagccatcaaggttgagttgtctgttttctttttctttttcgagacagagtcttgctctgtcacccaggctagagtgcagtggtacgatctcagctcactgcagcctccaccttcctggttcaagtgattcttgtgctcagcctcccaagtagctggggctacaggcacatgccaccacacctggctaatttttgtattttttaatagacatggggtttcaccctgttggccaggctggtctcaaactcctgtagtgatctgcctgtcttggcctcccaaagtgctgggattatagctgcacctggcctgatttctaatagactactcttttactatattatatggactttcatattataaaattcaaccagaattaaaatagttattttgtttttgtgtgtcttggttgcagagctttgctactgaaaaaataaaataaggctgggcgcagtggctcacgcctgtaatcccagcactttgggagggaggccgaggcaggtggatcacttgaggtcaggaatttgagaccagcgtggccaatatggtgaaaccctgtctctactaaaaatacaaaaattggcccgtcatgatggcacactcctgtggtcccagctactggggaggctgaggcaggagaatcacttgaaccagggaggtggaggttgcagtgagccaagatcatgccactgcacttcagcgtgggtgacagagcaagactccatctccaaaaaaaaaaaaagtgcattttttaaacaaaccctgaccttctcaaaccaggacatcattgctaatactcatcctagagtcagctctcctctttcttaaattctgctagatttccaaagccaggtacctcattttagtatatttactttccttggtcttaatcctcttttatctgggtgattgacatgtgaaccataggaactaaagtatttaagtctctgacaccttaaaacatctctagcagctgatatatttaccaaagagtcaatttccgttgcttttgggacacttgaatctggggcaagtcactgattctaacttttttgtgcatgtcaaatcaggagtctaattccccattcctttttttcctcatacactgccttgcaaatgaatacgtggctcacacctgtaattccagtactttgggaggccttggcaggcagatcgcttgagcccaagaatttgagaccagcctgggcaaaatagtgagaccctgtctccactaaaaataaaataaatattttaaaaaataaaatgaataggttaaccagaacagtgatgtctaaaagttagcaaggtgattcagaggagtttctggagccgtgctgcattggtttaaatcccagaggaggctgggtgtggtgacacacacctgtaatcccagcactttgggaggtcgagattggaggattgtttcaggccaggagttctagaccagcctaggcgacatagggagaccctgtctctacaaaaaataaaaaaaaaattagctgagtatgatgacagacacctatagtcccaggtacttgggaggctgaagtaagagattgcttgagcccaggaagtccaggccacagtgatctgtgatcatgccactgcactcaatcctgggcgacagagtgagaccctgtctcaaaaagggaattcctgaggagctgtctttgtgcctcagtatcctcatttataaagggaataatacctagcttaggggatgtgaatatgagatgaggccatgtatgtaaaatgtgtagaatagtgctttgcattaggaagtgctgtatgagtatcagctgtgcttctgctgtggttaagctcaggaagtctttcagtgaaagattggggaacattttggtttagtttagttcacttttgagacagggtctcgctgtatcacccagactggagtgcagtggtgcaatcatggctcactaaagccttgacctcccaggctcaggctgtcctcccacctcagcctcccgagtagctgggactgtgggcctgtgccactgcactcagtgtaataagactttttatttgagactttaccaatttttaaaacttttttgttgagatacactttgcaccccttaagtacacaaatcttaagttttcagtaagtttttacttatatacacgatgtgtaaacagcatccagatagagatacaaactatttccagtacctcgggctccccttgccctttcccagtcagtacccactcaaggcaatcactaatctgactgctaccaccaaaaattcgttttgccaatttttgaacttcatataaatgaaatcatatagtatatagtttttttcgttcattttaatatctattattttcttttaattcactatgtttattggctacaaccagatttcaccccaatttttataacacaaacatattttgaaggcttagaggttttttaatatgtattttttaaatgtcttaactttttagacagttctgggctgtggtgcgctatgccaatcaggtgtctgcactaagtttggcatcaatatggtgacctcccaggagtaggggaccaacaggttgcctaaggaggggtgaaccggcccaggtcagaaaagtcttattactaagcgcagtttgaacaatcctaaaactattttgtcttgttccactttgctataggttcttttgaacatccatgataatgaagtcattgtgggcattgcattgactgaagagagtctccaccgaagaaatataacacattttggacctacaactcttagatcaactcttgcctatgggatgctcaggtaagaaaatgagtttgccatccagcttaaagtggcaccttggtttgaatgttcccttcaaaatactgatttgtgtgtatgtgtgtttgaggtactgtgttggaatagagtggataaagaatagaatggaaagctaatgatctatttctttcccttctatccaatattgactccttgtgatctgaaaatactgcttaataggtggctcagttttctttatttctttttttgagacaaagtctcactctgtcgcccagactggactgcagtggcgagatctcagctcactgtaacctctgcctcccgggttcaagcgattctcctgtctcagccgaatagctgggattacaggtgcctgccaccacgcccagataatttttgtatttttttaatagagacgacatttcactatgttggcgaggctggtctcaaatacctgacctcaggtgatccacccgcctcggcctcccaaagtgctgggattacaggtgtaagccaccgcgcccggttttcttgattttaaaatgagagtaatagttttcacctgcctcttgaatgaggttaccacatttctgtttagcaaggatatgtgtgttgggagataagagtaaattttgctgtttcatttctgtgcagtgaaaaagatgaaagcagagatttttatgtgtataacgtgtaaatgaacagaaagagcttttacttatatttttaagctttatactcacagcaactcaggaatcatcctagaattttttgcttttcagagtacacgacctatctttccttctcctttgcccttctctcttttattgggtgcttctttccaccacttgaaaatgtttattttctctaaagcttctgttttccagatggcaaaatggatttgatgtgagacttaaaggattattagtgaggattaaatgctgaagcatatgcaaaatacctattatatacagtgcctggtatgtcctggtagttaagtccagtcatgcatcacttaatgacagggatacattctgaaaaatgtgtcatcacgcaatttcatcattgtgcgaacctcatggagtgtacctacacaaatctagatggtgtagcctactacacacctgggctatgtggtatctcctattgctcctaggctacaaacctgtacagcatgttattgtactgaatattgtagtcagttgtaacgcagtggtatttgtgtatctaaacatagaaaggatagggcaaaatatggtattataattactgcattcatatatttggtccaccattgattggaagattgtcatgcagtacatgactgtattccttctcttccaatcttttatcttcctaacatattaattcaatgacgataatagaaaattgggcccatttgataaaggaaaatcttctagtcttcattaatttaacaaatatgcattatctactgccaggcatatggtagaaaccagggatacagagagggtgttattttgggtgcaaatatttaaaacctaagtaatcaagtttaggataaaaaagtgataattgtgccagagaggggtttattggaaagataaagagaaatcttggggattctacagaaaaactgaatgttggttctcaagaagggtaggaaccacatcttggaaaaccaccagaaatgtaggcagccatttttatctccccttagagcctgtggactcttgtctcttctcatctacatgctttctcatctaaatttatgtatttccaattccaaacgaccaacccacactgcctagggcttttagctctttgttccaaattcctggaagagaggatctgatggacattgttttggtcagatattcacccctgaccatcaggaatggcttggagtacagggtgcttaccccctcaagagggttgccaaggattctattgccatgtgttgaggagtaggagcaaggagatagagcaggaccaatgttacaataagaacccactattaacccccaagaatctgtcttgtgagggagataaatagttatcatacatgcgataagtcccacaccagcacatgaaaagattagaagaacaagagaagggaagaaacctactgacctgtttcagggtgggatgcttcataaagaggataacagttaagccactaacagtaatgcctctaatcttgaatctgttacctactggttttgtgtccctgggcaggtaacttcatgtttccttgcatcagcttacctttaaaatgagaataatgataattatctaacagggtccttactgaggattctgtgagataatgcatggaaagagcttaagtccatgcccaggaaatactaagtgctcaaagtaaagcatttttttttcctttttttattacctagttccacagagcaatttttttatatcaagattagctttaaattcagaaggaaaggaatactgaatgtctcattgccagtaaccttatattgatgcatgtttgacttgagacatttttgagtctttttaatgtaatacaggtttctgttgaaaacaacactgttgtcaaaaagtatgcatgagcgtgtgtgtgtgtgtgtgtgtacacatgtgtactttaagatgtctgcaaactaaatttcatctgagagtgaaatgggattttggaagatagtcaaaggagatttagttataaggattttttttccccaagtaatggaatatacagtcaacatatcattataaattgattttatttatttatttatttatttttgagacggagtcttgctctgtcacccaggctgcatcttacatgatcttggctcactgcaatccccgccttctgggttcaagcaattctcgagtctcagcctttgtactagctgggattacaggcacccaccaccacgcccagctaattttttgtatttttagtggagacggggtttcgccatgttggccaggctggtcttgaattcctgacctcaagcgatccacccatctcagcctcccaaagtgctgggattacaggcgtgagtcaccgtgcgcggccacaaattgatttctaaaatatgtgtagattggtgttccttcgggctagtgtggtaggtcctcaatcttaaagcttcaggaatcatcagtatagaagcctcagcttttgagtgagtcttcacataggctgttttcttttctctaggctctgtgatcctctaccttatgatataatagtcgatccaatgtgtggaactggggcaataccaatagaggtaatcatatttctttagcttttagataagagtgatacatccagaatattctagacctaatgggcaaattagacataatgaaatctccatggttggatcagtggacccaagagttttaaaacaattaacaatagaaagtggaacttttttgtaaagaatgtaactacttatttcaaagagccatgtgccactggcctagatacattgttagtgacatctattcactagattacagaggaagctgagaattacaaactgccgatgagtcctctttgtgtaacagacaagctggtagacttgaatgggaaaagataattgaaggcataagcataaactggaggaaggcaattttcttctctgtaatccacttaagttcctagagggaataagtatagttgtaaaaaggggaaacttatgaacattacttggattttttaggaagtctaacaagcttaataccaaatgctcttagttttcaaaattaccatgatattgagaggactcataaaaactgtgtaaagcaaagcaagaaatggaaaggcattttctaaatggagaatatttcacagtagattccccttgaataatcagtatcatctatatgtttttaaagaatttagaagagggagctcccagtaaaatcactgaagtttgtgtgaaacatagtagttcttccatatagtatactgacagccaatttgaataaactgcagggagacacagcagattatatgattgggtagaaactggacagatgagcaagtccaaagcaagcccacaaggggagaaataatccaaactgtaattagaaaatggtatctgttctgggagttaaaatccaagactgaaatcatagaagtctacatgtgactgtgttccgtgaaagctagagaaattactgtggcttaaagagactgcacagtaaaaacccagtccttcttgtggccaagaaggattctgggaagaaagcagagtgttgttttctagtatgaaatcatgatatgtgtatgaaatagcaggtaaggtcaccgcatgtcaagaaatacacaacagagctccgagtaaaaataaaggccgaaaaaaattaaaacatgaagtttgagccatttccatgtaagagtagacatgcagatgtcaatgtagaaaaacctaagccgatatatgatcaaaatgaataaaattatgaataaattgacaaggtatatataaagatttgttcaccaaagtataaaatacttgatctagaataatttttttttttaatttagaagtgttatgctataaaacccaattctttccaatgctgaaaatccaaataggtttaggaaaaaaaaaaaagaatatttgggaatcggaatcactgagagccttcctcaaactctaggtcccctctacatccccacccacccaaaattctgggatacttcaacttcccttttgtttgatgtcatcgtaggattgtagacagggtatgttatcaccctcaagtgtctgggcaaaagaaaaagttatgaaacactgcactcatggatgagaagtatgttactgttcacaaaggaacacaaaggtgtttgctactcacccctaagcagaggcagacctttcccggctttcatgtcagaaaccttctgttaatctgcatagaacattgttcaggcctagggtcacgtcacctcattccacaaatgacatgtgacagcttggtatttatgttctgctgacaggttttttatttataattacaaaatccttccagtgatatggtggttaccattcaaaagcctatcatacaaaggaaattgcattttactattatttttttgacctggggtcttgctctgtcagccaggctggagtgcagtggtgtaatctcagctccctgcaacctctgcctccctgtcttaagccattctcccacctcagcctctcgagtagctgagactcaggtgcacaccatcacacccagctgatttttgtgtttttgtagagatgggctttcaccatgttcccaggctggtctcaaactcctgggctcaagaaatcctcctgcctcagcttcccaaagtgctgggatttcaggtgtgagccaccatgcccggccggaaatagcattttattttgcaattttcaaatatatcagattatgtaaactcccacaaccacaaatctcaaatattttcaaaccgcattaacttagaatttagtgtgccagacactgctggatgaggaactgaataaaatactagacctgacctcagagagctcccaggttagttgagaggcataaaggggaagaaataattaaccgtgggacaagtgcagtggcagaggtacgtacatacaaagtgtttttgggaggggcacataagactgcttggagagttaaggttgatgttgaaagggcatgaggtttgagctgggtcttaagagatgggtagaggttcagcaagcagagaaagaataagagggcattttcagccagggaaatagcacagttgacaacatgcaatgttttgccactctagaaaagcactggattttctttgtttgttgacaatttaatcatattttacagtttgctacttttgttttaacatacactcttatcttttagggggccactgaatggtctgactgtttccatattgctggtgataataatccactggctgtgaatagagcagcaaataacattgcatctttattgaccaagagccaaattaaagaagggtaaaaatttaaaagatttcttagcatcttttagagttagagaatcactttttatattgactttatgaattaaaactcccagtgcattgtgacgtcattgtaaccaaaatgaatatactatgagactccatttacatttttaaagtttattgaaaataagttatatttttaaaatattattttagcgataatttccccaccatatgcaatttttcatttgtcttattcatatgtcttttcccctacatattggaagaatattttatagactcattttaatttcacaaaattttaaacagtatatttttacataggcttcttttttgctttgggtacagggtctcattttgtcacccaggctggagtgcagtgacatgatcatggctcactgtagcctcaacctactgagctcaagcaatcctcctgccttggcctccctagtagctaggaatacaggcatgtgccaccatgcccagctaattttttaaaatcttcgtagagatgggggtcttgctgttttgtccaggctggtgtcaaactcctggcctcaagagattctgccgcttcagccttccaaattgctgggattagagacgagtcaccacacctggaccatagtctttaaagtcactacataaattccatcgtatagaaatactgcagtttatatagcctcgtctctattttattactaagtcattggttatatatttcattgtctctctgatctaattttttaggacagtgcttctcaaacattaatgtacatgtgaatcacctgggagtactgttaacacagatctgatttagtagtttgggatgggacctaagagtctgcattttccaggaaactccaggacaatgctgatgctgctggtctatgtatcaacattaaatccttttacgtgtattaagacaagtagttggaaggcttcaattttcttaaatactgatttattgtgatgaattaattttgaatggttgtttcatatttattgagggttttttttaatgagcctagtatatggccagtctttttttttttttaattaaaactgataaacatttaaacaaacgtacctttctagcttctgaatattttatcttgtttgtacctacactgtctgttcaacccgtacttttttttttttttttttttttttttttttttgagacggagtctcactctgtcgcccaggctggagtgcagtggcttgatctcggctcactgcaagctctgcctcccgggttcacgccattctcctgcctcagcctcccaagtagctgggactacaggcacccgccaccatgcccggcttattttttttttgtatttttagtagagacgggttttcaccatgttagccaggatggtctcaatctcctgacctcatgatctgcccaccttggcctcccaaagtgctgggattacaggcatgagccactgtgcccggcctcaacctgtacatttctatccattttactttggtttttaatattttttgccttttgttttgtgcagttattggtatgcggttataatacatattttatgtgtacttttaaaaattatgtaatgattgcttttattgcatttttttcttaaattcttcattaaatgtcaattaaatccttaatttctgctgataacctttgacttatcttcagttcttagcctgtgcattattttgtttcttaaaccagttgctttgccttaatgaggaggatttaaatcctttgtatttattattattcattctgtcttctgtcatctatattttttatcttaacttttttcttagtcttgttttatatagcatggcacatattttccttttggtttttcatcttgaaacaattacctatatatttgccaattttactatctgtttttcttttaggcctcctgttattactagttttacaaactttattcttcagatacatcaccccattatctattctttagtattgtttttctccagtgtatgttttatcagcaacttaaatttttgtatcatcggttatgtaatttactgcttcagcattgtttttaaagttgtcttttgcagttctctgcattacaatcatgttttcagtttgtttcccttttttctgagacgggggtcttgctctgtcacccaggctggagtaaagcggcacaatcctagctcactgcatctttcaactcctggactcaagtgatcctcccacctcagcctcctgagtagctgggactataggtgtgtgccatcatgccctgctaacttcttaaaaaagtattttagagacaaggtctcacagtgttgctcagctggtctcaaattcctggagtccagtgatcctcccacctcagcccctgaaagtgctgattataggcacaagctaccatgcccagcctgacctattttttacctttgtgccatttcttaaattttgaataggttgatattatcactgatatccttagcagtttatgttttgctgtagcagtctctcttcagaaacaaaaattgttgtaataactttatgcttcacagtatgttgaagcacctttcctttgtccccacagcaaaccctcctggggcttgcccatagatgctgttcagtgggatatctgcaatctgccattgagaactggctctgtggatattattgtaacagatttgccatttggaaaaaggtgagaaatactagtacctgcttgtcttctaaatatgtcattattttccttgcgtttattctaagtcaggaaaaaaatcttgaattttagcagacttagcagagctgtttttcacttaacaacatgatggattcacccattatgtttcttccgagaactcaggaatgtattaactacatttggaatcctgaccatcatgggaggttcatttttaaattacctgtaattcactttctagcccattcttgaattatatatcctacacaaaaaggtggtagaagacttggttctcattctgtttctcagcataaatgattctttttttttttttggagacagagccctgctctgttgcccaggctggagtgcagtggtatgatctcggctcactgtaacctctgcctcccgggttcaagcgattctcctgcctcaccctcctgagtagctcggatttcaggcacatgccatcatgcccagcttatttttgtatttttaaaagacagggtttcaccatattggccaggctggtctcaaactcctgacttcaggtgatctgcccgcctcagcctcccaaactgctgggattacaggcatgagccaccaaaacacctggcctaaatgatttctaatcacttgtttggtttatacagtttgactgcttattatactaagaggacaagtcatataactaacacagttgtctaaaaaaaatttttttgattcagaattctaagcagtttactaactcagcttatttcatagacatgtaatggcaaaggtctggtttctaaaactacagctatttttcatgcctcaggatgcatgaaactgtttttgtttcatatagtccttctattttgtatcttttgcaagtgtttgactcatgagaccttctattataggatgggatccaagaagagaaactggaacctttatccagcttgcctacgggagatgagccgtgtctgcacacctaccacaggccgagctgtactacttactcaagacacaaaatgctttaccaaggtgctatacacattagctcaaaatcgcagcctgtggcaactttgggatctttttgagatttggggatgtttgtttggataagatttgttttctcttcccctgaggtttcctatcttggcagttaagaatcctagttgatgtaaaagtagattgtcaacctaattgttattttttttgtgtgtacacaggcgttatctggaatgcgacacgtatggcgaaaggtggatacagtctgggtgaacgttggtggtcttcgtgctgcagtttacgttctgatacgtacacctcaagcttttgttcatccttcagaacaagacggagaaagaggaactctttggcaatgcaaagaatgaagatgactaatagtacttgtacttcccaccactggaaatgttagcataaaagaacttggagaggaaaaaagtattaacaaaactgcagtctgcactctttaaacctgtttaaggctcttcatcctggttagcaaaaggtgtgaatgtaatgtgatggaatttaaaagttttatgagaccaggcacagtggctcacgactgtaattccagcagtttaggaagccgaagtgtgcagatcacctgaggtccggagaccagcctggccaacatggtgaaaccctgtctctactagaaatacaaaaattagccaggtgtggtggcgggcgcctgtaatcccaactactcaggaggctgaggctagagaatcacttgaacccagcaggcggaggttgcggtgagtcgagatcacgccattgcactccagcctgtgcgacaagagcgaaactctgtctcaaaaagattttataagaaagcagagcttttccttgaagctcttttgaagtggtagcttaattagtattttgttgaaaatactttaaagatgcctagtgaaaagcctactaaagtgctgtgagattggggtttagaacattttattttcaggctttatggcctattttccattgtgtcaagtgcaaaactaccctggcccaaaggaagggcagagaacataattacatcttaggccacatttcattctttgcagctttgctaatccagttgctcaagttctttacctcaacctgaaggaatgaagcattattacattttgtgaatggtgttcagcctataagacgaagtctcacaagacctataggaaagtttaccatctgccttaaatattaaaatatccatctgttattcacattaatacacagaatgaaaatagaggtctaggaattatcaaaggtactgcaaaaatactgtatagaacttatttgtaaatagcacatacattgatagatggggtgtgggaccaacaaaccaaattaaaagaaattgtttttctttcagtacactaaggtgtgtgttttcaaaaccaaacacaaacctgtcaagagtatttgttggctagtttcttaaaaggccaagagaaaaaaaatgatatatctttggaaaacttttaatttgggagttatgtgagttgttactttctcctggatcacgattcacatttaattgcttttccagttgcaacaagtccttcttgagagttttgtggaaaatggtgcttccctggaacaaagagtagttgaggtttttttgtggaactcatcatagtattgtttattttggagcctctggctgcaatcagtatagattttcagtatcctattagtattataatagtactcctcttaatactttctgatgtctccattgagaataaaaggacacaatacttttgaaagaagagttcacattagcagcacagccagcaatcctcatctggtttctctgatctcctaccccacacttcataatgaatgggaaataagatgtttatgaaggttttatatcctagactggcctttttaccactatcagaattcacagctgctttgtttatgggccgaacacaaaacttttcacctgatgggagaaaccatttaaacctcaaattaagcaacccacagaaccaggaagttcaaggaccatgtctgttttcaccacgatgtctttccccacccccccaccccccactccaccccccactaagggcagggtattgtatctgccagactgggtatttgttgaacaagcgagtattttcgcctattagcttagtttttaaggaaatcattttttacttgattcatcatagctttaattctattacatactacaataaaaatttgacaagactgatacaaatatgtagtgggcaatagtttgccgtcttcttccctagtatggtgtttttcaatctggtgactagaataggcagtgggctataagcaggattcataaggcctggagctgagttatatgtgacactgccacctattcattgtgtgaccttggttttaaccttcaaagtgggtctcctggactaaaagaatgtgaaaagatggggaaataaatctgtaatctgaacatggaatgacttagttacagaccagacatattgttactgggaatgaaaaagtcaatatatttgaggggaaaaaaatgtaaataaatattgagaaagattttacaaatctaattaggggaagatagttatctcccaatactagagggtaccagagtgcttttaaggggaacatttggttacccttatttctttaaaaaatggcagtttaggaaattctgccctaactgtagtcccaatgtcagataggactcaggtctccactgcaaggaccaaaatgttaagttgaagactgaaaatgggaaaatttggaaatgtctttggaacctcaagtacataaaagcctgtaagtgcttcatactcattaacaacataggcatagaaaaaagatatccttattctcaagcatagccttttctaataagttcatgttagatgtcatgaagtttagtgaggagtgaaaatctatgaggaaaaacatgaaccattctactctggcaaaagttcaggacaaacaccataggcctgtataccaaattttaaaccatgttgaataatgtgaaaaaaagcatcacattgcttatgaaaggctttcctgtcgccccttaatacttctgtctcaggctaacatgtttgttaatgagttacagtggtgaagttaaggaaatctgcttcctgtcctagcatgcccattatcccagccatacagatttaataccaggagtcactttaactccatgaagtcattcaacaggtacttgagtatttactatgtgcgtttgtgctagagtagccatttcttaaactttgtggcctcagagaatcccttcacattcttaaagattgagggccccaaatcactttactagtatcttaccatattagaaagtaaaatatttaaatattatagcaacaaatgcatatttttaaaaaaataggtgcattgttttacattttggcaattgtttccctaaatgtctgacttaaatagaagacaactgaattgtttcttttgcattcaattggttacaatgttactagcagttttctataatctcacgtattagtcattaggaaaatatagcttcactgagttatgtcaatctcccaaatgttggcccattttactgtatactacctaaaatatcattggccgggcacagtggcttaaacctgtaatcctagcactttgggaggccaaggtggatcacctgaggtcaggagttcaagaccaccctggccaacatggtgaaaccccatctctactaaaaataccaaaattagccgggtacagtggtacacacctgtagtcccagttatgcaggaggctgaggcaggagaattgcttgaacccaggagacagaggttgcagtcagccagatgtcccaaaaaaaaaaaaaaattattttcaatatcactatctcatgaagtattgggaagctgtcaagttcctgatattagacacaagttttcccgaaattctgattttgactcaacgtttggattttatcattgaaaacaattgctgtcagttgttaggctccaaggaaatagcagataattcagcttacatgagtgctttttcttgagacaaccatttcaaaaagttatgtactgtagggtttaagatttaacaaaatgtcactgctttcacaaggacattcttgagtgaaactggtttttttcttttgtgggggttcacaccacaaatgcatggcagtgaaaaataacttagagtttgatgccactgccacagtttgtgccaaggtgcctgaaattttacttttacctactgttgccttatcaccactcttatgtcaacatatagtttagcataaaccatgagattttaaaaagttattctacacttgcattatttcaggacatgtgtttgttgccaagctttcacgtaagagtatctttaactagttggtgctgatgcctggcaaatacaagccaagtaacaagtccagccatgtttatgcacgcatccattgataacgtattagcacagtcagccctccatatcctcaggttctgcatctgcagattcaaccaaatgtgcttgaaaatatttgagaatatttaatacaatagtacaaatataagtacacaatgtaacaactatttacatagcattcacattgtatgaagtataagaaatctggaaatgatttaaagtatatgggaggatgtgtgtaagttgtatgcagatacagcgccattttataaaagggaattcaacatccttgggttttggtgtccttggcaaatggccagcaagggtgggggagtggtgtccagaaaccaatcccaaagcaagggacaaatatatacttctacagatgagatattaactcagaatccatgtctgcacacacatctttaatgacaagttgctgtatcactcaacagcggcactactatgatcttttacttacacttcagccagcagagacattcagcagtgtgagattttttaagtttttcagctattgtgtatgtttctagtgtataataaagtaacttatcctttaagatagttaagtagcttttcatttctagctttaaaacctgtttttttttttttcccagtagtggcatacctgcattaaaaaataatgccttaccaaaaaaagcactctgaatgattggtttcaaaatgatgccacaacataggtggcaccaacactattcaagatcattccattcccatctctaaaaaaatttttggctgggtatggtggctcacgcctattaactcaacattttgagaggcccaaagcaagatcactcagggctaggagttgaagactagcctgagcaacatggcaagatcctgtctcaaaattctttttaaaatttttttaaaagcccaggcttggtggcgcatgcctatagttccagctactcaggaggctgaggcagaaggatctcttgaacccaggagtttcaggctgtagttcactatgatggcagctgtgaatagcctgggcaacacagcaagacctcatctccaaaaaaagacaaaagaactaaattattctactgcagaacatgattaggtaaatatctccaaagcagaaagacaggtttcatattttcgttagtttgagtcagtccttccaaatcaaatcttgttttttattagtatacagatggtatagccagtaagtaaatgagaagcagtctttttaagccgatccattcttaaatgaaaaaatatataaatattttagaataaatttattaaattctaaagttgtagaatttttaaatttggatattttgggaaaatatttaaaccactattgcaaacaaaacaacaaaatgtacttatgtttatacttaggcacaaagaaaactacagtattttaaagtaaccattacacaatattgaggttgcaaagattactgaaggcataacctaaaaaatgagttgatttctaaaaatgggaaaaaggaaaaaaataatttctaaaaacaagtatgcatacctaaacctacctaatgacaccttagaaaattcaagtatagcaccattcattaacatcaatgaggatgtcatcacacatcatgtagcctctgcacaccgtgagaataaatgaaaaagacaggcatcttgctatcatgacaatagttttgacctcgcagacctctctgtgcttacgcaacggataaagccataagaactgtcctgccctcaaggagcaacctaaagtaggaaaaaaaaaacaaaattacacaattattatttacaattgtgagaagagctcttgacaacattcaaatggaggatacagtgtagtaagggtgagggtatcaaggcttccttgagaagtgatgttttgaggccattctttcttctcaataactggtatttggttcctgaatcctttaacttccttaccattgtcactcctaagccaaatctcattacgtcatgtctagactactgttaagagaaccacttaagtggtctctgcagccctcaatttattggtgttatctatgggaaaattgctcaaactctaagccttagtttcctaccctataaaatggggttttatatacaaggaacatactaaatacacaggtatacctcagaaacacggcaggctcaattccagagcactacaataaagcgaatctcatgaatttgttggtttcccagtgcataaattatggttacactataccatagtctattaagaagtgtacaatagcattatgtataattgataaatacatcactgctaaaaaaatgctaacaatctttttgctggtggagggtcttacgccaacgttaacgatggctactgactcatcagggtggtggtggttgaagattacgatagctgtggcaatttcttaaaagacaatgaagtttgccacactgacatcctttcacaagacttctctgtagcatgtgatgctgtttgatagcatgatagcattttacccacagtagaacttttttttccttttcctttttttttttttttaaacgcaaggtctcactctgtcacccaggctggagtgcaggggcgccatctcggcttactgcaacctcctcctccctggttcaagagattctcctgcctcagcttcccaagtagctgggactacaggtgtgcaccacacctggctaatttggtagaggtggggtttcaccatgttggcaaggctggtcttgaactcctgacctcaaatgatctaccagtctcggcctcctaaagtactgggattgcaggtgtgagccaccacacccagccagtggaacttatttcaaaattgaagtcaactctctcacaccctggcactgctttatcaaccaggtttctgtaattcctaaatcctttattggcattttaacaatgttcacagcaacttcaccagtagattccatctcgagaaaccactttctttgctcatccctaaaaagcaactcctcatccattcaaatttgatcatgagattgcagcaattcagtcacatcttcaatgctttacttccagttctagttctcttcctgtttccacacctgcagtacacaaaaagcattcaataactattacttcatttcttctacctatgtttccattagcttttgcctatagtacgcactagagtatgttaccattatttgttataagtagtacctcattattacactattcgtaagcaatacctcaaggtctaagattagattttaaatcaaggtcagtaaaaatagaaaaggctgtgaagactgttgactgactttaccagaatccatacactagaggtgagattagttaggtgatgaaataaccattctataaacatgatctgaaactctgttactgttgtcagcaggaaaagccaatgttacatatgtttaaaaaagaaaaaaaaaacccaaaaccagaaaacaaaaggtgacaaagtatcaagacaaaaggtcactgatgactgatctctaggaaaagctggaaagcaggattattaaatgtaaccacgactaagataaaaatcagagacagaaaagtctttgtcaccaagaagatatactccatgagagagcagaaacaattcatcaggtttaaccctgctctagataaaataaaactatctgattcaatactcacacttctctaataatccaatacattatcccatctcaagaagagagagtcacagataagaaaaaaaaggcttcttgagaagtatgtgctctaatataaactaatatgccactaagaaagcaacctgcaaagtccagtaccagacttctggatttgtgacctaacaaggtgctctacaattaacctaacagtcaaaccagagtgttgtaaaagagaattatataattatgccaaacctccactcacaaaaaatatatggaagtaacctaagtttacattttgcaaatctcacacacacactagccctgacaaaagtttcaccagctttctcatccaagtacaagcgtgtaatatacttaataaatttgtcttataagggtaagaaatagtatgtaactacttgaaaaggagataggtagctggttaatttaaacaaaaagcccaaggaagtaaggtgcaggaaaaggataactgcaatgattagtacaggaaacccaaagaagaactgaatggtgggatagatgtactcagagaccatgaggcatcagtttcctctatgaatagaatattaggagatgtaggttaaatgggaccctgaagtctctcccaaaaagccttgtttatatgttttctgagcttaactattacttgagaatcaatttcacgtataaaccaacaaaactaacatttattgagcttccagctctgtgcttaggcactgaaaaatcactttccttaaggattgcaattaagcaggagaaacacaaataaggtgaacttctcttgttcgaaagaatatatttcaacattccttttaaaaggaaaacctgacctgcaagtttccaaaaatattaattactattcctctttgcctctcaaaattcccattctgttattttttaggaggaggaaaaaacagttcatttgaggaaaaattgagggtcacatactatacaattgagaagagtttctctgaaactgtaatcatttttggcaggtaaataggcatatccgagtcagcaaatgaacttgaagatactgagttatactgcctgccctgtggggttccaccttccccaaaagaattcagaatttttgggtgatctgagaatctacattaagacaactgtctccacacacaggaggtctgaagatcgctgacataagggtctttttaaaaagtatatttaatggcctagggcggtggctcacacctgtaatcccaggactttgggaagcttagggcaggaagatcacttgagcccaggagttctaacctgtgcagcacagcaaaaacccatctctacaaaaaaaaaaacacaaaaaaattagctgggcatggaagcgtgtgcctgtagttccagctactcaggaggctgaggcaggaggatcacttgagcccaggaagtcaaggctgcgtgagccatgatcatgccattgcaatccagtatgtgacactaagactccgtctcaaaaaaaaaaaaaagataattaaaatgtgtaagatactgtattagcaatataaaaagcatttggtgttaaaatgttggtattataattcctcaggataaaacttactttgtgattgttttctataactcaagatatgatgcttagagctcctccaatcaagtgtttccaggaagtgaaaacttgtaggacagaaatttaggctgggttcatttgtatcacacagacctattcttcattcaagttctgatatatttaactatgtagctcctgtaacagtttaatggaatctcacctccctaaaattcattatgcatttttttttgaaatccaaactcattaacgcttgctttcactgttgtccaaggcaggcacatctttaaaaatggtttgttggacttagctttcagctaaatatataataaataaaacaaaacaagcagttaaatgaaatgtaatgggccagagagcttcagcttttatttccttactgctcagtaaaaagagaaaaccatcaatgtccacgtattctgtaatccacagaacaagtccggggctacagctacactgtccacagttgcaattcaaattagataaaaaataaaaattcagttctttagtcataccagccacttttccaatgctcaagattaataaaatgtcaaaccataaagacatttacatgtcgctcactccatttacttaaagttggctagacatcagagtatactaggagctcaggagtacaagacactattccttcaaaaagctcagaatagttaaggtaatttaaatcagcaatgacaacaaccccagaattactatgacccacgcagtacaaactgctcaggagtcagaagaaaactgcttttttaaaagggcagtttgggtcatagaacaacagaccatggaaggcatgaccaaaggggagatgacatttgaatctgcaggattaaaagcagcaagggtagcattccaaaaagaaccaccccacaaagatatatgacgtctctatgatttgggtaactgcaattcattccatgtgacttcaggagagaggtcatatttgtgtgtgtagtatgtggaaaatagtgaaaaatgaaaaagctgttaaattgaggaaagtctatccagggaccttatgcatcacattcacgagaacagaattcatcctgtaaaccaggggtgtccaatctttcggcttccctgggccacactgcaagaactgtcttgggccacatataaaggacagctgatgagcaaaaaaaaaaaacagacaacaacaacaaaaaaaacaccccgcaaaaaaaactcctaaaactttaagaaagtttacgaatttgtgttgggtcgcattcaaagctgtcctgggtcccatgcggcccgcgggttagacaacttgctgtaaacagtacaagccagtaatggagtttcatctgtcattttcatgctctatcttcctttaggacaatcatcctaacaagatgtaagatggatcaaaagataacactaaagacagagacagcaatttggaagctatcacacaggcatctgagatcagttactaactggtaagaacagaaatgagaggtatttagaggaagaaaaagggagatgttgcctaacctcagatccaattctctgtaaagcagtagtcaagatcacctggactgtgaagacggtcagggacagaatcccagctaaggaaaaaggataaaatgaaaatcaagataaacatttaagaacgtgaactagggaggaataaaagcactgctgggtaagagtcaagccccagctcaagccttaatttgtggtggaaccaatctgtctggtttcgcgagacaccaggctacccaagatcaagagagggagaaagctagtgctatgtctgaatactagaggagcaagtacaacaaatggaaaatgggatcaagtatgagtgagagttgctaagatgcctggtagggatgcaaaggggtagagagcctggggagagagggtgagggagggaagcactggtttctcaagcaaaagctaaaatttttctattaagatttaacctgatgctacactttggtggtgcagcaagggtctcaaatggtataaaactcaggtgatcatgctttatgtctgtctctagaaaaatgctccaaaaatgataagtagtgataatccgcagtctcgttgcataaaatcagccccaggtgaatgactaagctccatttccctaccccacccttattacaataacctcgacaccaactctagtccgtgggaagataaactaatcggagtcgcccctcaaatcttacagctgctcactcccctgcagggcaacgcccagggaccaagttagccccttaagcctaggcaaaagaatcccgcccataatcgagaagcgactcgacatggaggcgatgacgagatcacgcgaggaggaaaggagggagggcttcttccaggcccagggcggtccttacaagacgggaggcagcaaagaactcccataaaggtattgcggcactcccctccccctgcccagaagggtgcggccttctctccacctcctccaccgcagctccctcaggattgcagctcgcgccggtttttggagaacaagcgcctcccacccacaaaccagccggaccgacccccgctcctcccccacccccacgagtgcctgtagcaggtcgggcttgtctcgcccttcaggcggtgggaacccggggcggagccgcggccgccgccatccagaagtctcggccggcagcccgccccc

SEQ ID NO: 870 - DNA, 3622 bp, Homo sapiens
cggcttccggcggcgtgacctgaccgcaagaggccaatggagtgtgggagctgaaagggtcttcgctggcggccggacagtactgcttttaaagagacagtgttagggatcttggaagcacagccaacatgtgtgacattgaagaagccactaaccaactcctagatgtgaaccttcatgagaaccagaagtctgtacaagtgacagaaagcgacctcggaagtgaatctgagcttctagtcactattggagccactgtacctactggctttgagcaaacagctgcagatgaagtcagagagaaacttgggtcatcatgcaaaatcagcagagaccgtggcaagatatattttgtcatttcagtggaaagtctggcacaggttcattgtctgagatcagttgataacttatttgtggtggttcaggagtttcaagattaccagttcaaacaaacaaaggaagaagttctaaaggattttgaagacttggctggaaaactcccatggtcaaaccccttaaaagtgtggaaaattaatgccagttttaaaaagaaaaaagcaaagcgcaaaaagataaatcagaattcaagtaaagagaagattaataatggacaagaagtcaaaatcgatcagagaaatgttaaaaaagagttcactagccatgctttagattctcatatcttagattattatgaaaatccagccatcaaagaggatgtatcaacattaataggtgatgatttggcatcttgcaaagatgagactgatgaaagctcaaaagaagaaactgagcctcaagtgctgaagtttagagtcacatgcaacagggcaggagagaaacattgctttacctcaaatgaggctgcaagagattttgggggtgctgttcaagattattttaagtggaaggccgacatgaccaactttgatgtggaggttcttttgaacatccatgataatgaagtcattgtgggcattgcattgactgaagagagtctccaccgaagaaatataacacattttggacctacaactcttagatcaactcttgcctatgggatgctcaggctctgtgatcctctaccttatgatataatagtcgatccaatgtgtggaactggggcaataccaatagagggggccactgaatggtctgactgtttccatattgctggtgataataatccactggctgtgaatagagcagcaaataacattgcatctttattgaccaagagccaaattaaagaaggcaaaccctcctggggcttgcccatagatgctgttcagtgggatatctgcaatctgccattgagaactggctctgtggatattattgtaacagatttgccatttggaaaaaggatgggatccaagaagagaaactggaacctttatccagcttgcctacgggagatgagccgtgtctgcacacctaccacaggccgagctgtactacttactcaagacacaaaatgctttaccaaggcgttatctggaatgcgacacgtatggcgaaaggtggatacagtctgggtgaacgttggtggtcttcgtgctgcagtttacgttctgatacgtacacctcaagcttttgttcatccttcagaacaagacggagaaagaggaactctttggcaatgcaaagaatgaagatgactaatagtacttgtacttcccaccactggaaatgttagcataaaagaacttggagaggaaaaaagtattaacaaaactgcagtctgcactctttaaacctgtttaaggctcttcatcctggttagcaaaaggtgtgaatgtaatgtgatggaatttaaaagttttatgagaccaggcacagtggctcacgactgtaattccagcagtttaggaagccgaagtgtgcagatcacctgaggtccggagaccagcctggccaacatggtgaaaccctgtctctactagaaatacaaaaattagccaggtgtggtggcgggcgcctgtaatcccaactactcaggaggctgaggctagagaatcacttgaacccagcaggcggaggttgcggtgagtcgagatcacgccattgcactccagcctgtgcgacaagagcgaaactctgtctcaaaaagattttataagaaagcagagcttttccttgaagctcttttgaagtggtagcttaattagtattttgttgaaaatactttaaagatgcctagtgaaaagcctactaaagtgctgtgagattggggtttagaacattttattttcaggctttatggcctattttccattgtgtcaagtgcaaaactaccctggcccaaaggaagggcagagaacataattacatcttaggccacatttcattctttgcagctttgctaatccagttgctcaagttctttacctcaacctgaaggaatgaagcattattacattttgtgaatggtgttcagcctataagacgaagtctcacaagacctataggaaagtttaccatctgccttaaatattaaaatatccatctgttattcacattaatacacagaatgaaaatagaggtctaggaattatcaaaggtactgcaaaaatactgtatagaacttatttgtaaatagcacatacattgatagatggggtgtgggaccaacaaaccaaattaaaagaaattgtttttctttcagtacactaaggtgtgtgttttcaaaaccaaacacaaacctgtcaagagtatttgttggctagtttcttaaaaggccaagagaaaaaaaatgatatatctttggaaaacttttaatttgggagttatgtgagttgttactttctcctggatcacgattcacatttaattgcttttccagttgcaacaagtccttcttgagagttttgtggaaaatggtgcttccctggaacaaagagtagttgaggtttttttgtggaactcatcatagtattgtttattttggagcctctggctgcaatcagtatagattttcagtatcctattagtattataatagtactcctcttaatactttctgatgtctccattgagaataaaaggacacaatacttttgaaagaagagttcacattagcagcacagccagcaatcctcatctggtttctctgatctcctaccccacacttcataatgaatgggaaataagatgtttatgaaggttttatatcctagactggcctttttaccactatcagaattcacagctgctttgtttatgggccgaacacaaaacttttcacctgatgggagaaaccatttaaacctcaaattaagcaacccacagaaccaggaagttcaaggaccatgtctgttttcaccacgatgtctttccccacccccccaccccccactccaccccccactaagggcagggtattgtatctgccagactgggtatttgttgaacaagcgagtattttcgcctattagcttagtttttaaggaaatcattttttacttgattcatcatagctttaattctattacatactacaataaaaatttgacaagactgatacaaatatgtagtgggcaatagtttgccgtcttcttccctagtatggtgtttttcaatctggtgactagaataggcagtgggctataagcaggattcataa

SEQ ID NO: 871 - protein, 507 aa, Homo sapiens
MCDIEEATNQLLDVNLHENQKSVQVTESDLGSESELLVTIGATVPTGFEQTAADEVREKLGSSCKISRDRGKIYFVISVESLAQVHCLRSVDNLFVVVQEFQDYQFKQTKEEVLKDFEDLAGKLPWSNPLKVWKINASFKKKKAKRKKINQNSSKEKINNGQEVKIDQRNVKKEFTSHALDSHILDYYENPAIKEDVSTLIGDDLASCKDETDESSKEETEPQVLKFRVTCNRAGEKHCFTSNEAARDFGGAVQDYFKWKADMTNFDVEVLLNIHDNEVIVGIALTEESLHRRNITHFGPTTLRSTLAYGMLRLCDPLPYDIIVDPMCGTGAIPIEGATEWSDCFHIAGDNNPLAVNRAANNIASLLTKSQIKEGKPSWGLPIDAVQWDICNLPLRTGSVDIIVTDLPFGKRMGSKKRNWNLYPACLREMSRVCTPTTGRAVLLTQDTKCFTKALSGMRHVWRKVDTVWVNVGGLRAAVYVLIRTPQAFVHPSEQDGERGTLWQCKE

SEQ ID NO: 872 - DNA, 3828 bp, Homo sapiens
gcggcttccggcggcgtgacctgaccgcaagaggccaatggagtgtgggagctgaaagggtcttcgctggcggccggtaactggcggcggttgggaacggccgagtgtggctcttctggtgtttcagcttggggagagaggggtggccttcctcttgcagttgaggccggcgccgagccggacttcagccggatctcgtggcggagcccatcttgctccctctcccaggcctttacccgctccctaggattcccgggccctgtaggtgggagttgggagacgacagtactgcttttaaagagacagtgttagggatcttggaagcacagccaacatgtgtgacattgaagaagccactaaccaactcctagatgtgaaccttcatgagaaccagaagtctgtacaagtgacagaaagcgacctcggaagtgaatctgagcttctagtcactattggagccactgtacctactggctttgagcaaacagctgcagatgaagtcagagagaaacttgggtcatcatgcaaaatcagcagagaccgtggcaagatatattttgtcatttcagtggaaagtctggcacaggttcattgtctgagatcagttgataacttatttgtggtggttcaggagtttcaagattaccagttcaaacaaacaaaggaagaagttctaaaggattttgaagacttggctggaaaactcccatggtcaaaccccttaaaagtgtggaaaattaatgccagttttaaaaagaaaaaagcaaagcgcaaaaagataaatcagaattcaagtaaagagaagattaataatggacaagaagtcaaaatcgatcagagaaatgttaaaaaagagttcactagccatgctttagattctcatatcttagattattatgaaaatccagccatcaaagaggatgtatcaacattaataggtgatgatttggcatcttgcaaagatgagactgatgaaagctcaaaagaagaaactgagcctcaagtgctgaagtttagagtcacatgcaacagggcaggagagaaacattgctttacctcaaatgaggctgcaagagattttgggggtgctgttcaagattattttaagtggaaggccgacatgaccaactttgatgtggaggttcttttgaacatccatgataatgaagtcattgtgggcattgcattgactgaagagagtctccaccgaagaaatataacacattttggacctacaactcttagatcaactcttgcctatgggatgctcaggctctgtgatcctctaccttatgatataatagtcgatccaatgtgtggaactggggcaataccaatagagggggccactgaatggtctgactgtttccatattgctggtgataataatccactggctgtgaatagagcagcaaataacattgcatctttattgaccaagagccaaattaaagaaggcaaaccctcctggggcttgcccatagatgctgttcagtgggatatctgcaatctgccattgagaactggctctgtggatattattgtaacagatttgccatttggaaaaaggatgggatccaagaagagaaactggaacctttatccagcttgcctacgggagatgagccgtgtctgcacacctaccacaggccgagctgtactacttactcaagacacaaaatgctttaccaaggcgttatctggaatgcgacacgtatggcgaaaggtggatacagtctgggtgaacgttggtggtcttcgtgctgcagtttacgttctgatacgtacacctcaagcttttgttcatccttcagaacaagacggagaaagaggaactctttggcaatgcaaagaatgaagatgactaatagtacttgtacttcccaccactggaaatgttagcataaaagaacttggagaggaaaaaagtattaacaaaactgcagtctgcactctttaaacctgtttaaggctcttcatcctggttagcaaaaggtgtgaatgtaatgtgatggaatttaaaagttttatgagaccaggcacagtggctcacgactgtaattccagcagtttaggaagccgaagtgtgcagatcacctgaggtccggagaccagcctggccaacatggtgaaaccctgtctctactagaaatacaaaaattagccaggtgtggtggcgggcgcctgtaatcccaactactcaggaggctgaggctagagaatcacttgaacccagcaggcggaggttgcggtgagtcgagatcacgccattgcactccagcctgtgcgacaagagcgaaactctgtctcaaaaagattttataagaaagcagagcttttccttgaagctcttttgaagtggtagcttaattagtattttgttgaaaatactttaaagatgcctagtgaaaagcctactaaagtgctgtgagattggggtttagaacattttattttcaggctttatggcctattttccattgtgtcaagtgcaaaactaccctggcccaaaggaagggcagagaacataattacatcttaggccacatttcattctttgcagctttgctaatccagttgctcaagttctttacctcaacctgaaggaatgaagcattattacattttgtgaatggtgttcagcctataagacgaagtctcacaagacctataggaaagtttaccatctgccttaaatattaaaatatccatctgttattcacattaatacacagaatgaaaatagaggtctaggaattatcaaaggtactgcaaaaatactgtatagaacttatttgtaaatagcacatacattgatagatggggtgtgggaccaacaaaccaaattaaaagaaattgtttttctttcagtacactaaggtgtgtgttttcaaaaccaaacacaaacctgtcaagagtatttgttggctagtttcttaaaaggccaagagaaaaaaaatgatatatctttggaaaacttttaatttgggagttatgtgagttgttactttctcctggatcacgattcacatttaattgcttttccagttgcaacaagtccttcttgagagttttgtggaaaatggtgcttccctggaacaaagagtagttgaggtttttttgtggaactcatcatagtattgtttattttggagcctctggctgcaatcagtatagattttcagtatcctattagtattataatagtactcctcttaatactttctgatgtctccattgagaataaaaggacacaatacttttgaaagaagagttcacattagcagcacagccagcaatcctcatctggtttctctgatctcctaccccacacttcataatgaatgggaaataagatgtttatgaaggttttatatcctagactggcctttttaccactatcagaattcacagctgctttgtttatgggccgaacacaaaacttttcacctgatgggagaaaccatttaaacctcaaattaagcaacccacagaaccaggaagttcaaggaccatgtctgttttcaccacgatgtctttccccacccccccaccccccactccaccccccactaagggcagggtattgtatctgccagactgggtatttgttgaacaagcgagtattttcgcctattagcttagtttttaaggaaatcattttttacttgattcatcatagctttaattctattacatactacaataaaaatttgacaagactgatacaaatatgtagtgggcaatagtttgccgtcttcttccctagtatggtgtttttcaatctggtgactagaataggcagtgggctataagcaggattcataa

SEQ ID NO: 873 - protein, 507 aa, Homo sapiens; identical to SEQ ID NO: 871

SEQ ID NO: 874 - DNA, 4106 bp, Homo sapiens
atgctcctttccccaagaccttgtgggggaacccgccgccagcgcggagccaccgtgactcgtagcctgacttccgtttccgggggcggcttccggcggcgtgacctgaccgcaagaggccaatggagtgtgggagctgaaagggtcttcgctggcggccggtaactggcggcggttgggaacggccgagtgtggctcttctggtgtttcagcttggggagagaggggtggccttcctcttgcagttgaggccggcgccgagccggacttcagccggatctcgtggcggagcccatcttgctccctctcccaggcctttacccgctccctaggattcccgggccctgtaggtgggagttgggagacgtgagttctctttcattctgcgcctctcattggctctctgaccttgtgcggaacgcgtcctttagctgacctcagctgcattttttagaagatggagattgtattcacagtgactgtcagctttttaacggcgggaactgacgtagtgttaaacactgtcgtgtatcgctggcacagcacaaggacattataggacagtactgcttttaaagagacagtgttagggatcttggaagcacagccaacatgtgtgacattgaagaagccactaaccaactcctagatgtgaaccttcatgagaaccagaagtctgtacaagtgacagaaagcgacctcggaagtgaatctgagcttctagtcactattggagccactgtacctactggctttgagcaaacagctgcagatgaagtcagagagaaacttgggtcatcatgcaaaatcagcagagaccgtggcaagatatattttgtcatttcagtggaaagtctggcacaggttcattgtctgagatcagttgataacttatttgtggtggttcaggagtttcaagattaccagttcaaacaaacaaaggaagaagttctaaaggattttgaagacttggctggaaaactcccatggtcaaaccccttaaaagtgtggaaaattaatgccagttttaaaaagaaaaaagcaaagcgcaaaaagataaatcagaattcaagtaaagagaagattaataatggacaagaagtcaaaatcgatcagagaaatgttaaaaaagagttcactagccatgctttagattctcatatcttagattattatgaaaatccagccatcaaagaggatgtatcaacattaataggtgatgatttggcatcttgcaaagatgagactgatgaaagctcaaaagaagaaactgagcctcaagtgctgaagtttagagtcacatgcaacagggcaggagagaaacattgctttacctcaaatgaggctgcaagagattttgggggtgctgttcaagattattttaagtggaaggccgacatgaccaactttgatgtggaggttcttttgaacatccatgataatgaagtcattgtgggcattgcattgactgaagagagtctccaccgaagaaatataacacattttggacctacaactcttagatcaactcttgcctatgggatgctcaggctctgtgatcctctaccttatgatataatagtcgatccaatgtgtggaactggggcaataccaatagagggggccactgaatggtctgactgtttccatattgctggtgataataatccactggctgtgaatagagcagcaaataacattgcatctttattgaccaagagccaaattaaagaaggcaaaccctcctggggcttgcccatagatgctgttcagtgggatatctgcaatctgccattgagaactggctctgtggatattattgtaacagatttgccatttggaaaaaggatgggatccaagaagagaaactggaacctttatccagcttgcctacgggagatgagccgtgtctgcacacctaccacaggccgagctgtactacttactcaagacacaaaatgctttaccaaggcgttatctggaatgcgacacgtatggcgaaaggtggatacagtctgggtgaacgttggtggtcttcgtgctgcagtttacgttctgatacgtacacctcaagcttttgttcatccttcagaacaagacggagaaagaggaactctttggcaatgcaaagaatgaagatgactaatagtacttgtacttcccaccactggaaatgttagcataaaagaacttggagaggaaaaaagtattaacaaaactgcagtctgcactctttaaacctgtttaaggctcttcatcctggttagcaaaaggtgtgaatgtaatgtgatggaatttaaaagttttatgagaccaggcacagtggctcacgactgtaattccagcagtttaggaagccgaagtgtgcagatcacctgaggtccggagaccagcctggccaacatggtgaaaccctgtctctactagaaatacaaaaattagccaggtgtggtggcgggcgcctgtaatcccaactactcaggaggctgaggctagagaatcacttgaacccagcaggcggaggttgcggtgagtcgagatcacgccattgcactccagcctgtgcgacaagagcgaaactctgtctcaaaaagattttataagaaagcagagcttttccttgaagctcttttgaagtggtagcttaattagtattttgttgaaaatactttaaagatgcctagtgaaaagcctactaaagtgctgtgagattggggtttagaacattttattttcaggctttatggcctattttccattgtgtcaagtgcaaaactaccctggcccaaaggaagggcagagaacataattacatcttaggccacatttcattctttgcagctttgctaatccagttgctcaagttctttacctcaacctgaaggaatgaagcattattacattttgtgaatggtgttcagcctataagacgaagtctcacaagacctataggaaagtttaccatctgccttaaatattaaaatatccatctgttattcacattaatacacagaatgaaaatagaggtctaggaattatcaaaggtactgcaaaaatactgtatagaacttatttgtaaatagcacatacattgatagatggggtgtgggaccaacaaaccaaattaaaagaaattgtttttctttcagtacactaaggtgtgtgttttcaaaaccaaacacaaacctgtcaagagtatttgttggctagtttcttaaaaggccaagagaaaaaaaatgatatatctttggaaaacttttaatttgggagttatgtgagttgttactttctcctggatcacgattcacatttaattgcttttccagttgcaacaagtccttcttgagagttttgtggaaaatggtgcttccctggaacaaagagtagttgaggtttttttgtggaactcatcatagtattgtttattttggagcctctggctgcaatcagtatagattttcagtatcctattagtattataatagtactcctcttaatactttctgatgtctccattgagaataaaaggacacaatacttttgaaagaagagttcacattagcagcacagccagcaatcctcatctggtttctctgatctcctaccccacacttcataatgaatgggaaataagatgtttatgaaggttttatatcctagactggcctttttaccactatcagaattcacagctgctttgtttatgggccgaacacaaaacttttcacctgatgggagaaaccatttaaacctcaaattaagcaacccacagaaccaggaagttcaaggaccatgtctgttttcaccacgatgtctttccccacccccccaccccccactccaccccccactaagggcagggtattgtatctgccagactgggtatttgttgaacaagcgagtattttcgcctattagcttagtttttaaggaaatcattttttacttgattcatcatagctttaattctattacatactacaataaaaatttgacaagactgatacaaatatgtagtgggcaatagtttgccgtcttcttccctagtatggtgtttttcaatctggtgactagaataggcagtgggctataagcaggattcataa

SEQ ID NO: 875 - protein, 507 aa, Homo sapiens; identical to SEQ ID NO: 871

SEQ ID NO: 876 - DNA, 3766 bp, Homo sapiens
gggagctgaaagggtcttcgctggcggccggtaactggcggcggttgggaacggccgagtgtggctcttctggtgtttcagcttggggagagaggggtggccttcctcttgcagttgaggccggcgccgagccggacttcagccggatctcgtggcggagcccatcttgctccctctcccaggcctttacccgctccctaggattcccgggccctgtaggacagtactgcttttaaagagacagtgttagggatcttggaagcacagccaacatgtgtgacattgaagaagccactaaccaactcctagatgtgaaccttcatgagaaccagaagtctgtacaagtgacagaaagcgacctcggaagtgaatctgagcttctagtcactattggagccactgtacctactggctttgagcaaacagctgcagatgaagtcagagagaaacttgggtcatcatgcaaaatcagcagagaccgtggcaagatatattttgtcatttcagtggaaagtctggcacaggttcattgtctgagatcagttgataacttatttgtggtggttcaggagtttcaagattaccagttcaaacaaacaaaggaagaagttctaaaggattttgaagacttggctggaaaactcccatggtcaaaccccttaaaagtgtggaaaattaatgccagttttaaaaagaaaaaagcaaagcgcaaaaagataaatcagaattcaagtaaagagaagattaataatggacaagaagtcaaaatcgatcagagaaatgttaaaaaagagttcactagccatgctttagattctcatatcttagattattatgaaaatccagccatcaaagaggatgtatcaacattaataggtgatgatttggcatcttgcaaagatgagactgatgaaagctcaaaagaagaaactgagcctcaagtgctgaagtttagagtcacatgcaacagggcaggagagaaacattgctttacctcaaatgaggctgcaagagattttgggggtgctgttcaagattattttaagtggaaggccgacatgaccaactttgatgtggaggttcttttgaacatccatgataatgaagtcattgtgggcattgcattgactgaagagagtctccaccgaagaaatataacacattttggacctacaactcttagatcaactcttgcctatgggatgctcaggctctgtgatcctctaccttatgatataatagtcgatccaatgtgtggaactggggcaataccaatagagggggccactgaatggtctgactgtttccatattgctggtgataataatccactggctgtgaatagagcagcaaataacattgcatctttattgaccaagagccaaattaaagaaggcaaaccctcctggggcttgcccatagatgctgttcagtgggatatctgcaatctgccattgagaactggctctgtggatattattgtaacagatttgccatttggaaaaaggatgggatccaagaagagaaactggaacctttatccagcttgcctacgggagatgagccgtgtctgcacacctaccacaggccgagctgtactacttactcaagacacaaaatgctttaccaaggcgttatctggaatgcgacacgtatggcgaaaggtggatacagtctgggtgaacgttggtggtcttcgtgctgcagtttacgttctgatacgtacacctcaagcttttgttcatccttcagaacaagacggagaaagaggaactctttggcaatgcaaagaatgaagatgactaatagtacttgtacttcccaccactggaaatgttagcataaaagaacttggagaggaaaaaagtattaacaaaactgcagtctgcactctttaaacctgtttaaggctcttcatcctggttagcaaaaggtgtgaatgtaatgtgatggaatttaaaagttttatgagaccaggcacagtggctcacgactgtaattccagcagtttaggaagccgaagtgtgcagatcacctgaggtccggagaccagcctggccaacatggtgaaaccctgtctctactagaaatacaaaaattagccaggtgtggtggcgggcgcctgtaatcccaactactcaggaggctgaggctagagaatcacttgaacccagcaggcggaggttgcggtgagtcgagatcacgccattgcactccagcctgtgcgacaagagcgaaactctgtctcaaaaagattttataagaaagcagagcttttccttgaagctcttttgaagtggtagcttaattagtattttgttgaaaatactttaaagatgcctagtgaaaagcctactaaagtgctgtgagattggggtttagaacattttattttcaggctttatggcctattttccattgtgtcaagtgcaaaactaccctggcccaaaggaagggcagagaacataattacatcttaggccacatttcattctttgcagctttgctaatccagttgctcaagttctttacctcaacctgaaggaatgaagcattattacattttgtgaatggtgttcagcctataagacgaagtctcacaagacctataggaaagtttaccatctgccttaaatattaaaatatccatctgttattcacattaatacacagaatgaaaatagaggtctaggaattatcaaaggtactgcaaaaatactgtatagaacttatttgtaaatagcacatacattgatagatggggtgtgggaccaacaaaccaaattaaaagaaattgtttttctttcagtacactaaggtgtgtgttttcaaaaccaaacacaaacctgtcaagagtatttgttggctagtttcttaaaaggccaagagaaaaaaaatgatatatctttggaaaacttttaatttgggagttatgtgagttgttactttctcctggatcacgattcacatttaattgcttttccagttgcaacaagtccttcttgagagttttgtggaaaatggtgcttccctggaacaaagagtagttgaggtttttttgtggaactcatcatagtattgtttattttggagcctctggctgcaatcagtatagattttcagtatcctattagtattataatagtactcctcttaatactttctgatgtctccattgagaataaaaggacacaatacttttgaaagaagagttcacattagcagcacagccagcaatcctcatctggtttctctgatctcctaccccacacttcataatgaatgggaaataagatgtttatgaaggttttatatcctagactggcctttttaccactatcagaattcacagctgctttgtttatgggccgaacacaaaacttttcacctgatgggagaaaccatttaaacctcaaattaagcaacccacagaaccaggaagttcaaggaccatgtctgttttcaccacgatgtctttccccacccccccaccccccactccaccccccactaagggcagggtattgtatctgccagactgggtatttgttgaacaagcgagtattttcgcctattagcttagtttttaaggaaatcattttttacttgattcatcatagctttaattctattacatactacaataaaaatttgacaagactgatacaaatatgtagtgggcaatagtttgccgtcttcttccctagtatggtgtttttcaatctggtgactagaataggcagtgggctataagcaggattcataa

SEQ ID NO: 877 - protein, 507 aa, Homo sapiens; identical to SEQ ID NO: 871

SEQ ID NO: 878 - DNA, 3845 bp, Homo sapiens
attgtattcacagtgactgtcagctttttaacggcgggaactgacgtagtgttaaacactgtcgtgtatcgctggcacagcacaaggacattataggtattctgtactcaattaagttattttgagtcacagaccttttgaaaatctcgtgtaagctatggcccctccacctctctaatacttcccccggcccccaccccaagcacacacaaaagcttatgcataggaaatttgttttactatttcggattacttccaagatctctctcctgatgcccatctatggatcccagagtctggcaatactgcttttaaagagacagtgttagggatcttggaagcacagccaacatgtgtgacattgaagaagccactaaccaactcctagatgtgaaccttcatgagaaccagaagtctgtacaagtgacagaaagcgacctcggaagtgaatctgagcttctagtcactattggagccactgtacctactggctttgagcaaacagctgcagatgaagtcagagagaaacttgggtcatcatgcaaaatcagcagagaccgtggcaagatatattttgtcatttcagtggaaagtctggcacaggttcattgtctgagatcagttgataacttatttgtggtggttcaggagtttcaagattaccagttcaaacaaacaaaggaagaagttctaaaggattttgaagacttggctggaaaactcccatggtcaaaccccttaaaagtgtggaaaattaatgccagttttaaaaagaaaaaagcaaagcgcaaaaagataaatcagaattcaagtaaagagaagattaataatggacaagaagtcaaaatcgatcagagaaatgttaaaaaagagttcactagccatgctttagattctcatatcttagattattatgaaaatccagccatcaaagaggatgtatcaacattaataggtgatgatttggcatcttgcaaagatgagactgatgaaagctcaaaagaagaaactgagcctcaagtgctgaagtttagagtcacatgcaacagggcaggagagaaacattgctttacctcaaatgaggctgcaagagattttgggggtgctgttcaagattattttaagtggaaggccgacatgaccaactttgatgtggaggttcttttgaacatccatgataatgaagtcattgtgggcattgcattgactgaagagagtctccaccgaagaaatataacacattttggacctacaactcttagatcaactcttgcctatgggatgctcaggctctgtgatcctctaccttatgatataatagtcgatccaatgtgtggaactggggcaataccaatagagggggccactgaatggtctgactgtttccatattgctggtgataataatccactggctgtgaatagagcagcaaataacattgcatctttattgaccaagagccaaattaaagaaggcaaaccctcctggggcttgcccatagatgctgttcagtgggatatctgcaatctgccattgagaactggctctgtggatattattgtaacagatttgccatttggaaaaaggatgggatccaagaagagaaactggaacctttatccagcttgcctacgggagatgagccgtgtctgcacacctaccacaggccgagctgtactacttactcaagacacaaaatgctttaccaaggcgttatctggaatgcgacacgtatggcgaaaggtggatacagtctgggtgaacgttggtggtcttcgtgctgcagtttacgttctgatacgtacacctcaagcttttgttcatccttcagaacaagacggagaaagaggaactctttggcaatgcaaagaatgaagatgactaatagtacttgtacttcccaccactggaaatgttagcataaaagaacttggagaggaaaaaagtattaacaaaactgcagtctgcactctttaaacctgtttaaggctcttcatcctggttagcaaaaggtgtgaatgtaatgtgatggaatttaaaagttttatgagaccaggcacagtggctcacgactgtaattccagcagtttaggaagccgaagtgtgcagatcacctgaggtccggagaccagcctggccaacatggtgaaaccctgtctctactagaaatacaaaaattagccaggtgtggtggcgggcgcctgtaatcccaactactcaggaggctgaggctagagaatcacttgaacccagcaggcggaggttgcggtgagtcgagatcacgccattgcactccagcctgtgcgacaagagcgaaactctgtctcaaaaagattttataagaaagcagagcttttccttgaagctcttttgaagtggtagcttaattagtattttgttgaaaatactttaaagatgcctagtgaaaagcctactaaagtgctgtgagattggggtttagaacattttattttcaggctttatggcctattttccattgtgtcaagtgcaaaactaccctggcccaaaggaagggcagagaacataattacatcttaggccacatttcattctttgcagctttgctaatccagttgctcaagttctttacctcaacctgaaggaatgaagcattattacattttgtgaatggtgttcagcctataagacgaagtctcacaagacctataggaaagtttaccatctgccttaaatattaaaatatccatctgttattcacattaatacacagaatgaaaatagaggtctaggaattatcaaaggtactgcaaaaatactgtatagaacttatttgtaaatagcacatacattgatagatggggtgtgggaccaacaaaccaaattaaaagaaattgtttttctttcagtacactaaggtgtgtgttttcaaaaccaaacacaaacctgtcaagagtatttgttggctagtttcttaaaaggccaagagaaaaaaaatgatatatctttggaaaacttttaatttgggagttatgtgagttgttactttctcctggatcacgattcacatttaattgcttttccagttgcaacaagtccttcttgagagttttgtggaaaatggtgcttccctggaacaaagagtagttgaggtttttttgtggaactcatcatagtattgtttattttggagcctctggctgcaatcagtatagattttcagtatcctattagtattataatagtactcctcttaatactttctgatgtctccattgagaataaaaggacacaatacttttgaaagaagagttcacattagcagcacagccagcaatcctcatctggtttctctgatctcctaccccacacttcataatgaatgggaaataagatgtttatgaaggttttatatcctagactggcctttttaccactatcagaattcacagctgctttgtttatgggccgaacacaaaacttttcacctgatgggagaaaccatttaaacctcaaattaagcaacccacagaaccaggaagttcaaggaccatgtctgttttcaccacgatgtctttccccacccccccaccccccactccaccccccactaagggcagggtattgtatctgccagactgggtatttgttgaacaagcgagtattttcgcctattagcttagtttttaaggaaatcattttttacttgattcatcatagctttaattctattacatactacaataaaaatttgacaagactgatacaaatatgtagtgggcaatagtttgccgtcttcttccctagtatggtgtttttcaatctggtgactagaataggcagtgggctataagcaggattcataa

SEQ ID NO: 879 - protein, 507 aa, Homo sapiens; identical to SEQ ID NO: 871

SEQ ID NO: 880 - DNA, 2901 bp, Homo sapiens
gcggcttccggcggcgtgacctgaccgcaagaggccaatggagtgtgggagctgaaagggtcttcgctggcggccggtaactggcggcggttgggaacggccgagtgtggctcttctggtgtttcagcttggggagagaggggtggccttcctcttgcagttgaggccggcgccgagccggacttcagccggatctcgtggcggagcccatcttgctccctctcccaggcctttacccgctccctaggattcccgggccctgtaggtgggagttgggagacgacagtactgcttttaaagagacagtgttagggatcttggaagcacagccaacatgtgtgacattgaagaagccactaaccaactcctagatgtgaaccttcatgagaaccagaagtctgtacaagtgacagaaagcgacctcggaagtgaatctgagcttctagtcactattggagccactgtacctactggctttgagcaaacagctgcagatgaagtcagagagaaacttgggtcatcatgcaaaatcagcagagaccgtggcaagatatattttgtcatttcatgggatatctgcaatctgccattgagaactggctctgtggatattattgtaacagatttgccatttggaaaaaggatgggatccaagaagagaaactggaacctttatccagcttgcctacgggagatgagccgtgtctgcacacctaccacaggccgagctgtactacttactcaagacacaaaatgctttaccaaggcgttatctggaatgcgacacgtatggcgaaaggtggatacagtctgggtgaacgttggtggtcttcgtgctgcagtttacgttctgatacgtacacctcaagcttttgttcatccttcagaacaagacggagaaagaggaactctttggcaatgcaaagaatgaagatgactaatagtacttgtacttcccaccactggaaatgttagcataaaagaacttggagaggaaaaaagtattaacaaaactgcagtctgcactctttaaacctgtttaaggctcttcatcctggttagcaaaaggtgtgaatgtaatgtgatggaatttaaaagttttatgagaccaggcacagtggctcacgactgtaattccagcagtttaggaagccgaagtgtgcagatcacctgaggtccggagaccagcctggccaacatggtgaaaccctgtctctactagaaatacaaaaattagccaggtgtggtggcgggcgcctgtaatcccaactactcaggaggctgaggctagagaatcacttgaacccagcaggcggaggttgcggtgagtcgagatcacgccattgcactccagcctgtgcgacaagagcgaaactctgtctcaaaaagattttataagaaagcagagcttttccttgaagctcttttgaagtggtagcttaattagtattttgttgaaaatactttaaagatgcctagtgaaaagcctactaaagtgctgtgagattggggtttagaacattttattttcaggctttatggcctattttccattgtgtcaagtgcaaaactaccctggcccaaaggaagggcagagaacataattacatcttaggccacatttcattctttgcagctttgctaatccagttgctcaagttctttacctcaacctgaaggaatgaagcattattacattttgtgaatggtgttcagcctataagacgaagtctcacaagacctataggaaagtttaccatctgccttaaatattaaaatatccatctgttattcacattaatacacagaatgaaaatagaggtctaggaattatcaaaggtactgcaaaaatactgtatagaacttatttgtaaatagcacatacattgatagatggggtgtgggaccaacaaaccaaattaaaagaaattgtttttctttcagtacactaaggtgtgtgttttcaaaaccaaacacaaacctgtcaagagtatttgttggctagtttcttaaaaggccaagagaaaaaaaatgatatatctttggaaaacttttaatttgggagttatgtgagttgttactttctcctggatcacgattcacatttaattgcttttccagttgcaacaagtccttcttgagagttttgtggaaaatggtgcttccctggaacaaagagtagttgaggtttttttgtggaactcatcatagtattgtttattttggagcctctggctgcaatcagtatagattttcagtatcctattagtattataatagtactcctcttaatactttctgatgtctccattgagaataaaaggacacaatacttttgaaagaagagttcacattagcagcacagccagcaatcctcatctggtttctctgatctcctaccccacacttcataatgaatgggaaataagatgtttatgaaggttttatatcctagactggcctttttaccactatcagaattcacagctgctttgtttatgggccgaacacaaaacttttcacctgatgggagaaaccatttaaacctcaaattaagcaacccacagaaccaggaagttcaaggaccatgtctgttttcaccacgatgtctttccccacccccccaccccccactccaccccccactaagggcagggtattgtatctgccagactgggtatttgttgaacaagcgagtattttcgcctattagcttagtttttaaggaaatcattttttacttgattcatcatagctttaattctattacatactacaataaaaatttgacaagactgatacaaatatgtagtgggcaatagtttgccgtcttcttccctagtatggtgtttttcaatctggtgactagaataggcagtgggctataagcaggattcataa

SEQ ID NO: 881 - protein, 198 aa, Homo sapiens
MCDIEEATNQLLDVNLHENQKSVQVTESDLGSESELLVTIGATVPTGFEQTAADEVREKLGSSCKISRDRGKIYFVISWDICNLPLRTGSVDIIVTDLPFGKRMGSKKRNWNLYPACLREMSRVCTPTTGRAVLLTQDTKCFTKALSGMRHVWRKVDTVWVNVGGLRAAVYVLIRTPQAFVHPSEQDGERGTLWQCKE

SEQ ID NO: 882 - DNA, 273269 bp, Mus musculus
  misc_feature (1)...(273269): n = A,T,C or G
cttagataaggtggaaggtgagcaggcacctgaggttgttctatgactttgaaagatgtgggtcaagacatgattgtgcctacactcacatacatgcacatacatgaaccccctcaaaagataaaagagtgttgagatcctaaattagaatttggttagacttgagattaccctagcaagacaatgtctcaaaaagcaaacaaaaaacaagtaaaaggtatcacaagttgtcttgttagacaagttgggtaaaatcacatctgtatgatgtggaatcttgaattgttaaatgtgattccattgtttttcatttcttagatgattctattaaaattacatttatttatttatgtgtgtgcaagagaaagaaaggtagaaacagacagagatagagaggcagacagacagacagacagacagacagacatggagggctggtggaggtcagaagaaaacttgtgatacttggttgtctccttctaccatggggatcccaggggttagacgcaggttatctggctttgtggcaagtgatgagccatcccaaaagccttttacttgttttttgtttgctttttgagacattgtcttgctagggtaatctcaaatttatggcagtcttacctcagctgcccagaatgctgggattataggtgtgagccactgcatagtttatagttcttttcttttgcagtatttttacacagcgtttgttttattaatgcttagatttgtttttgtattattactttttttttttaacaagacctgatctcatagtgttgttcaggctggccgttactgccaggcttaagttaccctgccacctcagcttcctgttctagccttccaaatagctgggcctacaagcatatgccatggttcttggcttttatttattcatttgataagtaataaacttaacccctcatgccccactatttagtcctgactagcttggaactcacaaagatccaatctgtgtcttgagtgctgaaattaaggagtggccaccatgcctggcctagttacttaccttgaggacgggatcctgctttgtagtccaagctgatagcagtttgtaatgatcttgactccatggcacttaccatgccttagcttctagtgatgggagtgccagcaggaaatctgcttgtcaagagaattttgaaataaaatgtattttctgtttattattgctgtatggaggcaagttagaattttcagaataggctgtatttttctaagtattgccagcttagcctaataacttaacctgtaaattctttttgatttccatgttgtataatgtgtaaattgttactgtttttcctttgcagttcaggtaccccttccccccttctctggctaggatttctagcattggttgcatagaatgttgatgagtggtgtccttgtcatttacttctcagagagaacgttttgtctttatctctgttaagtattataatatcaggcataatacacacataaggcatggccaagcctagacctggtaagatgagccctttatctcttaacagaaagaagaataagcctaatttctggtgctctggtctttgtgctaattgtcaaagggtaacagaaacataagtgtttaattgtcagcttgggggcagtccatgggtaagaatctagtctaggttgctgcttaagtggattttttttccccctggagacagggtctcatatagcacaatctgacttttaattcctgatcctactgtctctaccttcttagtgctgggagtagagtttgtgactgcgagaggaacagcaaacagttttcagaactcaggagggtggcccactggttagaacaatcacaatgggtgtgtctcagagaggcagagccctgaggactacatgtccttagtattccatgctgttgtggtgtttgctctgtttgccttcgaggtcataacatccctcatagatctgtgagttgtataaaaactctaagggggtttccaggccctcactgggcagggtcattggcacttagagtagcagtgacgggattgatctttttcaagcattgctgctggagcggataacgactcagcatcaccctcagaacttagagatgtagattattagtaacaataaccacacttagaaagaatttagagctctagattgtctgtttagttaagatatttttgttagtggctttgacttagaaaatcttggggaacaatttaaagttcagaaaggcacacttttgataactgagtgagggactttttgaggctagggaacaagaacaatgacagcctgactagtactagctgatgtgcctttcttgctaaagctgaattgttgatcaatacgattattaatttcttgtaaccagttttgcccttgacttcctgatatgatttaataaaaatagttaatgtgcaccctgaggatttaaagtagaaatgactggttgtttttatataaaagtttagatttttaaaaaagtcttctttttaagattttttaatatgattattttttaagataaataataaaatgattgatcctttctttgtaaccacaaattgcagcctgccaatatgagaaactggctgagaaaaataccttgcttgcttatactttgtaaacctaacaagttgcctagacacgaatgtatgtgggttcttgggaataatgtgttttctacctgtaatatataaaacatttcttcatgtagaagtattggagaacgtgctgtttttttcctcgtgctcattgtaattgttcacttgaagagaaatggagtgtaaccacactgatttttatacagcttgaaagattttactgggggatataagctgtgggagaaaaaaatagttgttgaaaccttgctttgtccaccaagtctgtgtattccttccctaaaataaagttaagaagaacctgcttgaactatcaagaagatgcctttctctctctctctctccctccctcnnnnnnnnnnnnnnnnnnnncctccctccctccctctgtctgtgtgtgtgtgtgtgtgtgtgtgtgtgtgtgtgtgtgtgttctgctgactccagtctttttatttaatctggcctggccccaaggtggagatgcccctgactcctgctcctgtgtgctgggattactggtatgcctctatgccctgctctggtagcagttctctttaggcctcctatcctgcatgccttgggagtcttacatacaagctatagttttcaaagcaccttcggagttatttctctacagatacttctattggctgctttagtgtgtaccttttattgagttaagaaagtttcttcttatcttaaaattttcatcattaatagtaaatggatggttttcatatctgctgagatcaaatgtacttagttttaacttgtgtggttaattagatggaagttaaaattcatgtttattaaagaatttaagtagttttgctttaaacggttttaattacatcccttcaggtattttccttgatgattcttcacttaaaaaaaagttacatttatttatttgtttatttattatttgtttattttgtgtatgtgtgctactattctggatgggggttgtctttcatgcttatggagttacaggtggttttgagctacatatgtaggtgctgggaattgtactgtggtcctctgaaggaacagtatgaactcataactgccgagccatctccagctcctatgtgattgtaaagcaggtttcagggattgtggctttgttcgttcatctcacatgttgctatttccattctggtacaagcctggttaggctaccaggttatttaaaacgttttgtattttgtgagatattggaatttgggttttatggattggaaattgtgaacaggtacttctggctttaaatttcattttttttttttaatagacagggtcttaccattaagctgttcctgctgttcttgtctaacttgggttcaactgattctcctggctccatctcccaagtagctgggatgacataccaatatcacattgtaccatgctcatgatttttttttttttaatttaggatgagatttggtataaaatgtaagataattaaagctacagttgaatattttagtattctaaaagaacagtgtaaatgaggtttaggatcaagggaaggctccctaagccagagcttgcctcccttgagctaagttgcagattgttgatataaaagaggctctgattagcaacattgtttagtcctaagtatctgtttgacaaggtgtttgtcatggtgaggatgttgatagaactcaccatttgcttgattaaattgataagaattattgaaacctataatctatctgatttgtaactgagttactaatccctctataaaagggaaaaataataacagtggcaaatattatgattgtacctttaatatcatgttttgctgttcttatcagagactctctttcatgttactatgcccttttgttggagctgccttagccagtgagtgatctctagtttttagtctacagtcacgctaaggttgtataagtcagggtaaggtgtgtcagacacacatggtttgaagaaacctagttttactaagttacatgaggaaggtgtaacaatgaatgctttctttagtatgtaaatttctattttttttaaagatttattaatttattttatgtagatgagtacactgtagctgtacagatggttgtgagccatcatgtggttgctgggaattgaattcaggacctctgctccttctggccccacttgctcaggcccaaagatttatttattattatatctaagtacactgtagccgtcttcagacacagtagaggagggtgtcagatctcattacagaaggttgtgagccaccatgaggttgctgggatttgaactcaggacctttggaagagcagtcagtgctcttaactgctgagccatctctccagcccttgatgctctttttctaataatacatttatatttaaattttgtgtgtagccattagagacagcttgtaggggtcatttttctccttcccctatattcctgggattgaactcaaatgttgggtttggtggaaagcacttttacttgatgaggtgacttcactggcctaggtttttgttacacttttcatatagctatgcaacatcacctttaaagtttacatttaaaaactacagtgtcaaattacaaaactttcagaagggactagcaaaatggctttggaggtgtgagtgcttgttatgtaaatatgagaattagatttggattcttagtatccacctgtctataatcccagaactctggagacagaggcagacgatctgtagacaggctgcttacctagattagcctaaccagtgagctctgcgttcaagtgagagatcctgcctcagtatctcagtgtaaatgtaattcttggggggaggtggagttctttgccctgtcttgtacctgattaattacagggcgtttctatgcctgttagctcctgaataaagatatagagaccaggtattttttattaacaagctgcaagcactaatagcgggacagattctgatctattctaacctgactaggctgctactacccagccaaatttccttgccatctggtcttgccccagtttgctctggtccctgtgtgtctgtctccatggcagctttctcctcgtgatctcatggtgaatcctcctggtttcttcacagggtttctccacacttgcttctcctcctggtccttctccacctccccgtacccccagcccccgttcctttgggaccccttgactgagatcagaagttctgcctatctcttctgcccagctaatggggtgatcagctgtagagctattaaacaatcagaggtgatgaaaaacaatttttatgtaacatagagactggagatgcttgatcatgctatcatctgaactgcacccagatatctgggcagagaaatcagcatctgagtacacagtgcacaaaacatgtaaagtagagagtaaccaaggaagataacttacattagcctatggcttctaacaaatacattcatacccaatatgcatctgtataatgcagacattacatacatgcaaaaatcacaaaaagttctcttaatgttttaagtaagttacagtttttcatgacacttttatcttagctagccttggctacttgtgatctgagggttggagtcattcctgtgtgtatatgaatatatgcatgttgtgtaatactgattgtattatatgcattctttcacaacttacttttctgttttacagcaatagactatggttatccacactttgtatgtcaggtaaagataagtatatttagagtttgcagataacataatttacttaaaccaatctcttgctgaaaatttacattcttgctggtacaaatgatgcagtaatgaacatcattgtacattgaccttagaacctatgaaacatgcagaatggtttaaaaagtgaaacttgtaaatcttgggtttgattctgcatgcttgtgctcccagcacgcggaaagtgggagaggagcatcaggactttaaggtcgtcctcagctgcatgacagagtacagagatcctgtctcagaacacaagcgaaaaaaaaaatcttctgagttggaagtgtagctcagtggtaaccctttcttaccttgtgcaaagccctgggttcagtctccactactatatataaaaaaaattagaagaggaaacttctttttcaagtggtagctcatttcaaattgtgattctgctaaattgtacttcagtatgatttttaaatcatttttcagagagcttaaaatgaatatttgtgaccctagaaattttatagcttttcaagaaaacagtcttacaaaaaatttggaatataatttaaaatttaagatacttaactcattttcagataataagtgattattacagatgagtataactagtacagaaggttagtctagtgattttgagatttaggccagaattttactagcagtgctttaaatagctaatggtagtaattacatcttttgcatcttcttataaatgtctcatagcacatttatgtgagcctattctgttataattaaggtaagttactatgttactcttaaagcattttatttagttccatggtatgcttacagcttttgtaagaagagtgagaattaaagggtccgtgcaatctctgtgtacagatgtacatgtagacatttgggtacaccccaggattttgattaagtgtatctgcggtgtgtggccagtgttgacattttgtgttttttatggtctagaagctttgtggtggtatgaaggtggccaggcttgacttcaattttgttgttctattttgagaactcattgagattagataataaatatgcaaagtggaatttgaagtgttatgaaacagcttagcaaaagagtttgacaccctttgctgttcctctttaacctttcacccaaaaaggtcacattttttccatgtatatgatatgtattgaacatgtgcaaactgttcttgcttaatcactttctgtttgtttgtttttcaagacagggtttctctgtagccctggctgtccaggaacttgctttgtagaccagactggcctcaaactcagagatctgcctgcctctgcctccctagtgctgcagttaaaggcatgccaccactgcccagatgacttactttaagcatcacaattatttatatatagcttactctgaggtaggtattattagtggtctaaaaaaggcttagagtataatggtggatatgtgtagtctatatgcaaagcctttttgtataagaaattccagttatggagttttgagagccagtccatccctaccctggtatccttccaactttatgtctttttttgttcagttacccattggttagtttgtgctgttcatattcttctggatgttgaaccacccactgaaacgtggttaactaaagggaaccatactcagaaagaaaactgactctccctaccccagaagctgtcagctgttcgtagctcttcagttaaaggagtgtgtaggcttttaacccccttcactcagtgctagactgtggactggcttgatcttgtgcaggcaaacacagctgctgtgagttccttagtgtagtggtcctctcatgagaagacagtctttgctctgggttttccctgacctttggttcttacaatgtctctgaatacttttccgtgatgatccctgagccttggggaggccaggatatacagtatgtctgtcccatttaggctgagtactccacagccactaattctctgcacttctctcaccagtagtgagtttctgtgttaaccatcattcagcgcacaaagaaactaaagagtggcagcactctacagatgcagagataaaatttggagggcagtgtggtattatgtctgtttagcaaaataatcagtcagttcactcctggggcctatgaactttccaaccatgggttaattggctagatttgcaataccaggcatgttcttcttcctgtggaacagtccttaaatccaaccagaaagtggttacttccataacatcgatgccagccccttttttgctgttctcagcttgggaatattgttggtgactttcattttctctccagtagcctgcatagctatagaagtaggtgtcggagaggacgcttcctggtctttaccaactatttatgttctgtgaccaatgtgtgtagtgtcctcagaaatcaaatcttaccattaagtttaagttctggtgggcagccaagagcagagccagcactctgtacttttttccagttctttctttttgagacagttttgctggcgacacatcagcttggtttggaatttgtaaaagctcacattggccttgaacttgataacctcttgcttcatcttccccaatgcttggggttacaagcagatacaaccctgtctgtctggtttatttgttttgtttattttatttcatcttatattttgagacgtagctcaagctggccttatctgcctcagactccctgtagctaggattataaacatgtctcatgtctgcttttataataaagtctgtagttctttatgagaatatgatgatctgatgggactttgtttcccagaattttacttagaacattattgggtattgtacagtatccagtgttgatgtacattattttattgatgaaatacttgatacgtatgctcagtgttacacataaaagcactcggtaacctgatatcaaggagaggtttccctgccaaattagttttaaaaaaggggaagggctggagagatggctcagtggctaagagcatgttctatttttttttttaagatttatttttattattctaattatgtgttctgggttatgtgcacatgaatgcgggtacgcagaggttcagtggtgtctgattcctctggagctggctattgtacttctagtcctccatttgaattttagaatcagcatttttaaattacatgaaaatctactgggattttgtgaatgaactgggagaagagctgataccttcacagtatgggtaacttttaactttttttttcattattgaggtattattttatgtattttagtagagatttaaatgcttgaacatttttgttaggttttaggtaccttttataggtttgttgttgttagcaggacttaacttattttttgatcagggtcttgtgtatgtgaaactcagctgtagatgaagatggcctttacctcttctgctgcaattattgccatgtatgtgctgcaacatccattaatgtagtgttggggctcgaacccagagctacatttcttctccccctcactcttctctctctgtatgatatgtgtttgactgttggcaggggtcagcctcaggtgttgatcctggccttcaccttggttgaaatggggtcttttgttctttagctggcccatgagcttctgggaattttcccttctccgcctcccatctcaccataggagcactgggatttcagatgcatgctatcgccttcagttctacctcatttctggggaagtgaccaagtgttctcatccttgcatggcaagtactttacacactgatccatctccctaaccttaaccttaagagctacattttctaattgttattcccaatgtgcatgaaagtattgatatttaaatattgatcttatggaaatttagctgttattagttctaatgatgtgtcaaagtattaatatttatatattgagcttctctctgactaatgcattaagttttttttattgattctgataatgtattcaagtattgatatttctgcactgatcttatgtaatgttctgagttctgttattcaaatgtttcacttggtaattatcagttgatactctaatttttaattagaaaaacagtacattatgagtaatctaattttaaagccatgagaatacttaatgaaaagtgactcttccccagataaaggtaacagaacacctctgagaaaagtatttatcattggaatatttaatgtatgatcttttcattgcagatatggcataagatatttcttcaagattggacagctgctggcctgctacttctgttagctgtaagctgactttatagccatagagaaacctcacagaatcacattgttgtttttttcttcataccatttctggcacctaagttcaccctgcaaccatgtatggaagtgctcgatcagtagggaaggtggaaccaagcagccagagtcctgggcgatcacctcggcttcctcggtcccctcgcttaggtcatcggcgaacaaatagtacaggagggagttctggaaacagtgttggaggtggcagtgggaaaaccctttcaatggagaatatacagtccttaaatgctgcctatgctacatctggccctatgtacctaagtgaccatgaaaacgtgggtgcagaaacacctaaaagcaccatgacacttggccgttctgggggacgcttgccttacggtgttaggatgactgctatgggcagtagccccaacatagcaagcagtggggttgctagtgataccatagcatttggagaacatcacctccctcctgttagtatggcatctactgtacctcactctcttcgtcaggcaagagataacaccatcatggatctgcagacacagctgaaggaagtattaagagaaaacgatcttttgaggaaagatgtggaagtaaaggagagcaaattaagttcatcaatgaatagtatcaagaccttctggagcccagagttaaagaaagagcgggccttgagaaaagatgaagcttccaaaatcaccatttggaaggagcagtaccgagttgtacaggaggaaaaccaggttagtttcatttatacatttatctttatgggctgagtccatgtatataaacaaaaagaggcattccttttccatcccgtcttagatttcccccatctttgttcttttattttttttatttatcctttttactttagaactctgtttctactttcttagcctttttaagacttgttcctgtacatggtgcaaaacactcacacatataaattaaaaaaaaaaaaatcacaaagcagtgacgacaacaacaaaaacccaacttgagctggacagtggtggtgcccacctttgattccagcactcaggaggcaggggcaggtggatctttatgacttggaggacagcctggtctacagaacaagtttcaggacagccaaggctacatagagaaaccctgtctcaaaaagaaaaaaaagaaaaagagcttgaggactgctttggctacatagtgaattcagggctaacatgaggttacatattgaagctttgtctcaaaattagaaacaatcaaacacaggactgcagatacagttcaatgaaagagcattttcctagcctgtagcaggagattcttggacctgtcttgccttcagattgtcatcacctgtattggaatggccttttggccgggagatagtggtggtggtggtggcacactcctttaatcctagcactcaggaggcagaggcaggcagatctctgtgagcctaaggccagcctggtctagagagagtgctaaggcaaccaggggtacacagagaaatcatctcttgaaaaacaacaaaaacaaaaaagcaaagggcttcttaatgatacagttgcatttgagtcacctctgcctctgtaagtagcccctcagtcatagcctttattttatttatattggtgttaggttttgtctctgtgtatgtcggtttgagggtgtcagatcctctggaactggagttacagacaattgtgagctgctgtgtgggtgctgggatttgaacctgggtcctctggaagaacaactagtgttcttaactgctgagctgagccatctctctagtcccataagagcaggatattttgttgatttgcttgcttgttttggtttttgagacacagttctctgagtaacaccgggctgtcctggaactcactctgtagaccaggctggcctagaactcacagagatcttcctgcccctgcctcctgagtgctgggattaaaggagtgggtcactgtgtttggctcccctctcccatatttttctaagtcacctcaataaaaagtattcattggcataccaaagtaagtaaaaggttcatatttttaaaaacaatttaaagtcaattcagcacttctctcttgcttcactgtgtggtgtgggctggtctggaacgcttctgcttccatccccaagtgcttagatttatgttagcttgcctgaccaccagctcaaactggtcctttcaagagtagattcattgtctctcagtctgacttgattactcagtacataaattaaaagcagatctggttttaccaaatacactattgaattacctaatcatcaacgtgtcttgctgaaaacatagccaccaataaggtagttttattgtcaagtgacctggaaatgtttattgaggaaaaaagttattggcatattttttgactttgaaataaataaagcatttcttaatgtgtatactttaagggtgtatggggatcaggagagaaatcatttcagtatcccttttctagttaccagggtatattcaaaggcaaaatatttaattttctgagaagacaattatgggcacttagtattttctgggaaaggaacagtccacaggtttttcttgccaaggaaaccattatgtgctgaagatggtgaatactgctttatctgggtccaccccatgccctaattaaacgccagtgctggcagatacattcttcttgcacccactgtaattaccacagaattctaaaattgtgtaactttagtccaaaaaacaaagggtgcaattttaaagacagtacagtgagatacagacactgagaatgctaattaatagattatagtcagctagcagtgggcccctaattaaatagtgcattcattatcctcttcttagctcccagaggtcagacatctttcatttgtgaagaagactggtttattagaatttatagcaattaaatacatttctgtatttctgtttgagcctggggattttggtccattttaaatgtttgatctgattgagctgggtccagaatcctatcagtatagaacatatttgcttaggattgctgattgcttggtgggcatgactcattattatggctctcttagaagcttgtgtctaagataaaatttctcaggtgtttctatgtcttagactccttttgttactttactttcaaatagttgttgattaagagttgtgtgtgtgtgtctatttatgtatgtgtgaatataaatatatatatttgagcagagaaatccttttcttctaaaaaaagttgtgactagaaagactttagtgttagctttttagagaagaatgaaaatcttcctatgggctttgtattgttgcagagctagtgaaacttttggagaagttacattttagattttattttcatcagctattgtacttaaaaaaaagatttgtttgtttatgtatatgagtgcttttctgcatgtaagcctgcatatcagaagagggcatcagctcccattagacatagttgtaagctatgacattgttgttgggaattgaactaaggacctctagaagaggagagcagccatgtgcttaactgctgagctgtcactccagtcctttgtactttttttttttttttttgattatgtgttgtaagaattctctgtgttggatttagttgtatgcttattttaaggataattattttatggctgaggagatggctcagttgttaaaatgcaagtgaggacctgagtttgatccctatgtaacagctgggcatggtgatatgcacctgtgattctagcccacaaggagacaggaggacccatccctgcagctgctggccagctagtcttggggcatcctcaagtcctaggtgtaaacagagatgaagaatgaatctggaagtcatctgacatcaagatttagcttctacatgaacacacagctataagcgtgcatatttgcatgttcacaaagctgtacattcatgtatacacatgaacgtatacagatatacacacagtaaataattattttaatgctctttcactaaaattttgtttgaatagaatattctgtttgatattgtaggatggcaagtgaactgcctttaatttttttctttttctttttggtggttagattgtatttgtgtgtgtgtgtttggatgtgcctgtgctgtggtgcgtgtgtggaggtcagatgatagcttttgggaacaggtttgcttccatggtgtgtcctgaggatcaccctcaggctccggagataaattcttttgcctcttgaaccatctcactagctctgatgttttctttttgcttagaatatttattctttttggaattggctgcttctcttttctgttgaggtgctgaagattgaacctaaggttttatacctgataaacaaatgctctaccactaaactatacctctaacctagggttttaattttatttattaggcctttgcatgaatagaaatatataattgaatatgagacatttcttcttgtagagttacatttatttacttggaatgtagtgggatagttggaaaataattcagtgaatcaaataaagttgcataagtatctgacatggtttacttgtaagaatattattttccaagccgggcgcgtggtggcgcatgcctttaatccaagcattaatctgattcttgagaggaagaatttaaagaaagtggtagcaacttggtctagggagttcttgaacaatggaatgagtggcataaatgctattcaagggcagcctttgttgctgccagcagaggtgataggaggagagatggcaggacagacctgtggaggggaaggcacacatttgtgagatgttcttgaagaactcattgggcaaagacttatagcaagagggaagtgtttctggcgttattaacaaatgaggactcagattggagccagattagagtaaggaatggtgaatttacttaaatatttgaatataggcttttcatatgcttttggaaataatgtgaccagtgggtatgactttcggtacttagatgtgaatattataataagtgtgttgttaacattggagaatttatgagtcttccgaggaacactgaagtagaggctggtgtgtgctcatgcccctgtgcaggaagaaggaggagaagctatcagatggcagtgctatacatagggttttttattgagatagttttattttttggtttaataaattattttctttaaaggtaggaaatttgagaatctctgaaaatcactgttcattaaaaagggttgtctatttctttctttctttctttttttttttgtggtggatttttcctagcctttcatgttagttaacacatacattggagtttgttttgtttgtatgatgagctaggaggaaatttctgaagaaaaagaaatattgcagaaaatgtactttcagtgtggaaacagctttgtattggaaatgttctgttcttcctctacaaacaaaattagaagtgcttttataaactgtctttgtgctgccctgtgtatcttaaaaatactcattctttttctttctgaaatcagaaggttgtccttaatacagattaaatacttttatttctctttgttatttgcagtaatgttcattgaaaatcttccttgaagccgggtgtattggctcaagcctttaatcccagcagaggcagagacaggcaggtctctttgtgttcaggtctacagagtgagagctatgtagtgagattctgcctcaaaaaaaccaaacaacaaagttaaaaaccaaaccaaccaaaccaaaccaaaccaaaccaaaccaaaccaaaccaaagccccaaaccttcctttgtgttattccagtctatacctaagaaatcaagttaggttttattattttggcagtttgtggagaatattagattgaaatgtttatgaacagcttaattatatacatattgagaacctataataacttggttttgatgcatactgtgccacttctttaaaaattcttttaagatttatttttttatgtgaattctttatttttcttgagtgatttgcttgcatgcatatattgcacactcaacatttttggctgtaggagaccctgttttacttggaaaacttaggtggaatctgatctaccttatattatctgtcatgctagatcctaagtgggaaaattgataaagcacgagaaccatgtgcttgccgggtatccatgatggtcagaagacagtgtggggtcccctggaactggagtgagggatggttgtgagccaccatgtggatgctaggaactgaacctgggtcccctgcctgagcaagtgcttcaaatgctgagccatccctccagccctctgccccctccctccctaaggtcatttgaatgtgcttggcccagggagtggcactataaggaggtgtagccgggttggaataggtgtgtcactgtgggtgtgggctttaattcctcatcctaactgcctggaagccagtcttctagtagtgtaagcgcctgacttgccagcaagaatgaagccacaataggatccttctgtacacgtttattgggagagcttgattgcagaggcgaagagaccccaagcccagaactggtgctgcttatataggcctaggagaggcatgtctcacacctggactggttatgcactatacctcatttgcatgttcctcatctgattggttactctctcagtacctcacagaacctcattaacatacctcatttgcatgtctcacatctgattggttatactctcagaacctcattatcatgcccgggccaggcagtgtcttggcaaaaaactttactgcatatgtacacgtggtggccagatgaagatgtagaactctcagctcctcttgcaccatgcctacctggatgcctccatgctcctgccttgatgataatggacaatggactgaacctgtaagccagcaagtaaataggtgccttggtcatggtatctattcacacagtaaaccttaactaaggcactcctgactttgtttcttactttttggatttattttatgtgtaggagtgttttgcctgtatgtgtgtatgtgtaccatgtgcttgcctggtgcacaaagaccagaaaagggtgttgtcagaagcctcaggagctggagttacagtgtgggtgctgggaattgaactcaggtcctctgtaagagtggcaagtactttaaaccaaggagcaatttctccagtctcctgtgccatcttttaatgttttgtggcttacatagttccagaatacatgacaaacagggaccttttaactttgaactccccgctgtgtaactgtcttagatgaatgttaggtactagaatagtcctctacagtagcaactgtcaacatttttggctttaggaagaaaactttttgtggaacctgatctgctttgtataatcagtcatagacagtttttttggtttttgttttaaatatagctgtgtattataaaacattgaaattaagcatatgattcagatttacaaccataatcataatccagtttttggtgctgggaatgaagctcagtggtaaatggtaaaacatcatcttgacttgggcctgcaccgccggaaacactccaacaacagtagacagttttactctgtgcacctggtagtttcttaaagttggagtttaaatcttaagccattattggccaattaggtttccatgtattgttttgctaaatgctttggtttgccttgtatttgaaaggatctaaggttttacttatccccaaactagctatatagtgttgatgactttggaatttgtctttttaatgttttctgttaatttaaatttaaaaaattgaaattattactctgtgtggtgtgtgtatgatggtgtgtatgtatgtgtgcacataagtttgatctgcaaaggattttgcaggtagagggggatattcattaaggatttctggacagtggagctcttttagcagagtaactgttggagagtgttgtaagtctagacagagagctcagcatcaagggctctgaatagtggcacgcagtggacaggagcacagtgccatcctctctagtccatcaggcttacagagtcctgagccagagtcgagttacgcccatgactgtgtttctgtcagttatgttagtgggattctctgagatctcactcactaaattgcactgctccaatttaagaatcattcataaaatgaggttgccactagtaagcatgataaatatatggctgttgaaattctttttggggttgttgacataaaaatcagcttttacacgtaaagtacactcttcttgtaagtttcaccagttctctaaggatttatttacttcttttgtatatattcatgtgagcaagagagcacagacatgcatatgctatgatatgtgtggaggtcagagaacagcttcttgtaggtcagttctttccttctccgttgttttgagggtctttcaagatttttggacaaaaaaatctgtgctgtgctttgtatgtattcttgctttgtatgcgggcttctggtcctcctgtctttgcctctcatttcacatacagtgctaggattctccatgccagtcaccacatctgctgttgttttacgtgggttccgaactcaggttggtcagacttgctccacaggtactttttatctgctctatcatctccctggaccttaccagttcttaagtgaggataatgcattttttttttttttttttccgagacaaggtttctctgtatagccctggctgtcctggagctcactttgtagaccaggctggcctcgaactcagaaatccacctgcctctgcctcccgagtgctgggattaaaggcgtgcgccaccacgcccggctggataatgcatttttaattgttgtaatatttaagtgacattaaaggaagtagggtgtataaattgatgggcaagaagctagacatggtgtgcacgcctttaatactagcacttgggaggcagaggcaggtggatttctgagttggagaccagtctggtctacagagcaagtttcaggatagccagagatagccacatagtgagaccctgtctcaaaagaagagaaaaattaaaaaaaaaaggggtaagactgtctgacataaatatataataaatgttagttgattgaaaagttaaacattacatgaatataaattttatgtatttttcaagtacaaatgtaccttataatctgctactagaaggcagtcagtagcatgggacctataaggccttttagaaagtgggtcacagtgtgtaataaacatgggagataactaatgtggatagcaaatcagccttaatattcctggaggagctaccgggaactttgagtagggtaattagtttgcagggttttcagttacagtgatgttcattatttaacatttttatttccataatgactcatctgtgaattatagagtcctttcccaaaaggaatgcaatactcttgaaaaacatttttttcctgctctgagtgtgtgtcatattctaggccccccgccccccctccatggtaaagagtatctgggcagttatttaggaacaaaacattgcaaataattttaaccatgtgttcttgtgtagcgaaaacttaacccccttaagacggtgaagatttctttactacagtcaacattcagtgcttatatttactccctctgccattttaaactcttacattttctactgtcttttgtttttaaattttttacaatcttttttttgccaaaaccttgtataaatgcatatcatcgaaagatacattatgctcacagtattctagttatttgttttatttatattaaaactggtattacatctgacattagcttgatttttatgtatcctttgcaatgttcttgtaatggcactattgccagatgctactaataacttttgtggagcactgtgcacatagagcacagtggatacttctcgttctggtgcatgtgatatatgggtgtgaagaccaaagactgagaatgatgcctttctcagttgcgctccactttagttttaagtttgtatttatttcttttgggggagattggtgcatgacacagtgcatgtgtagtgaggacaagttgtaggaattgattctttccttctcccatgtggcttctgggggcgaactaaggactttaggcttggtgacgcatgcctttacctgcagtcatctttctggctcttcacctcactttgttgcagcaaggtctttcattggacctagactttctccatccagctagcctctctggcccctgagctccgggacccatttgtctgcttaggcccgctctgccctttgctcctgtcccagcttcttatgagtgcctgggatctggtgcttgcctgataggcactgcagcccttcctgatgcttctctatacagtcattacatttttttgaaagtacataattacgtttcccctttccttcctcagtccctcccatacaccctccttttggtctctgtcaaattcattgcctcattctttagttcttcatatatgcaacctgttcagttcagtccaaataatgttctctgtatgtataggatctgagctggctacttggtattggataaccaattagagggcccttacctgatgaagactacttttattactttctatatcccccattgtctgtatgtagttctttgtcaaagattgaggccccacaaagtttccccctttgatgttcatatccattggtgttgtcagtgtttacatcttgttaggcagccatgttgatgggacctaatgggtgtgagagctaacatttttacatgttttcatttcacagcaacttcctgtttgtctggcttttacaatttttctgctctcattttctcaataatcccaataatcccttaggttcaggatttgtgttgtagatgtagcagctgggacaaggcaccacagaatctcttattctctgcattttgattggttgtgatttgctttaatagtctcgtttgtttcaaaggtaagtttctgtgatgaggagtgagaagcacatttaaggtcaaatatttcgaatgtgattaggagtaatgctggtttagtaaagtggtggttggttgtaggttcacctccaagatccatgaccttaccaaccctggagtgttggatagatttccagtaccaggcatgttttcctcttgttgagcaaatatgttatttttaatctttacaatagtcctgtaaatagatgatactgtctgtatttatagaagaaggaattgaaaatccacagagggacatgtggattttgtataccttttatttctggttaataacagatatttgcctatttacaaagtgaactaaagtgtgattttggtctttttacttcagtacaatagagcagaatgtagatgtgcgtttaagatacttattaaggctggagaaatggcccagttgtaaagagcacttgttgttcttgcatagaccctgagtttggttcgtagcacccacatggtggctcacaaccatccctaactccagtttcaagggagataatatcttgtctgaactccacaggtattcaacacatgtgtggtgtacatatatatatatgcaatcaacacacccatacacaaaaataaataaattaaaaattaaaataattgctaaaaaaagctttaagaaagtactcattaaatgcaagactgattaaaagtcattcaaattttaactttagaagaaattccaagagtagaattatgagtatgacaggagctctccctccagaaggggttcacattgagaagttgagaggctagggcatctgttgagctgttggagtggaagtggagtagcttatgtagttgaactctgtgggcaggctgctgtcacagcactgcttcctcttttttcttaagacttccattctgtgcttgtaggtacatggacaccagtgcaggagcccccaggggtccaggttaattgagactgctggtcctcctccaggatcacccttctcctcttcttctttcagccttttcctaattcaaccacaggggtcagctgcttctgttcattggttgggtgcaaatatctgcatctgactctttcagctgcttgttaggtccctttttgtgatccctctacagcctcagtaatagtgtcaggccttggaacctccccttgagttagatcccactttgggcctgttgcttggaccttcttttcctcaggctcctctctccatttccatccctgtaattctttcagacaggaacagttatgggtcagagttgtgactgtgggatgcccgtccccctcatttgatgccctgtcttcctgctggaggtgggctctataagttccctctccctactgttgggcatttcatctaaggtccctccctttgagtcctgagagtctctcacttcccaggtctctggtgcattctggagggttcccccaacctcctatcccctcaggttgcctgttttcatcctttctgctggccctcagggcttcagtccttttcccttacccaataccagatcaggtcttcccctcttaccccccacctccactttctctcccaggcccctccctccctccccacttgtgattgctttcttctcattcatcacttaatgatatgcaaacatttgttttgtttttatttaactctgtgggttttccccagagttttgttgattgagttgtacttggtgatgttctacttactgcacttttgaacaataaatatataatttctgaatcatgaaagaccagtttttatatcattaggataataaataatcgatttggaaaacggctgtaaaagtaacttttattttcccttactaattgctgtctctgaggcttattgcttcagtctgttaatctaggcctagtcctggaagcttctaacctccatacaattttatctaggcctagactgttttcagcctctgagacttactgctgaataagctcaccccttcttagttctttctgaactctcgctggctggttcaactcagctgttctggctcacattcctctccaagttgactgattcaatgtggcttctccctccccctcccttctcctgaattgctctgcttggcctcaaactaattctggcagtctgttctaatcttctggctccctttcattttcttgctcattctcacttcaacctgtctctgtaaaactgtcccagtaaaactgcctccttcctcctttctctgcactgctattaagaagcatctctttcctctgtctctctctgtgagagatgggcgtatcctattctgtcaaagcatcattttcaaacatggctgcttccttctacaaactaacttaacttcattgtttgggattgaaggtgtgtgctaaggcgtgtttgtattccagccggagggattaagggtgtgtgctgtggtctgagccacactccaactagaaacaggttttttattcttcttctttaaacgtaaataacataatctcgggttcatagtgtgataagatagcctgcaacagaaggtaacttctactcctcctcataagttgacatctttgttttatgattatgattatgtttatacttttcaagtcattaccttaaactaaatgtattgaagtatattcagtatattcagaagtaaccagaaaataaattttttaacttgactctgtttaattaaaaattcttattttcatagaataggtgtgctttgtatgctaagtctaaaggagacaaattaggttactaggaactggatatttagatggagctattcaaacaaatctctattttccttttttcttttctcatctttaattatttactggtttattgactgatttaatttgtggtgtgtacgtctgtgtgtgtgtctgtgtgtgccatggcccttgtttggaagtcagaagacagcttaggagccaattctcttttatcctgggctcttgggctcatgaactgagcttggcaccaaacattcccgttcaccgggccatcttaggagtctacctttttaactttgagaaaataaggcttttaggggagggggcttttagggaacagatttcaaaaactgcttgaatgaaagaatgtttgcaaataaattagaatcatagtgattcttattttataaaaaatgtttttaaaaaccatttttattttgttttttagcatctcagcccaggatgagccaggatggtctttgaacttgaaatcttcctgccttaatatttatagagtactgggattgcacatgtatgctattgttcttggctttgataatgtgtttaaaggcaactctcatgcattctagataccttatacattgctgacttaaataaatagaagtctacggggactggagagatgatttctatcttaggggtttactgctgtgaacagacagcatgaccaagacaactcttataagaacaacatttaattgggattggcttacaggttcagaggttcagtccgttatcatcaaggcagaggcatagcagtgtctaggcaggcatggtgcaggaggagctagctgacagttctacatcttcatcttcatctgaaggctgttaggagaagatgcttaggaggaggatctcaaagtctaccctctaagtgatatacttctctaacaagaccacacctcttaatagtgctgtttcctgggctaagcatattcaaatcaacacaatgttttagtggctaaaagcacttgctacttttccaaaggaagagttctcagttctcagcacccatggagtgcctcactattcctaactccagtactagggtttctaacactctcttctgaccaccatgggcaccatgcacacatggtgagcatattcatacatggaggcaaaatgctaagacacataaaaaagaataaaaaagaaatagaaatagaaaaaaaatagaagtctaatagccttttctatattaaagtgtactgtactttgagatttaaaagtgataggagttagggcaggggtagggtacttggaaagaagactgctgcaggtgtaaggctaatctgggcttcatagtgagagctcagccagttagggataaataacaggaccatgtctcaaagagcaaaaaccaaagagccgtagcaattaacgttcattttagcgtttggttttacctttttaaagttgaaaacctaaagaaggacttaggggctattgagagagtggtgaacagtgttggagtttttgatttgtggcttcagtttttaccttcttcttcgagaagttgatttattgaacaattttgaaaaatttagaacttccttacaggcttgaaccacaatgtatatagaaaactgatgagaagatgagaagttgaatttgttagtattggcagatttctaatttttttataattttattattaattaattaactaattaaggtttttttaggcctcacactttacatttcaggttcattgagtcatcgggctcaactgagtgttttctctctccctcctccatcctttctctccctcacctactctttgcttctaggaattgctcttttcaatagttagggttatattgttgttgtttttcctcttgttcattccattcataatttaacatgaataaatttgaaaactactggccattacaacacacaagcacaattaaaacctaaaacttgattgcttagattgaggtagcatgctacagttcttgtgacagatggcttcctcatgctccttcctcctctgctgtgattttttttttttcccagagaaaaaaatcccatgagttcccattttggctctagttgtgctctgcccactcattggcttcagaggaactctaatttggatgtactggctactggcactatagtaggaagtggttacaaagtgtggctccttatgccaagtgttcttttatcagagaaattgtagtttcataaagttaaacatcttaatcataccgactaaagctaaattttactcttccaagactatttacttttaattatttgtatatatgtctgtgtgtaggtatatgcacatgagtgcaggtgtctgtggtggccataggtgtcagatccccctggagctggaagtattggtggttgggagtcacctaccttgggtgttgggaactgacccagtttggttctgggcaggagcagtacatgctctaagtgcagcactgtgtctccagctccagaatgtgttttaaggactgtttattacacttgtagtgtgtgtgtttttgcatgtgcacatgccagagtgtgggtgtggacagtaaaggacagctccctccacggtgagggcctgggattgaactcaagttgccagcttgggaacaggtgtctgcccactgagccttcttgcaggacatttagcatatagttttcagttgatgttctaaactaagtatttttagtggcatatgtattacaaaacaggtttttaaaatctgaatttcacataatcaggaatttatagtgtgttgtactgcaatgtttgttccgggcactgaatgaatatacataattgtactgagattttttttttttgggtgtgtgtggagataatcttgttgtgcgctttagggtggccgccttctacagtcttcttgcctaaactttctgaattctgggatacaggtgtatactactatgcccagccatgacagaaatttaatatcacagagacttaattatagtcattgaacctgtcatgtctagtattgaattttatatttgatcagttacaacacgaatgcatgaggatttgccagactttaaagttggaccagtgagtgattgctgctgttgctgctgccaccactgcctcttctcatttttcttgtttacaatttacattatttatttattttaaaattattttatttatttacattccagctattgagacaggatatctctatatagccctagttgtcttggagttctaccagcatctgcctcctgagtgttgggaataaaggcttgtgtcaccatacctgccctctcattctttttcttctgtcttttctattgttatgaagaaagatcatgaccaagagaacttataaaataaagcatttaatttggagcttactgggcaggcttagaatctatgaccatcttttcaggaaacatggcatcaggcaagcaggcatgatgctagagcagtagctgagaacttacatcttgatctgaaagttggaggcagagaaatgggggtgtgaaataggaagatgttcactatgcattacagggaacatataacgtgtgtgtgtgtgtgtgtgtgtgtgtgtgtgtgtttatcctggaagtagtatagcttaattatagcactgttttaaagcacagactgtggattcagtaagcttagagatactgatccaaggaatgtagagagatctctgatctgtacgatgaagataatgctcgatcatgagaaggatgtaggggttaaataaattaagtctcagggagaatttagaactggggattttgtttagtaagtaccagttctttgttattgtcgtttcactttggtctctcttgtaaagttaatattgactcagaaactcagaaagatctatttgagtgtgtttcctcagtgtaggattattgattaacattattttgttaatactttttcttcatgtaatgaatgtaaatttgtcacataataaaaaacatagtgaagactaagattaaatctgtacatttgtatgtcattacaagataaaatacagaattagtcacttggaattcaataaatatttgaatgctattgagtgaactataatacttgtttagaattgtaaatgtgataggtgggaggaaccttatagaatctctttttcatattccttcatagtaccccttacaaatcatgtagtataagtattaaatttacattgattagctgtttgttctgtttaaaagtaattgttttttgtagaaacttttcatcattaagaaatgtttgaagtagcttgcttttgtgtaatacttgatacatgtatagcttaggatctgaattcagtctggaactaggtagaacaaatctatttctctttccagaataataggatagggtttatgaaatagaaatttagtggtccaaaaaattgctggtagggctggaccacttgacttcaggcttgcttctgtaatactaataagaaacttgcactactgtgagcccagagcagttgaaatctcctgcagccccacccctctgcagcatctgttctggctaaagaagacagagcctctttcttcatgtcacccaggtccacacttgtcttctatgcttttgtttaactggtagtctggatcctcctgtgctgtagctacaaggctatgtaggaatttgtgagtttccactcttaccttggggaagcaggactcagagcggatgtgtaaattaggatctgatttacgtgtttgaatattttgcatgtgcttatgaacatgtactatgtgtatgcctagtgcctgcagaaatcagcaaaaggtgtcagatctcctggaactgtagctagggatggttgtgagccaccatgtggtactggaaactggacctatgtcctctgcaagagcaacatgtgcttttaactgctgagccatctatttcttcagtccctgatcttaagtttaagttcaacttcagctatgtagtgagctgaaggttaacctggaatacttgagaccctttttaaaaaataggacaaagcaaatattgcaaccttaatgtattgcatcttggatatttttgtttgtttctgagacagaatcttaccatgtaattctgcttggcttagaactcacagtgatcctcctgtctccaccttttgagtattggaactgaaggcttctagatggtattgtttatttgaaagactctgtaatcacactttgaaaaatagttatataaaataattaaaatagggccagatggtggtagcacatccttttaatctcagcactttggaggcagaggcaggtggatctctgagttcaagaccagactacagagtgagtccacagcaattaaggctacacacagaaaccctgtctggaaacacagcagcagaaacaacaataaaaacaaacaaaaataataatttaaatgggaagctcctttaaaataaaagttgtttttgtttgttgtttttcaacttggaagagaagctcttgggatgtatgcttttattggggtataaatttaaatacttctgaattataacccagataaaaatcaaaacattctttgtgatattaatgcctgctctcctttatgggagaggcactaaattattttaagttttattttgcttactgaaaagggtatctcaattactaaattgattttgcaacaaattttataataggtgagtttaaaaggtagtagtttataatataggtgttttttcaggtacatagaagctgtcagtttctataaaattttacttttagaaagctaggaatatgggagatgatactctcaatatataactttataaacaaatgctaataaaaaaacattgccttagaagattggttagacattcccaggtcattgtggctgctcctgtaaataaatactgaaaatgcataggaaaaattagtagaagtgtctgtttgctgtactgagacagtgcagaggaaggtgtgtcttgaagtgtccaaagaggggaatggtagtcctggaagtggtatgcagttttaatcttcttaaggtaaggatgatagtattcttgataatgtttccctcttttgtttgctttgttttaagacagggtttccctgtgtagccccggctcctgaaactctgtgtacactctaggctacctctgagcttcagtgctcttccttctcccttcctagagctgggatcgcaggtgtgctacatgcttgggttaagtgttcttgcttttatgcagcagccagtccagtggtgtttctttacttgcggaaggtggtaattctacatctgctctttgtagatccttggtctggaaaattgcttaggaatccacagaattctggtttagtaagttttctctttaccatagttatgcatgaactaatgctattacagaaacaaatttgagagcaaaaacgactgtttcttttggagtttgcctcttttgttgtatctttatcttagtcactggtttttagagtagttgccagagctggtatgtcagtttgacattttgatttcaaagatcctattataatcttgctccaatgtcaagcagttcctcagtgatagacataagcccccctgctgctttgttagatgatgtaagacggttttacagagtccttggtgttatgtccctgtgtggagcttaaatgaggacatttatagtgcctaatggagcttttatttatcgatttcaggttattggctaagttttgcctcatgctgactttgaatttgattatccttgagacagaataggaaagcagtttttaaagcaggatgattttacatacaagagcaaccaaaactattacttaatagtattttaaatgttccatattagtgtatgtttcagtggtcagcaactttcttagtgtcctagtgtaacttagcctagtaggctcacatcttggtgaagccaaagccaaatgagcagtcaagacgcacaagagtggagaaagatttattacctgcagccgggcaacagacctggggagtaactttcagagaagggccctcctccagcaaaggaagcacatgagttcactcttctagcctataagtattcatataggcgctgtcccatttctccatatgttcagttaggggcacattcctgagcatgttcagcataaggtcatgaagcacatgtttagaagattaaagtgatagacaagagtgctctcaacttgttctggaaagttttagctgaaaacagtttaacgtctaggttaagaaaataagagtctgcttctgacagggtctgccttgctcactggctagcactagcaataggaaacacatttagcttatggaatgttcacctagttgtaatgaatgtgtcttgaccagagaacagcttgattactgaggagttgattttgaagtcttcagaagggtgtgtccttcaagaacactgagaagagtattgatctgtgcttgttagaagaacgttgtatctagtttcctttgttttataagcacaattgtgtcatcttcaggaagcagctgatgtatttagcagccttgcttctccatttgccaagtcgataatacagtaatgagtagaacatattttctctttgtaaagtaatatatacatagaatatagaaaaagtttaactccaatatttctctgatgcagatgtgtgtatatgtgtatgagagcatgtgtgtgcatgcacacacattgtatgtacaaacacacagtatacaatatactttgtaatgcgagggatcagcagggcattaggtatgctaagcaagtgttctgccactgagttgccttctcagcagcacattcttttatattagttcttttatattaaaacaaaacaaaaaaataacaggcggctggcgtgattgcttattgttaagaatgtattgcctttcagaggacctgagttgtcttcccagcactcaggttattggctcatagccctctgtagctccaggggagccaatccttctggcttctgtgggcatcaacatttgtgtgcacacatgtacacacagacatgtcatgatgctatacttttagccaccttttattgttgctattaatatttttcttatgtaatatttctatggctatcttggttagtgtattttgcatctctgtgctttctataacagataattgttaaaaagttaaatgtatttgacaaagatgacctaaaggaattagagagccagaatttattatatacactgtgtattctttaaaagtttaacatctatatgacttttagtttgtaacgagaggaaaagtcatgaaaacaagcctttaagttgttttagtaactgctttattttagaaggagaaacagcatgtctaaaatacagttcttgctttcttaaggtgttacagctgtgcttataaaaccaaaggggttgggctagggtgcatctcagttgtggagtgtttgcctagcgtgtacaaggttttgtacatacagcactgcaggagtgggggagtacatgcgcctgtatgcatgggtgcgggttcagtggtcctcgcccccccccccgcccccatcactttgattcagcctcctcctccttgagaagaaatagaccctagtaccatagacatctactttatggagtgaattctgtttcttttgtgcatctgaatgtcctttctcctcttccctcctcttccccctttccttcccctccccctctcctctttcccttctttttagttactcaagtgcttatctattattatgaaagcaagcctctaagttttacacatatggaataaattatatttgtttgttctaatggtaggcttgttgaattgttttcatagtattagattattataagtttatggtttgtattaattgcttattggtgattggaagaaaaactaccaaatatgtctattttgacaagctaacttttaaaacagtttttctttttatttcttcagtgctaaataacaaaattttcttaattattttaatgaattcttttatctacttcaagaacgatataaatgtttttatgaaacatgtggaaaagagttttagatgtatcttgtgtgtgtgtgtgtgtgtgtgtgtgtgtgcgcgcgcgcgtgcgcgcgtgcatgtacaattgcatgtgctcttgctcacatatgtggaggccacaggaggcttttggatatcttcctttatcacattgtgccatgttggcctgagacagggactgccattgagctggtgtgttggcctgtcagctcccaagatctgcttcgtattgtctccctccccatttcactgctgggattacaggcatgggctgctctgtccagcttgtctatggctgctagggatttgaactcagtcctcttgcttgcacagcaagtactcttaagttctgaaccaaaagacatatttccaaagacatattttattttatgtttgccattgaagttattgacaaattatgttcagatattaatatgacagtgttttactttccagaaaaatttgtgcttttctctataaaatctacaattgttactattttgatccccaagaatgtgttaattttttttcctttctaacacaaatataattagtattttacaagatatatgtgctggctagttttatgtgaccttgacaagctgaagtcgttttggaagcgggaacctcaatttagaaaaatgtcttcagtagattgcatttgggcaagcctgtggtgcattgtcttcatcgatgtgggaaggcctagcttgtggtgggcagtaccactcctggcctggtggtctataagccatactgagcaaatagtgaggaataagccaataagcagccctcctccaaggcctctgcatcagctctggcctccagcttcctgccctgactttcctcagtggtgtactgtaatatggaactgtaagctaaaataaaccctttcctccccaagttgtttttgatcttggtgcttatcgcagacatagaaatcctaaggctgtgcgtgaatgtttaccacacatcacaacacttcatcctgagagtactgtcatggtttacaaagaaattaagatagttgtattagtcatgtttctcattgttgtgaccaagtatctgacaagaagcaatgtaaagggagaggacttcttttgcctattgttttaagatttctctatcatgaaaggcatagcctttcatgaggtcagtatcttttattcttactaggtttctcttttctcttaattacaccttaaagacagcctatttaataaagggtgctggcatatgggatatccacatgcagaagaattagatatatcatctcttactgtataaaaatacattcaaattcgatcagaggtcttaatttgaaacctgagatgggccaggcctatgggtatatacttttaatccagtagtcagaagatagaggcaagtggatctcgaatgagtttgaggttagcctggactacatacagagttccaggccaggcagagcaacacaatgagaccctgactcaaaaataaaaaggaaccaaaaaattcaaacctaaaatggtgttgctactaaaggaaaatatagggaaaacacttttggatatagctgtaggcaaaatttttctgaatatagaaccctagtggcaaaggaaatagccagccctaagaattgacaaaattgtagagcttcatcttagtaaaaaaacagtcaaaacgaacagacagtccataaaacaggagaagaatctttatagttaccacaaacaagatataataattagactatataaagaggtacaaatcccttctgtcaatcagtaaataaactaatgactgactagatagttcttagaagaagaaatacagctgaccaataaatatctttgaaagtgcctatcacttttcatctttagggaaatgcagattttaactccttgagattctgtctcacaccactcagaatgactgtcatcaagaaaacagttacaacaaatgctgacaacagtgtgggaaatggaacccttcactcatcaatgtgaaaactggtataatcagagctttcccaaagaacttcaagtagaactgtaccgtgtgtccttcctttattgctcttgggcatatacctaaagactacaacctaccacggaaatacttggacattatgttcattgttggtctgttcatagtaagaaggaaatggattcagcttaggtatccatcaagaaatgaataaagaaagtatggcgcatatatgtacaataatattcttttattcatctgtaaagaaaagtgaaattttcagaaaaattgacaaaactgtgagataacccaggccgagaaagagaaataccccaagttctctttcatatgctgagtctagcttctaaatgttaagtgtaagcatgtaggtggagtgagtgtgggagaggccaggaagctagaaagggctggcccacaggatgaggacaacaggaatctgtaaggaaggagtgtggggagtgaagtagagcaaatgttctatgaaaggggaagtcggggtggggtggtgggtgcagaaggtgggattgatgtgtgggttggggctgggcaggggcatcaccccaagagaagtaggtatgtaaatgcactaaggaaagttagtagtttgtaagttaattttaaaaaagatgatgtaaaagaaagatttttagaggatttgtttctgtgtagacaaatatacagttttctctgttgatgtttttaaatttttacttttattgtgtaggcatgttcacaggcagtagtatgtgctctcaattactgagccatctctccagcccagtatgttgatcataaattcgctaatcttattgtgtgctagtattgtgaacacacacacacacacacacacacacatctctttaaaagccatcacatgtggcctgctagacagctcagtgggtaaagggttaaggtacctgctgccaagcgtgatggtgctgagtttaatttccagatccatgtggtaaaaggagagaatcgattcttgaaagttgtcttctgctgggcagtggtgacgcatgcctttaatcacagcacttgggaggcagaggcaggcagatttctgtagccagcctggtctacaaagttcgttccaggacaggcaggacaatacagagaaaccctgtcttgaacaacaacaaaagaaatttgtcttctgacttccatgcttgtaccatggatacatgcttgtgcttcccctccccccttttctctcgcacacagagtaaataaaaatataaaaatcataagtagtagccgggcgtggtggcgcacgcctttaatcccagcacttgggaggcagaggcaggtggatttctgagttcgaggccagcctggtctacaaagtgagctccaggacagccagggctatacagagaaaccctatctcgaaaaaacaaaaacaaaaacaaaaacaccataagtagtgctaagtgcaaaatgacataattggaaagatttgtggcacacacagaaagtgaatgtttatcttgctaataaacataaagaatcacctccccgttggatactcacatctttacttattttatttatgtgagtacactgtagctgtcttcagacacaccagaagaggcagcagatctcattatagatggttgtgagccaccatgtggttgctgggaatggaactcaggacctcaggaagaagagtcagtgctcttaacccctgagcggtttctctagcccggatactcacatcttagttacttttcggttgctatggcaaaataccccaacagtagcaatttaaaaaaagtacgggagttatttagtcttccactttgaggtgtagtagattgtggggagggaaggcaagacagcagcgggggcttgaaacagctggtcaggttgtccccacagttggacagcagagagagatgaatatttgtgctgggctagctttctttttgtggagtctagaattcaagtccaaggaatggtgcttctcacttctacttttgggtcttttctcctcagctaacctcatcatcataatccttcactggtgtgctgatgttttgtctccttggtgattccaagatcatttgaagttgactgttaatataacctccacttgtcaataaaatttaaatgattagtacacgggccagatgtatacgagaatatcattcacagaatcaaagaatataatgttactttgccagggattgggaaaaggaactaaggaaagctacttactagtatccatgaattttcagtgaagcagaagtaagctgtagagatagatccagtacagcattgtccccgcagtcaacaatagcattctagaccttacaattcttatgaagatagagtttatgttagttctgctttttgagtagtatgtatcacttggcttcaaacttgagatactcctgcctcactctttaaaatgatattataggcatatactattatacctggttttggtgtttgtgtgtgtgtgttcatgagttcgtatgtatgtttgtgtgtatatatatacatatatatatatatatacacatataaacatatatacatacacatatacatattcacatacatacatatatatatgtgtatgtatgtgaatgttaaattgtagctaaaaagttatgtataaccacttattaaatactagtacttgctaattaatgtttttaataattaaaagtcattttgttttttgatagacttttatgttttggaattttgtttttctactcctgctgatttagagtcttctcactccctttaagataatttccattaaattttgagatgtctagattttcttgtggcttataaagtaaaggactgccatacttcttttcctgagttggggggaataagcacaaattaagttactgacaattatagattattaccatggttttaaaacttgaatttaaagagaataagaggaatctttatttctgaggatatttctgagaatccttacagctatttttagctgcctgcaagctgctctgtctttgctaattgaggggaaggctgattttggtttttctttttgtgttgttctcagcacatgcagatgacaatccaggctctccaggatgagctgcggatccagagggacttgaatcagctgtttcagcaagatagcagcagtaggactggggagccttgcgtggcagagctcacagaggagaacttccagaggctgcatgctgagcacgagaggcaagccaaagagctgtttcttctgcggaagaccctggaggaaatggagctgaggattgagactcagaagcagaccctaaatgctcgggatgagtccatcaagaagcttctggagatgctccagagcaaaggactttctgccaaagctacagaggaagaccatgagagaacgcgacggctcgcagaggcggagatgcacgtccaccacctcgagagtcttttggagcagaaggaaaaagagaataatatgttgagagaggtgagtgactacctttttagttcctgattgtctttttcccttactaatcagaatcttgccctagataaatttatgtgctctgctgtgctgctggataggaattttgtctcttgtgtttcagcacttcagtgatttcctttttgattttttttcttgaacagaatgcatcacctggcatatatgttactcaataacagcctcacccctgtcaccctgcatgagattcttaggggttcctgagtgactgaggggatacagggttgtttcagtttgttactcgcttctgtttgttcgtagagacagaacagcaaaaccagagtcaggcgctcaattacaaactactagtaaccagtcacctctgctcacccatgcctgcagcactcaagcagtaatgggtgtctcctctggtttccctggaaacggttgtcttgttgtgaaagatatgtgttaaaaatcaaggcgtgtagccagaaggagttatgtagagacacatgattttatatgaaagactcaaactggcctgtgtgattagacctcactttctgtggcaatgacattttaagaaagcattaaggaagaattcatcttaccttgagctaatttagaagctgtaatacattttatatgtctgatttcttagggtttctattgcagttataaagcactgtcttagtcagggtttctattcctgcacaaacatcatgaccaagaagcaagttggggaggaaagggtttattcagcttacacttccatattgctgttcatcaccaaggaagtcaggactggaactcaagcaggtcaggaagcaggagctgatgcagaggccatggagttctttactggcttgctcagcctgctctcttatagaaccaagactaccagcccagagatggtcccacccacaaggggcccttccctttgatcactaattgagaaagtgccttacagctggatctcatggaggcatttcctcaactgaagctcctttctctgtgataaccccagctgtgtcaagttgacacaaaactagccagtacaagcactatgaccaaaagcagcttgtggagaaaaaggtttattttacttacagtttaaatcacaatccatcactgaggaaagccagcccttgagtgcaggaacctgggacaggagctgatgcagaggccatgcaggggtgctacttactttcttgttccccatggcttgctcagcctgctttcttttcttttctttatttttctttttttttttttttagatttgtttatttattgtatgtaagcacactgtagctgacttcagatgcaccagaagagggagtcagatcccattacggatggttgtgagccaccatgtggttgctaggatttgaactcaggaccttcggaagagcagtcgggtgctcttacctgctgagccatctcaccagccccagcctgctttcttatatatcattagaccaacttcccagggatggcgtcacccacaatgggctgggttttctcccattctccattctgtcactagttaagaaaatatactatagacttgcccacaggccagtctggagctgtgttggattttcttaattgagcttccctcttccaaaatgactctatactatatcaagttgacttaaaacgagccagtgcttctggttagatataaaattctttttagcttccctgtgattattgggatgcaccgctataaccagctaactttcacattttgatggggggaagtggggatcctcgaactgttaggatgagtctgaataatcccttttaaacatgatttgggaagaagaaaattaaaaacaaataaacatattcaactgagcatgatagaacatggctttaatcctagcacttgggaggaacaggcaggcaaatctcagtgaattgtaagccagcttggtccacatagtgagagactgtctcaaatgaacacatgaaaacacccaagaaactaacaccaacacaaaactatggagctactgagtgtggtggtacatgcttttaatccctgcattttggaggcagaggcaaaggcagaggaaaaggagatggaggcagaggaggcagaggaggcagaggaggcagaggctcagtgagtcggaggccagtctggttgacatggtgagttgcatgatagtcagggctacacagactttttttttttttttttttaactgtacagcacctcaaaagtaaaaataccaggtgtgtattgaaacaaatacaaacttggtgatgtcttttttccaattataatttcctgctttaggagtattacgtttttgctgcttctgaacatttcaacctatcctagtagtttaggaactaataaatgccaaatagctaaaggatacgggaagtcacagtttgtttatttatgaacagttaggatcatattgagctcgaaaatactgaaaaaaaaaaccctctgggagttttagacttttttttttaaatataagtcatataaatacattttgtatatgataaaagaaaatatatttccctgtgagtgtaccatcaaacaattcaaggctgccatttgtagcatattgtcttataagaaatataatcatgctacttcaaattacttgaaagcaagtgggcacagtggctgtggaaatccttttcttccttcaagacttaacttccatcagttctgcattgacggtcagtgtgtagtgttgcatgtacatgcagtagcagtgaccatgtatatttggcagtagtgatcatgtgagtagaagtatccaaagcaattttcctttttgagatggacgcttactaaggagacctggctatccttgaaatccctacacccctgacgattctagataaaattaataactcttcgcctccagaccaaataaatgcttaataaaacaagaactgaatgatagttttatagtctggcttaagaaagtaatagtctagtaaatgtatatttactagaaagcattctgcttactagtcacatactgaagtaggaagaggtaaagatggttgtgttaatgatatttaagagcattcttgaagttttatctaattaatttgataagagtagggaagagaataaataatgtcattgatggaaaagatggtactcgatttcattattgcagaaactaatatgcaaatgtcatttcccccaatttatcaatttaatgcgtctatactgggaattttctggtaacccttgggggacttatgtaggtagatcagaatacatatattttgaatccactggtgatatgtatctgtaaaactagcacctgggaaacagtgacagagaatttaaagttcaaggccagcttgatcaaagaaaaacataatagagtctagaaatattgcattgttaagtatatggccaatattttgagataatgccatcatttcaaaaatacctagttacataaaattaaattctagatgaattgaagaactatttaaaaagatatattagaagaaaacataagcaaaaaaacctttaaatatagtctttggcatggaagactcattggtatagcgggaatattaataaacatatctattagaggttgtaattaacaaaggtaaaatggtaaccctgggcagattttaacacataccttgaccttacctgtagactactttctaaagcagtaagatgccccgaagtgcctgctcctacctttttgttctcgttcatccccttcctcaacagttccttattaagcctctagtaggtattgatcttgtgccatagataaacattttcacagtctgtgtccttctaagactcccagatttgggctggagagttggctctgtgcttaagagcttcttgtactctcacttcatgcattcagtacacatacgagtggtttgccttacaatcactggtttcttagacttagtaaatagcataatagtaaaataccatgtgtgatattactcattacaatattctgcttcatttatgaacatgattctgtatacccccatattaaaattaatatttgataattatattttgtgtcaaggtcttattatggttggagcttgggttttctgttggtcatgggattgtttcattgctgtgctgttccaccttccatttgatagatgagcgaggacatctgttggacgcacagtaaattgcatgccatgtttgcttagtgctttgggcttggacacttggagttgtaataaactttgcaagtgattgctatacagcaaacttggagaaataaattatgagtctcagtgtcttggtaaaggatattgaagttggctctggaatttttatttattttttttgggttttttgagacagggtttctctgtatagccctggctgtcctggaactcactctgtagatcaggctggccttgaactcagaaatctgcctgcctctgcctcccaagcgctgggattaaaggtgtgcgccaccactcccggctggctctggaattttaagaaactctttattcctgtgtgtacaaaacattgcaactcagtaatatatttcagacctctatttctctctttaaaatgttgacagatgtttgccttctttttttttttttttttttttttttgggtgggcttttttgtttggttttctttttgggttgggtgtattgtcttgttttgtttttgagatgaggtctggctgtttagctcaggctggcctaggactttctatgtagactaggctagccttcaacttattgagatctacctgcctctgcctccctagtgtaggaatgaaaagttttatccaattataccaggctacacttttttgtaatgaattccattacattctatttggctgttttgtttgtttgtttgttttgtttcctatgacattttaatctgaatcttgttagtacagcttttcatgtgttagggtttatgtgtttgaggttaaaagtactaatatttgtatagattctagcctatgaattctgaattttggctagtatattagagaagtatctgagttttcttgacagtgagaagttataagagtaaaaaagcaagagatatatagagaaatagatagtggactagggatatatcttagatgatttaatctcaacactgcataaaccagtgggaagcgtaggcagaaggatcaggaattaaaaggtcagttgcgtctacatagggaattcaataccagcctggtttatatgagatcctgtctcaaagaggaaaatagcagatagtgaatagaaggaattggaataaaaaagaattccagtattagtatgtttggcattttgtagtgattttggaaagtgaggaccattaattatgttgtttattcagatattttctcctgctctgtttttagtatgtcattttcttatttccattttgtcaagaagatagtttcctcattacagtgtagctgctacagatggcaaagggctatagaaccacactgttcatcattggatgagagaaggtaccaaacaagtagtgaggagcctttttatccccccgcttcatttccatctcttctgtgaatgcagtactctattctagaacttatatggaggattgactttgtcaggggacttcacaaacatttgacctaagagcaagcagggctcaaacttaacatttgaaaaaagagaaatttcagacttttttttttaattgaaatttttttattactttattccctttacattccaatattagcaccccctcccagtacctcctcaaacagatcttctccccatcccccacccccttcttctctgagaagggggagcgccccctaggtatcaccccccacccctcttggcacatcaagtcattgcaggactaggtacatcctctcccactgaggccagacaaggcagcccagttagaggaacaagactcacaggtaggcaacagattcaccaacagcacctgctccagttgttgggggtcctgcatgaagaccaagatacatttctgctacatatgtgcagggggcttaggtccagtccatgctctttggttggtggttcagtctctgggagcccctaagggtccagattagtggactcacttggtcttcctgtggagtccctgtcctctccaggtccctcaaacctttcttcaacttttccacaggactcctggagctccatttaatctttggctatgggtctctgcatttctttccattggctgctgggtggagactctgagaggacatttatgctaggctcctgtctgcaaacacaacagagtatcattaatagtgtcaggaattggttcttgcccatgggatgggtctcatttggtccagtgattagttggccattccctctgtctctgctctacctttgtccctgcacaacttgaagggaggatatagtttgtgtcaaagattttgtgggtgggttgctatccttatccctccactaggaatcctgcctgactaggctatttcagggttcatatcccctactgctaggagtctcaggtagagtgccccctatagataccctggggccttccctctcttcccatctcaggtctctggcacatcctagaggtgcccccgccccgaaatttctctcctgctctccttatacttgaacccccctactgccctctcctatccagttccttatttccattatttattttgtttacccttctgagaaagattcgggcatcctccctttacctccttgttatttggcttctttgggtctgtggattttagcctggttatcccatactttatggctaatatccactgatcagtgagtatatacaatgcatgtccttttgtgactgtcactcctgcataattcatgatgtccttgtttttaatagccaggtatcccattgtgtatatgaaccatattttctttatccattcttcagttgagggaaatctaggttgtttccagttctggctattaggaataaagccgatatgaacatagtttgacaaagaagccaaaacctcacaatgggaaagggagaacatctgcaacaaatggtgctgctctaactgcatgtctgcatgtagaagaatgcaaatagatccccgcataaaactcaagtccaagtggatcgaagatttcaatgacaaaccagatacactaaatctaataaaactgaaagtgaggaactgccttgaacacattggtacagaagacagcttcctgaacagaacaccaatggctcagacactaagatcaacaattaataaatgggaccccatgaaactgaaaagctctgtgagtcaaagtcattaagacaaaatggcagcctgcagattaggaaaggacatctacatccacatcattcacccctacatctgacagatggcgactatccaaactctataaagaactcaagaatttagataccagcaaccaaaccagccctactgaaaatggggtacagagctaaacagaattctcaacagaggaatctctaatggctgagaagcactctaagtgtccttattcttcagggaaatgcaaatcaaaacaactctgagattccactttacacccatcagaatggctaagatcaaaaactcaaaggacagcacatgctggcgaagatgtggagcacggggaatactcctctattgctggtgggagtgcaaacttgtacaaccaccctggaaataaatctggtggtttctcagaaaattgggaatagttatacctcaagacccatctataccactcctaggcatatacccaaaagatgctccaccatcccacaaggacacatgctccactatgttcatagaaacttcagaacttttatgtgttactttcagtcataagtgtttctttcaataatgttgatatggtcagcatatttttatggcattggccttgcacatgctaggccaaaggctgtagtatgatttaataataatatactattattattagagttattattttatggttatagagattgaacctaggaaacaatgcatgctaggtaagtcctctatcattcagataagtccccagcctctttacttttaaaatgaaagaaactactgaagaaaagaagcacaaattgttactaatttattctcaaacttaaggttatccatttggtaattagaggagataacatatttcttatttatattagaaactatgtgatgttattaggaaattcaaatagtatatctacccatatgttttttaaaaattaaaaatatatatacttattttgaagatagggtctcactgtatagacaggcaggcttttcattgagatcctcttgtcttgacttctgagtgctgagattaaaggcatgacttctacccataattcatttatttttctttctcttttctttttccctccctccttgcccttttcttccctcttctccctcccatcctcttcttccctctcccctctttttttccttttcttttcccatttctgtcccttctccttttcttcttttcccttctcccttgcccctctcttcctttcctctggccctctcctttctctgctccttcctctcccctccccctttcttttttccttctttccttcccccattctcttctttcccttccttctttttcccttttcctcctctcccatctccgcctaccttttctctttccttcttccttttcctttctcactcctgtctccccctttctcttcctttccctgtctttccctttcatgcccgactcttgttcttcgtcctgtcctggcctatttctctgtgttagtccagttatactcgtgtctcggcaacctgagtgctggaattacaagtgcacaccatcatgcccaagtctagtttgcgtatttatgtgtgtgtgtgtgtgtgtgtgtgtgcccaaaggtcagcctcaggggttgttccttagtagctgtaaccttttcttctttttttctgttgtttgtttttttttgtttttttgtttttgttttttattttcttggagacaggatctctctctctctagctctggctgtccctgaactggttctgtagagtaggctggccttgaacttagagattctcctgcttctgcctcccaggtgctgggaattaaatgcatgcccacctttcccagctgcttagtgttttgagagagagtctttcctgatctagaacttgctgggtaggctaggctttggacatattctaggactgtatttagatccttaagcttgcataggaaacgctttactgagctatcttgacaatcccaagttgtatttatttttaaatgaaaaatttcagccagtagggatgaaatcaagtgagcaaatagcacattcttcttcttatacttgtttgtatagtaacttagttttatttccagagtctctcctgttagttacttacagtgtgtgagccagaggcttgatttactaggtaggaaaggggagtttgtcagctcactgaatacaggatgtgttcttatgagcttcagtgtgtaggcctgtgggtagaaatgtgctgtgataggattcaggtttttcaatgggagggttttgtgcttgtgagtgaattagactgcattctggtcatctcttattacatgtagaaggatttttaaaattcaaatagttttgtttttcttagtctgtttgctagggtttaaaaataaaattataatagtttaccacaaaatggagcattgtgaatttacttgtttggaaatagataatggagaagagatgccataaaattagttggacacctaaattgtaaagtagttcaaagaaattcagcttcaatacttacaagtactggagcaataaataatccatgtaagtatagattttagtcttattggctgatgaaaattgtctataattagtgtagttcattttatgtttatataatcaaaaatctcacacttatttgtggagcaaacatcctcagaagtctctactataaactcaagtgagcagcttgtgtacacttggggaccatagcttctgaacaagctacagctagtgagtttgctttaatgctggtgggagactaatctggactgaatgatgtttttagtggtggaatggaagaaaacagatgagttcaatagattctaaaacttaagatataatatagagagtgctgtgggtcaggactggagatgtcgctcagtgggagacccgttgcttgccacatgcaaccctaggacctcagaataacagtgtaaatagttgtgtagcttaaagaattatgaaatatgctcccttctaatccccatcacccaaatatagagagggaactttaatgcccatcatcgtcagagactctcttgttccactaagaacaactgtgatcttggcttttatgatcactcatttgcttttgactaaacttaccgtatctctattcctaatattaaaacattatcacatttatgtatcagtatcaattaatggcaatacatatcatggcttggcttcatctgattttcttttgttttaattaaatttttgatactccttttttcccctttaaatttgcattggtattttgactgtatgtttgtctgtgtgacagtgttggatactctggaactggagttagagacagttgtgagctgtcatttgggtgctgagaattgaatcaggtcctcaggaagagcaagcagtcagtgctcctcatttctgaatgatctcctcagccttcccctttaaaattctaatgaattactttttggagactgttttgtcttggtgttgaattcactgtatactggagggtagacttaacttttaatcttcctctatcacttccagttttatgtagttctaggaatctatcacccagctgagaactacctatggtgttgtgcacactagtcaagtacactaccaagtgacctgggttttcagctctgtttttcaagagtactctttaaagttttaattatagatttttatcttccataagctactttttagcttacgggctagaataataattccattatatttgtaatttctgtgcacatattgacttactacatacacacatacacacacagagagacagacagagagagaaggagggaaggagggagagggagaaaataatttaaaaaaagaggttgcaagcaggacagtgttttagttagagaagacattagaacttggacacccatatcgacttctccattatttctatcctatataacaaattacagttaccaaacacacaaggcaaggagtcaagcttattacaggagataggcattcatttattctttacttcatcaaataatttaaaacactatcctagcatggtaattttacccctcctttctttagtgtgtatctattaactgcatggactttttgtctaaacatagtgataccatcacagcgaatccacttaaaacatttaagagacatttgagttgggaacagatggaggtaaagtgctcagtggcatgggagatgggacagagttcagcagcccagtatatttggggaacagctaggtgtccagtgtgactgaagtaaagtgactgagggaagcgggaagacacaaagtgtgacactctctcaagaagacatgtcacatggggagcctcacagggttttgagtgtggagggaggagatgacctgggttttaaaggagtgtattgagaagatgcagtaggggaagcaaactgtaggaacttgtaacgagaagtgtggggttttagatggctcatgttaggtaggagtattaaaaatgtacaaaagagtttttggatttggatgttttgaaggtacatataagtagatttcctgacttcggtttagtggagactggaaggtatgaatggcttcatgtgtgatacaagtttaggatgctgctgaagtctgatcttgaaaaatagcttttgaaatgtttgataagtacgtaagtatgatatccagttaaatacttaaggctgaagttggttgtagcagtgtatattaattaagattgagtctgtcttcccttaaatgtttgagccagaattttttcgggttgtgaggtttttgggagtttggaatattttcatagacattagcagttgaccattctgttctaaaagtaaaatcagagatgctctaaaaaaaaaaaaaaaaaaaaaaaaagaaagaaagaaaaaaatgaatatagtatgaaaacacttttaaaagagcttttctttctgtaagaattttttaattatttatttttatttcatgtgtattggtgttatgcctgcatgtgtgtttgtgtgaggatgtttgatctcctggaactgaagttacagagctcacaactctgccatgtgagacctgggagttgaatgcaggtcttcttgaaaagccggttgaactcttaattgctggtccatctctccagtcctgttctgtaagaatttaagaaaagttgatcagtgagcttcctggtcaggcaacagtgagtaaattaggagaaagaaataaccaaaatattatattatggtctttttcatagcttataggtttgtatatagcctcttagtatagaggtattttctcagttgaggctcctatttctctaatgatcctttcttatgtcaagttgccataacttgtgccaactagtcagcacaagtgaccccttgtcaatgtgatgcacaaacacatcactgctaagctacaacctttactttttcatttattcccaagatcacatattaataaagacatcacggcacaacacgtgttatagacttaaagagttccacagccttacaaattcaaacatgttaaaagtttagtttctttacaatatcccgtctcttttagaaagaattctgggactaaagacatgtgcctttaacatgcaacgttttctgattttgaactacatagaaacttgtccaacagactttttctgcctccctggatccccactggaggttttcatcataggtaactaggtggttgttactctggaggtaaatgctgtagagaagatgttgtcaacagaggtaatttcaacacctctatgcagtgcacgctggttatagtggcctttatctcttctttttaaaaggatctttcctatccacccctcctctttttagatcatttgtatttttggtttcaagtcttactgatatatcaatctatatggtagattttactattgcagtagtagttgttattactgtgtctaattttaaatagctagttagagccagggatcctccaggatgtatgctgaatcagtctagattccctggtccaccagtaaggtttttgacaaaagacgtggtggcacatatctttaatttccagcacttggtctggtggatttgcgtgagtttaagaccagtcaggtatacatagtgagctccaggctagccagagctgcaaattaaagcccaaaggcatgagaattaaaggcagccactgactctcttccgcttttatttaggagatgcaccggagatttgaaaatgcccctgattctgccaagacaaaagccttgcaaactgttattgaaatgaaggtaagtgggaatctcatgaagaatcttggagtcaccttttactcttaacggttagacactccgtgcatgtgtagaaggggtaacagtactttgctcagttgggagtctgagaggaaactgtaattgtttcctttatcagttcaaatgtcaacacattggaaagattctcatgtctagtggactccagaagtgaaaaatagtaataagttaggaatctccaggagttataagagtttgctgtctgagttaaattcttttgatttaaagtttagcagatattttatcaggtataggatatgaagcaagttcctaacctctttatacctcagatcttgaaagaaagaaagaaagaaagaaagaaagaaagaaagaaaggaaggaaggaagaaagtaagtttaacatgtaaaatgtttagagcaggaccttgcacatagtaaacagttgatgtcaggtggtgttgctagtgtttttattagacacatggtattctgatttcctttattgtgacagttcagcttacagtttcacattatggttcaccattgcagggaagtagtagaggcaggagcttgagacagctagtcatatagtctcacagccaggggcagagagaagcagctgtagtcttgctgcctactggatgactctcacttagctttcttctgccttgtacagttcagagctcagttcatgacctggagccacccacattaagggtgaggctccaccccacctcagttactgcagtcacaacagtccctgcacagacatgttcaaatgccaggctgatgatgtacataattgctcattgagactcttccaggtgacttcttggttgtggccagttggtatttaaaagtaaccgccatccatggtcctcctttcctctccctgtgccctaggctgagtttgaacatgcggtcttcctgtcttaccctttccagtgctaggattataggcatgtgctacattacctgatttatgttttttctcataaaagcccatttaaatagaacttatcctctactttctttaatttctttagaggctagaagaggcttgatttgtattatacctcctgcctcttttgatgtgtgtgtgtgtgtgtgtgtgtgtgtgtgtgtgtgtgtggggttttgaggcaaagtctcattctgtagccttagctagcaacaactaaatttggcttgcagtgataaaactttgctcaaattatgtatatttttttcagtgggttaaggatttatcaaacaaagtttaaattactagtttatgggttctttggaattaaataattacaaggttgaatataatcttacaggaggcctttagaatggcttaattttatggctttcccttagtcacacagtataggtttgtttgtgcatgttacttcctcatccctgttgatgcctaaggataaaacatgaactcatgtgtagcttttttccttctcttcttctcacagatcaggggtgtgtgattttgttaattggcagtatgtatattttaagttttgcaggcttatattgtaaaatgagattctgtcaaccagggtcaagtggatggtgcattggttacttttctcattgctataacaacacacccggcaaaggtgacttaataaaagatgggtttattttggatcatggcttgagtgtgtagatgaggcagtgagcacgtgaggcatctggttacgctgttcacagttaggaagcagagagaggtgagtattggctccatttgcatctcctttttaatttagttctggaccctcgcccatgggttggtgctgctcttgttcagggttggccttcaccttaaccacctccctggatatgcacgccctcacagacacctccagaagtgtgctttccaggtggttggaagctgctctctggccttacaaaatgagattgttcagggtaactagatctgtaaggaaagtcaagttttgcttgggaaaggagacaacctttggaattggaaatgtggtaaatatctcaaggtgtagatcctcgagcgccctgtaggagtggctgacagtgaagggggaaagtggaagggaatgcactgacctgcattttttcacatagacgtgcagaagctgactgggagagctgtcctcacaaaacctcttggtaccacttgagcttgtactaacaataactagttgttcaacctgatttcagagagtaaatgggtagatcttcccctggacaggccatgtttgccttgaagttttcacagcttgcagtaatgggcttttctagaaagaagtttttgtgctgtgtgtttgatagtgggttgattttgtcctgtgttgttggtattggtggagaagaagtaaggctttgggtaaaggccttgtagaagttgtacaggtcgtctacagtggatggacagagctagggcttttactctgcatctctgttgtcttttgtggatcaaagctgtgctagagatatgttcccttttcctgtctgctcattccctcttgttactcttggatgtgggtgtagcaacaaaacttacatttgactctcagctatttgtgtctggtgttttagtcattttaaagagaccatgtcctgatacttgcagaacattttatattaatctcaaaagtgaatttcagatagtacaattgaaatgtaggctatgggcgaggcaaggatacctctttcccctcagctcccccaactggaaaattgctggttgaagttgtcttgtgacagattcttatgttttatctttctgcttcaggaattataatagccaacacggccaaccaaggtatctttgatgtaaagttacaaaggaagtcagttttaaaattcatcccaaaatattctctctaaagctccaaataaaataaactttttaaaagttcctatctttaaggcaaattaagcatgttcaatcacacatagaaaattattttatgaagaccttttgctgtaataatcacaattgaagttagttgaggattattcagatgtcacaaatgaatcaagaacttaagactagaaaaatgcaagatatttgtggtaatagtttataagaagagtgattgattatttaactatattttgagataggagggtatactatattgcctaggctatccctgaactcctgggatcaagtaatcctcttgtctcattcttaatacccaggactatagacatgagccatggaaacattttatagatatttcaaatatattccagaagtacagagaataagatttctaaaatataaaaagtaaccattgatatactcactttcaaatttttctgcaattggaatgctagataattattattgtatgcataattaaaacttcattgtacaattctttaaaacttgtattcatttctcttatttattggcagaaacatgccccctaaaggtcactgagtggtgaagcgttagaactagaaaaggctttacctatagttcccccaaccccactagaaatgtattgatacatttagtatccatcgcttctgcctctttggttaactatgtctgcttgagatggaaggttgtaactgtaggaagaaagaggtgtggccattgtgagggtaagtcttcctcttcccacatgctgcccagcagcttctgtatagtgactgttattaatttctgaatttttgagagacagttatttgtctacttttaatctttgtaaataatttaatgctcaactcttctattgttcctaggattcaaaaatttcttccatggagcgtgggctccgagacctggaagaggaaattcagatgctgaagtcaaatggggctttgagtagtgaggagcgggaggaagagatgaagcaaatggaggtgtacaggagccactcaaagtttatgaaaaataaggtatggagcggattctccagttcccagaggcctgaacatttatgtatacttttccatgttagtgttagtaaagatctgctttatgatttaatagacttaaaggtttgttgttgttgtgtctcccatgtggaaatgtcctagaattgaagtcagaattactggttccatttacttattgcaagcttttatttaagtaagaactaaggacatgttgttacagtttaacttttcgtttctgtaagaacttctgaaatgatttgatggaactttgttcagatgaagttttcttcctgtagaagacagctcattcatttcttcctgtagaagacagctcattcatttcttactgtagaagactacttttttgggtattttaagtcaaacccctcagattcgtttttttctaaatcaagttaaatttttttcttttagacaagttccaagagtaaagggcctttgctctcctgtagtggggttcatttggtaccagggttgttgtttcctatgtgtgcgcctcaggcccatgtatggtaagacaggcgcacggaggcttggcagtgtggtttcaaatcaggttttctttagatccaaagtcatttactttgatttttataaaccatttaaagaaaattgaagaatttggtatattatggtttaattaaaaataattattataaaaaactggacatgatggcacacgcctgcagtcccagtccttggtagatagaaatagctagactgctgcaacttggaggctagcctggtctacatagtgagttccaggctagccagggctacatggtgagactctgtctcaaaataaacaaatatacaaataaattatattaacaatgacattttatctagaaaagtattactcactgcatttcccaaatgtgtacagcagctgtgttctttgttctttggaaccaaaaaccaaaacatccccatacttgactgtcgaagaatgacacaggtgtgactccctgccctgttctggcttcttgttgtggtgtctgttaccaggtttatgtctatagaattttccactattaccaacgaggctgttagtgatgatttatgctagtcatatgttaatttttaatctaaattgattatccaactttttgttagtgtgaattttctcccttgaaaattttagggcaaaatatactgtgtcataatttatattttccttcctttttgatgatcagcatattccagtttaatttttaaaagtttgtgagatagagacaatatatgcctttgaaaattgagttaggggaacagctttgattattttatgtaagttattgttatttcagaggtcactgtggctcagaatcagataatatgaagacccgagttggcacatgagtgaaaaacaataacaatgtcgtgacaggtagagcaactgaaggaggagctaagttcgaaagatgctcaaggggaggagctgaaaaagagagcggctggtcttcagtctgaggtctttgcagtaagatttacctctttgtgtgcagtggtcccacagtgggaccctgctggctctggcttctgggtggcttacactttcactctatatggatggcagctctgcccattcttagcactaaccagcctgctctgctcttttaactgacatttgttcaccagtttgacccacatgtcactgtgcacactgagactgtatgtattctggaagccttacacactgggtctgtattgttttgccactctatggatggtgtctataaactctccttcctcatcctcttgttgactagatatacattgatttatatgaatgttttccttccattctttttaggtacaggaatgtgtaaatgtctctaggctcagcacctacaactttcctgcatttgaaattcttgagaaactgctttagttctacatggagacaatataagttttcattaggagactttgtaacaaatggcattttctttaacatagctgtatagagagtaattagcctatttaagttagctcatagattagaactagtgtgataacttattttaaattactaaatctgctttagctttctgtgtagtgaacttaaagctgtatttctaagcattttgataagtaataataatataatttccacttagatacttactaaaagcatcttataacctggtagagtgatctacactaatttacaaatgatgtccaggaagccaccagagagaggtggggtggggtctgattgacaccagcaatctgattctagagtttttcttgtaatttcttcactatctagtctgtattgtccatgcgtaccttcctcaaagtgtcagatgaatggaaaaagtgctcttaaggagtgaagtagactggaattcagtgttaaaaatacattttgtttatttatttattaacaaatacacttatggcctatttaatctattaatctatttatggcctattttctattgtaggttaaaaagtaagatactatgtttggaaaagatctaatttaggttatggtgttaactatatgttgtctggaggagaaattggtatataacttccttttttcttagttactgttactcagatatatgtatcagacagcaggccaagtgtatctcttacattatgctgttgaattcctgaacaatacgatgctttggtataatttctccattgccagctagagaagtgctgttaccactgtcttcagtgacgaagggccactgtgtgcttctcaccaggttctctctcctgggtattctagaaggaaggtttgtgcatccaagcttttcttctatttaaaatgttttcttctctttctcatttaataatgcacatggcagggaaaagtcagtcctgtgcaaaagtgaagtctctctctgtgtgtatatagtatgtgtactttggaattttgagaaaggaccttgttatgtaagatagtcatcaaacttgtgattctgcctcagcctccttagcattgggatttttgggtatgtatctccatgcctagcttctgtttatttctgaaccatgtttgtaagtatccagaaatttggatacctttaagccacagctctttgctgagaaagttgtaatactttgactattctaggcatttatttatagaacaaatatgctttttagatcaatctgtgtattacagatagagtaatactaataagcacatataatttgaatcattactatatcagtaaataagagttttcatgtgtgtagaaaagtgcttatcttatggaaaaagaaccctaagttattttaagtgtttcttacaagtctaattggttttctttcttttcttttcgtaccggtgggctggggtgggagagttcaagtataggatctcatacatgttaggacacaactcctccattgaggtatgttctcaaactagaagtctagttttatgataaactttatttcttcctgtgaaattgcttcaagaaaaaaaaaaaacaaccctttcctttacttaagattaatgtggtcaaataaaatactgtagaaatactttagaaaactttagatactcagttttctaaaactcaaggatttttgtttcatctgctgtgaaaatgcctgacttaccatatttatgttcagtagttaatatcttgtagctatttcttagatggtaggcctaaaaaaaaatcagaaaatgtctaaagtcagcttgctttcttaatcttctatgttttttaaagtttaatacttcaagatatgaaagaaggtggctgggcaaagtactaaacacccagcacttaggaggcagaggcaggtggatctctgtgagtctgagaccagcctggtctacagagtgagttccaggacagacagggctacagagagatactcttgtctccaaaaaccaaccaaccaaccaaccaaacaaacaaacagatgagttcctaggatctggactgggtaagaaagctctgtgagtaagagcagttgctaggtaagtgtgaggacctggactgaaatctctgtaactcctgtaagaagccaggtgggacttggtgacagaaggaccaccagagtttgctggctgccaacctagcttcacgttcagtgtaggaccagtctcaagggaggaaggcagaaagtgacagagcaggacaaccagtgttggcctttggcctctgtatgcatacatgcaaacatgagcatacgtcacacacatgtactgtactcactggtgtggctgcacacatacttttaatccagcacttaagagactaggaaagaagatcaggagttcaagaccagccttggctacatatttagtttgggccagcctggggtacacaagacccctgcccccttgcttttgcttgagtgttctctctcacttgctcacttgctcactctcacacagacgcttggaaggaaaaggggtataaagaaagtgcttagaaggaaatatttgttggtgctaagagagctctatggagattgcattgtatttttatatatgagttacacattcagactgataaacttcaaacaacttgtgtagattctttcagagtgaaaccttatacattcttcatttaactccagtgtttatgttctatgatgtgcacatagttgataaataggtgatttttaaaaaacagaaaagaaaaagaaaacatctctctaatgccttcacactgaaagcagcttggtttcctcctattttcatgatacagggcctcactctctacagaggctggcttggaactcaaagggatccaacagttctgcctggagtaaaggtgtgcactgccacacccagcctagctttttagcatgaagatttcatgaaacttttgcttgaaaaagaaagacagacgtgtacagctaagatttgaacttactgcagtagaaattactttcccccttatgcttcatgtttacactaatcctgcctgggacccatcctgttctggagatggatgcttgacaaaatgaagtggtgtttaggtgatgaatgctgcctggtctggcagaactacaatttcctccttcatctctaacccctaaggcagtagttctcaacccgtgggttgcagccattggaaaaccacctttcccatggtcttaggaactgagacgctacttagcagcagaattataattattaagtagcaatgaaaacaactttctgattgggggtcactatgacatgaggaactaggttaaagggtcatggcattaggaaggttgagaactaataccctaaggggtttcagaaactactttgaaacaataaatgaagattaaaaatttgtttgttgaataagcttagttcttggtaaggagcatccggtattagatggtgcaaaaaattagtattgtcctatcttacttgtttgctatttgatgagcctgggagctcaagactgctagacacgtgctttgccactaaagccctccccttctctaccttatcatagagttaatgttgcatttaatttcctatattatgccataaatctgccagaggtccagctcagaggtagttgtgtaatttctttcttcctcacagtgttgtcttttgttttccagattggccaggtgaaacaggaactgtccagaaaggacacagaattactagccttacaaacaaagctagaaactctcacgaaccaattctcagacagtaagcaacatattgaggtgctgaaagagtccctcactgctaaggagcaaagggctgccatcctacagactgaggtaaagagtttttgtgatttgtgtagaatccagtccatacctagtttcattttgttatatatttgttatgtttagagtcgtgtgatcaattattttaataaaacaacattttctgttagatctaattaaaacatgttatttctttacatttttttgtacttggatttataccacatctgtacttcaaacttttaaattattcaaatcagaagatattacaaataatatacctgattcatttagatttggaagcagtaacttttatccatggtaaatcatgactatatgaattatatatatacatatatgtgtgtgtgtgtgtgtgtgtgtgtgtgtgtgtgtatgtgtgtgtgtgtgtgtgtgtatgtgtacatgtgcatgtcctgccaccataatcaagtgttcatactagcacttctaccttgggagtcatctcgccagctcttgtgtcatgtttttttaagaagttctgttctttcatagttttattgggctgaatttagatatatttaaagaattgcaaatatgaaatagtttagaaaatattgccttcttcatttataaagagggttttcattttggtaacttgaatattcattgacacaaaaagttcagaacttggtgccagtgtcttaaaggtaagcctcacttccactttgctactgttagcctgggatccaagccattgatcaagcagttggttgatgccagtgcaaacatttaaaagcttgtcatggtctggtaaacagcatttcttctctgtcaatcctctctcctgtgtattcagcttgaatacagtattagctgagtcttacatagatggacttgtgattggttccttctaccatggatggtaaaggctgtcttatccctcttgaatggttgtatatttgcctcatatttgtattatatgtgtgtatttaatagcacttactttcaaaaaatttctgtaatgacatttaagaacagtttttccctagcagctttcttttgtaagcccaataaaatgcagtttgtaccgattctttgaaagctgttattttatatcttacttttaattgattttgtcctctttattgcagcagtttgatctgatgtggaaaccaatgaattaaacacaggaaaaagaacagggatcatggagctttataaaagctcgtatgcttatgtgtaatatgtgttcatgtgggtatgtttgtgtgtgtgaatgtatgtggaggcagaggccaacttgaggtgttgttcttcaggtgccatttcctttggtaatttgaggctatcgcccctgccctggcgcttgctgatgaggctaggctaactggccagcaagtcctagggatcttcttacctccatttcttcaggggattacaaatgcattttggaatttaattcagatcctcatgctttcacaaacaacgttaatgagtgagctacctcccagctcctcaatgaaaaattcttcatggaaaaaattgatctgtggaaagatctgtttggtagccccttgtcctatcttttggcaatctacagtaaggacttctgttggccagcttgtataatattattgaaattacttctattctatacctttctcttgtaatctgttgacctttgcagaggtgatcaaactttggtagaaataatgattgaaagagatttaggggctggggagatggctcagcagttaagagcactgactgctcttccagaggtcctgagttcaattcccaacaaccacatggtggctcataactatctataatgggatctgatgccctcttctggtgtgtctgaagagagcaatggtatattcatatacataaaataaataaataaatcttaaaaaaagaaagtagagatttagctgcacacgtgtaagcctgcccgtagccccagtgcagatgtggagggagcccatgaaactctcctgctgactgaggagctgttgagagctgtttgaaaggggtgtgcctgctgggaggttgctcatgctcagacaagtggtactaattggactcaatagattattaaaaaaataaagaagagggtgtgaatgggggagggagagtgtgaaaggaaagttgggttgatatgatcaggatgcattgtgtgtatgtgtgaaattataaaataataaaatactttaaacatagaggtttggggtcagacctaggattgatgctaagcctctgtgtgactgtatctgagttgtttttttaatgttttaagcctctctattctcattactaaaataaggatacggatactactaacttcttgagttgttttgggtagagtagatgttttattacgtatttctcttctggacatagactcttaagtatacaggttaaaaatactttataataactgatcttttgcaataccttattcattcattcattcattcattcattcatgtttttcaagacagggtttctttgtgtagccttggctgttctggaactggctagcttcaaacttgtagcgacctgtctgcctctgtctaagtgctggaatccaaggcatgtatcactaccacctggcctactttttattttattagctaaagttgatgttttagtatgtattttccttctgaacatggaagagtccttaaatttctaggttaaaatactttacaaacctagtctttcataacacttattatttcattttattttgagtcagagtctctatctagcccctagttattccatacctctctatgtagaccaggctagccttgaactcacagagatccatctgtgtttccctcctgagtgcagaaattaatggtgtatgcccttctgtctggcttataacattttcatttgctatcacttgttctatttgctcctgcattagttgctttagtttcactgtggccctagcacctaacagaaagaatgtaatagaggacagatttattttggctcatgggtttgaagagtttcagttcattctgttggagaaagcacagtgcgacagttgagttcatggttgtttaagcatgtgttagacaaggatctgggagtgcaacgaaacacaggctcccatatgatcatagcaccctacttctactagctaggcctcccctcttaaaggtcctaaagccccccccccaattcttctcctagcttgggatgtgggttaaccctttcagacttaaaccataacattctacttctgccctttatgccccccagccccaccctcagagcttttggccatctcaaatatagaatacatttagtttaatctcaagagtctctcatagtcttaacagttccaggattgtccaaaagtctactgagactcaaagcattctcttagttgttacatcagctaagagcccttgaaatatcaaaaggagaggtttataaaccaggtgtggtggttgtaccactagtcctagttcttgactgaatgggcattaggactgacaggagttcaaggtcagtttaggttacatggtgagactcagaaaaacaaacaaagagaagccatgggcatctggggacaccagaattctaagatggagtcattgatataaaagaaactgatggatgatgaatgttgagctggaaatgctgccaatctggctattgatgtgggattttacttccaaaggtttagagtatgtcagagagagtacgattggcatcatagcatgtatgttaacatgaggaaagggagcatcaatggggccagtgtggtactggcagcccaggtacttgcgttttttacgaggtactcaaacatgagtgataagacaaataccactgaagaggggccagtattggggggaggtgagtactctcgattcccaaacttgactgcctgaccaactcccatctgaagaattcagttaagtctaaattttttcatatcctgaccgggaactctaataaatggagacaggtccatgtaaaaaaaaaatccaaacaaataaagttatatacttctaccattcagtggcccatagtaagcattcccatttcaaaatggagaaatggggacataagaaagagggatatgaccaaaaacaagaccaaaacccagggaggcaaatattaaatcttatagcgccatagccaacatttggagcaacatttggtgataggttctgagcccaggttggcctagagatgacaccttgcatgcccatacatagcctctttctaggtctggccctagtttgtgcatagatcttactcaacagatgtctcacatctccatcatcttgatgtttccattgtatctcagtttactttcagagtttcttcattattctgtcatagctccctgaagagaatcacaccctgctatacattctcatagcaggatattggtgggaacctccatgagtcttgtatactgtatgcctgcaaaacaagtaccatgtggttaataccagattctgctgctggctgtgcagtagtcacatcccactggattataacttcagtgttttttgagggcctgggtagctagaatacttctttaggtggctcagtgcaaatggagcaccccagatacacgaagttttaaaagaaggtgttcaaatatgtttttatttctgttctgaagcctttggtgggtgtggtcttgacagtcgtgaagtgcctctaagggagcctgactgtcctggcacataacttggcttttctttaacatctaactcctggtcttttctggtcagactgcacatttttcacagtttctgttctgctttttgggccagattctcactgtaaacctgacttaaaaacagctagccaatttcccagagataagttagctttttggttttgaatttggactccatcaaaattacagcaccttagcaaagtgtagacaaagcctttgcaggaacatagcacaaatgtcctttagtccattctgcagtatggtggtttgaatgaactatgtcccctataagttcatgtgtttgaacccttggtctatattatgcgaggaaggttatggaaccttgtgaggaggaagcatgccactgaggaaagtctttttggcttcatagcttggcccacttcatgttctcactctctgtttcttgtgtatgggtaacatgaggtttgtttgttgattatcaggatggcttgtacccctgctacaataacttctctgtcatgatggcctgactgtatcctctctggaattgtaaactaaaataaacactcttctcttttaagttgcttctggtcaggctagtttatagcagcaatagcaaagtagctaatacttgtacagtctgcgttctcatttgaagccttctgtgtgcaatctttattgtctgcattctggtctcccagactcctacttgaatatcccattatgctctgctagtagtattctagggcttctcctggcttgcatctctagactttttttaactctcccctccagttcaaaagatccctgaaccacatggtcagccctaattctcagagccagttgtctgtatctgtagttgttgtgtcactgtcataggaatggatagaaacagctacagaggagggaagaatcatgatggcaggggggcggggcatagcagaacagctcgattctagcttgaggactcttgtaaaggctgttcacatggtagcaggctatgaaactgaacatgacagcaaccagtggccattatagcttcagatgcttgcccctacagatctgcttctcttctctgcgacctacctcttttttttttttaattaaaaaatgtgatccatccaatagctgactgtgagcatccacttctgtgtttgctaggccctggcatagcctcacaagagacagctatatatgggtcctttcagcaaaatcttgctagtgtatgcaacggtgtcagcatttggaggctgattatgggatggatccctggatatggcagtctctagatggtccatccttttgtctcagctccaaactgtgtctctgtaactccttccatgggtgttttgttcccaattctaagaaggtgcaaaatggccacattttggtcttacttgcaccatcagccaggggataagcattcaaaacttgtgcctgtgggagtccttcagattcaaaccgtaaatgttcaaatacatgcacctgtggggaatatttcccattgagactgccacactgtggaactcgacaaagggcatttatttatgttcattctagcacagaatttgtctaccctttgccagggtcctgaaaatttgattgaggctatagagtattatcatgagctagataagatacacattttgtcacttttatagaggaggcttagatgaattattaatatgctatgtttgcttgacacatgttctcactctcactgataccctgttttgtcagtaattcttccattttatttctgcttgttcctgaatcatggcactatgcctatcactgaatttattttttggaggacacctcagtgtatggaacagagtagattttattgatacattgaaataatgcagatcttaactgcttcagagaagtagtttttcccctttgaggaaaattgtattttagccttttatttgtagtgttattttcatctgcactgacgggcagttggagaaggttgcttctctttacatgggtagaccacagatttagcattcagtccaagtaaagaactctcaggcttcctgtgttagaggtgagatacatgctttgtttgacaacccacctttggctaaccagcaatgcttcccttaaaaatactttgtgtttgtgtgtgtgtgccgggcacacaggtaccgcagagggcaacattgggtgcctttctcaattgctttccactttatgtttttgagacgtggtctgtggtggtttgactgaaaatggtccctgtaacctcatgtatttgagtgtttgggctgaggatgtaggtctgtgaaactcctttctagcacaccacacccacctagagaatcaaaatgcagtatgtaagtttggaactcatagcacagtactcactttatctggttgagagcaggaaaaaaataaggagccaccaagaaatacgagagtatgaagacctaaaagcagaagactgaagttcagtacaaagattgagagaggagatacgttagttacctttcatgtaactgtggccaactatttaacaaaaacattgaaggagggaaggatttcttttggttcctggttcaaaggtgtgccatggttctgggagggaatggtgattgaagcttcaaggtccatggtggcagatagtaatggtggttggttgcattgttgtagtgacaaacagagagctcaggttcgaggagtctctgtgtcccagagtttctgtagccaaaacagagccaccaggtagggaccaagtatccaagcaaatgagacagatgttggggtgtgaggtgtggatggactttcacagtgaagtcagaagaggcagtaaatacaaataagctgaagttagaatacactgtcaaactcagttgcactaaaacagggttctgtgcttttgcctattagatgagcagaacaacagagttaaaaagtatagcaccgactttgacagcacacacacactaagactgaaatgatagcaagacagactagtaatgcctttgagcagctatgacccatacagtaatgaagtagttttcatgtttgatgctaacatagccaataaaataataaggcaatacaaacattttttttttaaacacactgtatttgagcacatggatgttaaggttgaacggcttcatgtcctttgtcattacttgcttactctgttccttgcagatttctttgagctattcctgcaaacacagtagatagatacttttctgtctgcatgggtagaggaaaaccctgtgttgttattaaggtggcctaccagatttaacacatactttgatgcttgacaaacaaggtagccctgtgctcaattgaggtggacaaacagggccttatcttcctgctgggagtgtggtagggtggtgccagtgtgccttttgagggatcttttttctgtagtttgccctctctgttgtctgcttttctaatgcaacacagtgtatacagcagacacagtgtaaccagtagccacttattcctgccaccctaatgaactgtatccattcttaaactgcagacaaaagaaacctcttctcccttgttttgctattctgttacagcaagcagaaaagtacctaataccatcagggagattcctgctgatcttttcacattaaaaattgctttcttgagttttgacagctatttgtatcttgtagacagaagtattttgaaatataattgataatttctaaatatttttcctcatctatggcttgtcctttctttgactgttatatgttaggaagtcttaataaccatagtaggtggtaacactttcctattgaactttattttgtgatgtgagtaattggaaaatagcccttttttaagattttattttatatgtatgactatttgacctgcatgtgtgtctgtgcgccacgcatgtgaagtgctcaagaagactgctggatcctatggaactggagttacagatgactgtaacttgtcatgtaggccttctggaataacgagccactgctcttaactgctgtgccatctccagccccaagattcagttctttttgtcgttttttttgttttgttttgttttgttttgttttgttttgttttgtttttaaaacagtggttctcagtctatgggtcacgactcctttggggtcaaataacccttccacagggtcacctgagaccatcagaaaacacagacatttacattacgattcttaacagtagtaaagttactgttacaaagtagcagtaaaaataattttatggttggttgtcaccacagtatgaggaactgtataatagggtcgaggcattgggaagacagaactacaggtatacaaagtacctttagtcttgacttaatcccctcaccccgacagatacacggtcattaaagggtttgaggtactttaaacaattatgctattcttcctatattttaaaaagatacatgttttacataaaaagtttaaatttattttatgagcatgggtattttttatgtatacgtatgtgtgactttcatgccatgtgcccacagagaccagcagatggcattggatccccgaaaactggagttacagacaattgtgagctgccacatggtattgggaatcaaatctgagacttctagaaaagcagcaagtgttcttaactgttgtgctgctctctagcctcatacagacatggagttactaccttaaattaacaagcatcttcctgcctgtatctgtggagagggctagggttgctgctggggtcttaggtgaagggcagttatctaggggtactgctgagtttgccatagaaagaagattatgcagatacactaaggagggccactggcacaggggatggcgagttgtttttaccagaaagtgaagatggcagttgaggatcatgtgtcacaggttaagtgaacatgactgtggccacagcctgaaataggaatgacagacacagaacctcagaagagtgaaagtgacagagattgagaaggctgcaggggaaaaagaaaccctccctcaaatggaaaagcactggcatcagagagggatcaaaaaagagagagaggaaaaaagatagactttattagaatagataaagcttccatcaagggaatgggggaggtgagaatctgcccagggaggaccatggaggaaactgctatagataatgtgacgctggggactgaactctccgtgctccctgagggctagggaagcacgcacagcacaagtgagtatacctcagccctgaagctattctcagtttcaatttagagtctgataaatattgacagtccagcttctaaaagctccttagagccttttgtaacttggaggagcattgagaagctgcaggatcacccagttctgagcgtgaactgtgtagctctattcctagcactgatatgcttcagggtcttccagaggaagagctgcccagtggggcgtgcatctgtgccagcctcagggtgtttagccctgaggtcctactttttatctcccaagataaccggggagatggcatacctcttactatatgccattttagactcatggtctcttcattttcagtcattcatgaatttgtgtctctccatgtgcacacttgtgtatgttcatgtgagtactcatctgttaattttaagaagtttgttaaaggttagcaatttggaatgttttatcacagtttgtgttttaaatttaatagagtcctccacaaatccctttctacccaaactgcagattgtggcatatttagatagactcgttcttagttacttttctattgctgggacaaaacactatggtcaaggcaacataagaaagaatttaaatggctcaattttagaaggttaaagtccatgatgatggtgcaaagacacagtggcaggaacagctgagagctcacatctggggggcagggagggagggagggagggagggagagagagagagagagagagagagaaggagctcctccaagaagcccttgatccttcttaaatagttctaccaactggggcccaagtattttaaacaaatcagcctatagagcccattttcattagaaggcccacaggcattttgcagatgtgttcaaggccaagattttccaggaatgtaggacaggcagagtgggtcccatcctcagagggagcttagccctacagacatctttactctttagaccctacttagcctccagatttgtgtgggaagtggtttctgtttaaggcagcccagtttttgatacttcatttaatttttgtttatttgtttctttgtcaagagtgagtttctttatatagctttggccatcctagaacccactcggtagaccaggctggtccacctgcctctgcctcttgactgctgggatcaaaggggtgtgctctccactgccatcacccccatggcacttttttttttcccagttataagaagttaaagagcaagatgttcgggatttctagcttgttgggtggtacttttaggttattatcatgtatgtcagttattgtcaggcagattgttaggaaataaggctcttgtttccttccataggtgaagctcactagtcttcatcagaaaggtagaagcttatctttggctcttctctcccatgtgtcctttttataggcaataaaattcagacttcgagacctgaccctggtgcctccttttctgtgacttcctacctgttactagccttaagcattctgtgtgtagcttagtgtgaagttactatctgttctgaccatccttatttatggcacctccactctgtagtttctcccattatcttcctcactgttgctcttccttcataatgctccaagcttcaccagcacctagtcacagatatgtgtgtgtgcacgcgtgcgtgggtgtaagaggacaacttgtgagagtccgttctcctattgtgtgttctggggattgagctcaggttgtcatgcttggtcattcattaccccctggaccatctctccagtcctattctgtacttttagaaaacactgtactctaatttccatgctccctgtaaaatacttacgttttccatgctgctgtcttttctattaggttctgaattcttcacaagggcgaaactaacaaatgtctttgtgttccagtgaccagagtagtataatttttctagaacatatatattgactattattttttccttacaaatcttttattgacgactttcatttgcaaacaggatagaattaagtaccttatttggcagctggtttaatatgttgttttgtttatctcatgtctttcttttgctttatgctcagccatcttaagcgagttaactaaaacatgctgtgttgggtatttaagtttcaaaatattctctttcttttcctaaaatgtgtatttcactttctctttcatatctagtaagggtttatttgttacttgttacccagttcaaatgctggttctttcaacagtctttttggctgataagctctttagaggaaggctactgactcctgtgcactgcctatgtgctttttagttaatatcctttgaatatggtgaatttggaatgcttaagttctatcatttcactgcttattgtaatttttaaaataatttaattctcccaaatcccagttttcgtatctttaaaatatgaaaactattccaaggaattctattcctctcctttctgttccattcatggtttgtaatcttttgttctcaggtggatgctcttcgattgcgtttggaagaaaaagagactatgctgaataaaaaaaccaagcaaatccaagatatggctgaggagaagggcacccaggctggagagatccatgacctcaaggacatgctggacgtgaaggagcggaaggtcaatgtcctccagaagaaggtaaggcacgggtgtcgtgagcacagtggcccactgtgatgtaacctattctcagcatgctgccactctccttctgtttggattatgcagagtacttggaactattgttgcaggaggtggattgctaaagctgctctgtgtgttcagtctttaatgaactcagtagtatccctgtctttcagtaggatttctcattctgtttctcaagtgtcttagaaattgacagactatttggccacctgacctacctctactatctttaactggaatagaaatgcattaatattgaacctggatcatccgccccattacttagatggcagttttgaagagtaaagcctgctgctgtaatccacatacacttgtgtggggctttcctctgtctcagccacagtgctccttcctgtgagggagtgtggaggcagtgggagaccgactcacctcttagaccataacagttattggaaatagctttcttttggaacaaaaataaactactgatacttttccagttttaacttacacatatatccaaatatatatgcttttgcctgtataaaggctatacagatgtcaggaagataccaaaacaatgtaaatagaatgagaatatatatttgcttctccttgagcaggttgtctccaaagtacagagaagcaagcagtgtgaatacaaagatagaaaggccactaaaattttaaaacaattagattagcgtgcactaacaaaataataaaccaatatttatagtgtttcaagttttacagttacaagaagtaaatgagaacaaatgaatgtaaaatgaaaacatgagacacaattctctgcaaataaaaaggctgaatcatcttcaagttcagcaagacagttctttgtactgtatgtactgtggacaagctaacatgcccatagctgttacctcaaggttcatttcaacttaaagtttatttctgttgaaatgatagatttgcaatgtttgacattttcatagtttattattaactagctatcagtagccaagaaagaagtagccatgagcagagatgatagtcatctgagttctctgggaagttcaactggggctctgtggttgacagagtgaacaactgtggtaattgacagattgtttgtcccttgactgagctgtcctggttctcctgtgctggattgctcactctgagtcttcgagttcttgtgtaatattcacgtctgtatatactgtgatcagagaagacagtcggcaataacagatggccagggttcacagttgattggtactgggctcctgctttctagaatttcccttaaaggagttttatgatagagtatctttacaacaaattggtgagcttggaaaaaggtgaatattcagatcttagctaccttgttaaatttgtataacttgctgggtgcatcctgttgtcttttgtattttgtttgcacaaatgtaccaggaatcccttctgcttactttccttgtttgcttattttgtcttggtgagatgaactgaacatttttattttaagcaaataaagtaccttattactatttcctacactttctaattaagaaagtctcaaaatctgtgattctttgaattcatttgctctctctcatcttttctttggtattacagaaaactcctctattaacagataactgtattactatctcaaaaataagcctgtgatggatataggttaaataaagggctgcttagctgccttatagaaatcctttgtggtttctttgaaattaataatttgtgtgcatgagtgttgagccatggcactactatagaggttggaggacagttccagggagtcagttcattcctgcctccttggggcatttgtaggtcaagtttaggttgccagccaggcctttgcacaagcacctctcttggtgaacatctctctcctcccatactatgttattgagtgtgtatgatgacagactcttacctaagatgtcttggataacatagcgcttctttttcttttattatcaataaaactatgaatatctaccctgggcatttgaaaatgtgacaaaggtaaagcaaaaaggtataaaaataagtttttgttttaagattttcttttaagatttgattttctttttaactgtgagtattgtctgtgtgttgaaatctgaatgtgtgaatgcaggtgcaagtggagtctagaagacagtgtaggttcccctggagctcgagtgtggtagttgtgagttgcctgacaagggtgttggtagctgatctcaggtcctctgcaagggcagaaagggctctcagcctcagagccacttccagctgctaagctttgctcttaagttgggaaaatattggtcatatctttagtaaatgttctttttaaatacagaggtaagtaacaaacacatttctgcatcttagctttgagaatgtgagctgtaacggttgcctgtccccccctggtggactgtttgctttagccaatctcctttggctttgggcttttatactgactttgttagtgttataaataataaaatgaagttttccttttggagtttaagcctaggttgttgatttaattatttaagaaacatctggttttttattagatctcaggtgttttttctgtgtagccattaagaaaacccgaaagcattgtttcacacatagataggcactgagcagtctcactgttagtactgtaagctgtatgaagttttaaaaagatatttctattattttgtatgtataaatgttttgactgcctctgtatctgcataccacatgcatacatggtaagtatggaggccagaagaggacattggatttcctggaacttgagttatagacagctctgagttgccatgtgggtgttgggaattgaacctggaaagtatttgtaaaaaaaagaaggtcaaggcctttctgattggtgggcttcattttaataaatttaattctgcttaaaatagcttgtggaggtattgtcaaagcagttctcaagtggtcccggtgattgtgggaagtgctttgggtttctttggtagaggaagtctctcctcagtagggattagggcttctaagggagagtacccagttccacttgactagacttatgtggctttatatccactcacaagtcactcagtgaaacgtgatagctcctgacaactgtgcaacgctgataaaaaccaaaataaaggatataagtcaatccgcggcagtgtatgattggtatgtagagtcagtgaattcctcatagaacattgcatttagttttggttttcctctggtatcagtttttttcttataaaaatcaggtagagagaagacatctttgcataatatattttatttctaacttaataaatgtgatgattagaaaggttgttttaaggaataaaattttttgagaataactaatttaaaaatatttgtattttaattcacctgtgttagactttctgtttaaaataagtgcttgttcaatagataatcacaaatttttttctcaagccaaaattggatgcatgcttaaataggtacttactgaattttttctgtaacaggtagagtatatataaaaagtccgtgggggaccagggaggcttgcctctgaacctggcaacctgagttggatctctggaacccgtatggtagaaggaaagaactcagtctagcaagctgtcctctgttctccatagttacaccatggcataagtgtacccagacacccacataataaataaattaatgtaaaaaataaatcaacacaggattataaagtagtccaccttctacagcagtttgtctggatactgtctatagtgtggaaatatttgacagatagatgattcatgttccagacagggctgcatgagagttactcatactacttggagcagtatgcaactgaaagtttctaaccactccttcctagagtaggtatttggagacaggttctttaatataacacagactggatttgaactcatgctcctcctgcctcagtttcctgaaatcccaactacagtgctaccatacctggctgaataattgctttttccctagaatattttatctaatatttcccctaatatatcatttaaccctaggtagctagaaatgcagagtagaaatcaaaaccatgcaaaagtggtaggctatcgtctttgtcagttctttagtctgcatgtctatcaataaaagtaccatctttatatctctaaagccacagaagagacaccacactacaaaaactcccagtgtattgataatgtctgcccacctttatacctgcttcctcgttccccttgactccttggtccgtaatagcacattttctggcttcaggtccttagcacacacacataacttgaggttatttcacttgagttccatgtccatccattttcctggaagtcacagaatcttgttcttcatactgagtaataatgttgtttacataccgcattctttcacctattgtctggcacttagactgagtccatttggcaattgtgaattttacagtaagcttatatctatcttttatatgctgatttcattttctgtttaaaaactcagagatgggaaaatgatatggtagttctatctttaatgtttggaagagcttccatattgtattgcacactgggattatcaatttatgttcctaacaatgtataagggctgcacttccctcaaattctactaactttctgaaaaaataagatcaattttaactgtagtaagtctttatttgcctgataactaaatgaattttttaacagtattgactatttacatttcttcttttgtgtctcttcagattttctcatccttgagctgtttaactgtgtgtgtgtttttttttaagtagttggagtcttatctaggaaatctgcccatgtcagtattctgaaatgttccctcagggtttcctgtagtttcagattaaattttagattgtaaagtgtcttgtccttgtagctggtgtttgtcttctctgtgagttctttttccttccactcttctccacctttcccctaccattttaaccccaacacgagataggattgaaaaaggaaagaaaggaaatggatgacattgtcactcgactacttcctgttgatgagggatcttgagttccttgggacaagtttgatctttgctgtcaggatatctaatgtactcttgtttaacaaacagtgaccaacagtaacaaacctacaacccagcaactgacctcttgggaccctagcagtatatacctaccctctgaaaaatcccgaggtttccacacataacacagtgcagaaattatctgcagttggcaaatcatgcccccgatagagcacaaggcaaatcatgatcatgctggggacagtctggagcagcccacatcccacacctgggattaaaatagtcttacacttctgtgttttcttttaaagaaaccaaaactctcagcagcctttttttttttttttttttttggtagactaagataagggtctagtgttgatatcctatatgtgggtatccagtttttaacacctttgattgcgattgagactcagctaaaaaagtacctgatgagtctacttgtgtttacctggctcatgctcccccttctcccctttttaaatgccagtcccatggtccttttgttacagtggcctcaatattgcctccagtattgctctttgcttaggtatttttggctacttaaagattatttgtgtgcgctcttacatgaattttggtactttttttctagttctacaaattcttgctatgtcactcactgttattatattggccctaatttttttttctttagtggctttttttgtttgtttgttttaaataaaatttggtgctcttccatacttggtgtatataaaattattatatctcattccagttttcttatagctttgaacatgtttttctatatcttataaatttgatgatctactgtgttgatactatttctttattatttctcattgacctatctatttttctagtaggagttattcatgctcagttttgttttgttttgttgttttgttttttgagctttggctgtcctggaactgtctctggagaccaggctggcctcgaactctccatgccattactgcttgtgttcttaatggtgtttactaacttctctggtgagtgtaggattcccttaagcctcatccaagtgcaataatcacagtagttattttctttgaggactgaaatacatcattccatgtcgtccgagcatgtagagtactttctatgaagacttccattggtctaatatatttgcctttaaatcttacttggtgtgtctctctttcagagtgaagtatcccttcttagtcctatacttttaataattcaactataataatttatagttaataatttgtaataatttaactaataaaggagaagtaaatcataaagagcaaatgtaaagcccaaatttctggctcatttgtatacttgagagagaagagttggaggcattgaaagcttcttcaataagataatggcaaactccccaaaatcttgggacaaatgggacaagtccaggcagcatttagacctcaagcacacatggccatgaatatacttcaccatattttatagtatttgctttaatttccatctgtcttagtcagttgtccatccatccatccatccatccagcttgaccaagaactcttgattctcctgcctctttttcccaaagtgctgaaattgtaggcacgcactaccatgcttggtttgcttaatctttagttcatataatctcttacctaagcaaatagaatcccagaattatttaccaagtctgtgtggaagttggtttaaatttcatttccacagccatgaaaattaaagttgtcagctcatttctaagattgaaacctctatgtattcaaatctctctgaaattcagagtctgttcctcagtaggccaggaagctcatctttactcacgttcagtttcataatgggccactctttctctcttctcatgtcatatagtagaagtggcctcttcatttttcttagtattctcagtgcctggcatattataaggaaattagtaattgtctactgacataggactctgaatgtgtctagtcttgtctgatcttgtaagccaatggtcaagtctggttagttcttgggtaggagaaatacacaattcttttgagaaaatgaatgcatttaagtgtgtgagaagaaatgaatgaacacagcaagaagtttcactgaaaatactcgttgtattaatacttgttgtgtaagtgtataaaacagttgtaaacactaacatacaaagacagttttttctttatacaagtaatttggttttctgtgtgattctttgtccttcagtttgctgtacacaatggcatcttagaagtgattgtgtttcttatggatccattgcagtccctctcagcatcctgacttcacattgaaactttgtgcctcaaaacttacctagggatttgcctatctgttcattggatgtttgttttttctttgtggtggtacaaaattctggctgctgtagggttcagcatataattttgaaacaattaagtttaaattatttctacagagaacacatatacatacccacatcataatttgtttatgtcttaaataatttttattgtgcctatttgtaccctttttaatgttttttttttctcccttaaatgtatatgtatatttagatagaaaatcttcaggaacaactaagagataaagaaaagcagatgagcagcttgaaagagcgagtcaagtctctgcaggcggacaccactaacacagacacagctctgacaactttggaggaggctcttgcagataaagtaagtgactggcctgactcttcccagaccttgtgttctgttttctcattatcctagaattggctataactacagaggcaatcctttcacaggagcttccatgctgctgctgtgcatagtataaagtggaaagacagtctagttactcttagatcttagcaccaacttctgggcaagattggttgtataccaaaagaccatagccacatttcctcaagattcagcacgtgtgtcctatttttctgctttctaaaggaaacaaaaattcattatttgattagctagatgtgcaggagattcgacattgatcatcagggtgttataccagactagctctgctctgttgccttcccaccatatgacatattcataaattttattcatgaatgttacatatgtactcattttctagcattggcttactcctaaaataatttttaaattttgcttgtatttgtgtctgaccatcacatgtgtaccttgtgccccaaaggccagagagggcattggatcccctggtactggagttggagacagttgtgagctgccaggtggatgctgggaactgaacctgagtcctctggaagagtggtcagtgcccttaaccactgacccatctctctagcactttggctcatattacattgttttatctttatgagcatacttgacattttaaggaatgaaaaagtggtgagaatgtattttagagaatctctttatggtgttttttttttttgtttcttattgttcattttggagggggtattgttttgtgatgaggtctcatgtggcttaggctagcctcaggctcgctatgtagctccgtgtcttagtcaggttctgtagaggaacaagtgatgaataaatctatcatccatctgtctgtctatatctatatatctatatatcatccatctatataatgaggttttattagagtggcgtacaggctgtggttcaacaatgagggtctaccagtggaaggtccaagaatctggtggttttcagtccacaatgctgaatgtttcaggtggtcttcagtatatgccagaatcctgaagaagaaatggacttgctagtgagagtgagaacaagtaggaaaagagagctagatgtgcccagccatttgggttttagttaattccagatgtagtcaagttggcagccaacactagccattacacacagggtggcctttaactcttgattctcccacctccaagtcccaagtgttggcattaaaaggttatctcatgatgctgtactttctttgagatatttaattggattttttttagaggcataaggcaacatttgttaggtcttttggactcagaatgctttgatctgcttgctaggatgaatgcatgttctctgagtatgtttagaaacattacccagaactatacttaaattgctttagccttcacgcttcctgagtagaagtttaaaattttctatcacttctctatcctcttatctaagatcagtttatcctagctccccctacttttgatatatgggttatgagtaattcctattgttttataggtagtctgtgtcactattattatagtgaagaaatatgtgttattttattgtcctagggacatacacataagtttctagttatttggaaattgaattttaatgaaaatgtttcaagagaatgtgttagtgctatctaatgatatttcaaatgattagaaactgactcttggtatttaaaaataagcaaagttggaaattactggttgcagtaggaaaaatgagttctttgagaactgaatccttgaagggcttaccattgtctttttgatagatgatagtagtgttgagtttgtcagaggaatcagagcatgttcacgatgtaagtacagatgggagcatcctcatgtcttggtgtgctttcttttaggaacggacgattgaacgcttaaaggagcagcgggacagggatgagcgggagaagcaggaggagattgatacctacaaaaaagacctcaaagacctgagagagaaagtcagcctgctacaaggagacctctcagaaaaggaggtgaggctcaccaaattagtcgttgcatgtttatatctgttgctggctgcacagtgcagcacggaggaaagattttcttagtgtcctgtggcaggtgttccagggactcaggaagctgtgagggctacagaagattggctcatttatttcatactcttttactgccttgttctccgttctaagagttggtttctttcttcttcttcttcctttttagttttttttaaattagtattatttatttattttatgtatatgagtacattgcaactgtcttcagacacaccaaaagagagcatcagatcccattacagagggttgtaaaccaccatgtggttgctgggatttgaactcaggacctctggaagagtagtcagtgctcttaacctctgagccatctctgcagcccaagagtgggtttcttatgggatcccaatctatatgcagatcctagaatggctgaagcccagttacatttggagaaacactgctaacagtaaggaaggtgacagaaaaggaggaaatctaaccagaaccactattagaaacatcatagcctataacttgattcacttcgtgagttttgttcttattttttaataatcctatcagaatcacttaagtagctacaaagttcaatgttatgtaatgacaaatccagtaggtctgtctaattactgtagaaagtttgtagaagtaagtttctacaagaacttcctgctaagagagggaaaacatgcatgctcaaatcagtgtagttactgagtttggctacttctgttcttaaagctcattcccctttaccttgggagaataagtgcagtgggttagagccttgttctgtttttgagacagggcctcctgtaattcaggctggccttcaacttctgatcctcctgcctctacctcctgagttctgcagctacaggtgtgttctgtgccttgtttatgtgtagctggagattgaacctaggacgtaatgcctaccaggcaaactctttacctgagtttcatccccaggcgtttttaggactctttattagtactgaggatccacctgcttttaactgatatctgaaagctaagccagtgtctggaagttttatagttcatggatgttcttgaaatggaaacgtccaaatactatgaatatatgttaaaaaaattaaatccacattttatttcacagtatttattgtaactatgccttgcttcttttaggcttctctcttggatatcaaagagcatgcttcttccctggcttcctcaggactcaaaaaggactcgcggctcaagaccctagaaattgctcttgagcagaagaaggaagagtgcctaaaaatggagtcacagttgaaaaaggttgaagaaaaagttaccattattgtttttctttacataggaacactgtagatagctctgagtgccttttttttttctttttctttttttaaagttaaggatttatagtgacaatatagaatttagagttatttttattttttattgttttaaggtattgcagttataaccaaatacctaagataaacagtactgaagtaggaaaagatttatttagctttgtagtttgaaaagttacagtccaaggttagatgattccaatgcttctagtgtttagtgaggcagaacatcctggccaccaggaaagcagcagatagaagcgagtacaaagtgttcatctcagatcgtgtccttagtgatctgcttcctctgctgagatcccacctctcagtctgacccctcagcggtgccatcacagtgtggttcagggattaacccacagatttggtcagatgtgctgtctcgtttccaatcaccccagtaatgaacactggcacatcaagcttcagcacacggaggaggaagactttgatctcggggatggggtgggggtggggtggcttctagaaggttcctgcagactgcgctttgctgtttctctttccctttgctcataccattctgtagttttcagtcactccaattaggctagacatttgatagtgaattaacatcctggcttgttactagaatcatttttgaagtctgtgctattttaacagttccataatacatattgtacattttgattactgtcaccttctctcccattttcattttttttacatgccccccaagtccctttcttgaattcagcttttgttgttgtaattgttgctgttgttttttgtttcttgtatgacactgagtttaaagccaggtgtcttagtttacgttctgttgctgtgataaacaccttggccacaaacaacatgaggaggaaagggtttatttcgaaaagcttacagttcaccatgatgagcaatgagggcaggaactgaggcagaggttatggaaggatggttgatctccatggcttattatacaaccatctgcccagggtggcactgcccacatggggtgagcctcgccacatcaagaattagttaataaagtactccatagactgtagacagcctgatggaggcaatctctcaattgagatttcttcttcctagacgcttttaacttgtgttaagttaataaaaacaaaccagcacagcagggctgtgtgaccatggtttggtgttaatgagtggaacatgttgagctcatcagtgctgaccacagtgtttgccactcacctgaaatctattcagtagatcatagtatagcaggatggactaggaccacataggaccctccacaattcccagttgactgttgacagcagtcccatctcctggaagcctactgctgtcagccacatgagatcatgactacatcatgcccgcaaggtagcatttttcctgcatatgtctcacccttacattcttaataccttctcttcagttatgctcccttagcccgagagggagtggtatatgttgttgagggctgagcactaaaccatcaccttttcttagtatcttgagcaaccatgagtcttttgcattttgccatttctcattccaaagacaacattatctgattaagacagagagtaatatacatgggtataattatagatatttagaaagcagcttggcactatttcaacttagctaaagaccagcactaagttaccccttaaataatactaaaaccctagttgttttaattgtgtttatagcattagaaatgttaatacttattgtgtagtgggcccccaaactaatgatggagttcttggttgtccccataacagtagtgtcactattgcaccgggggtggggggtgtatcttgcctggcaagtggtgttaaagttcatcgggttcttagctagagaagagcattgctttttctcccttagtagcatgcagtgcaccatccttgctatgaaagggggctagtagagaggacactttcagctcagttctggtttgtttgtatcccttttacttctttctcttattgctgtgtccaggacttcaagtactatattgaattttaatgtagagtggacacttttgtcctatttctgattatattgagaatgctttgagtttttcccccacacaggatcatattgtttatgtttcccatatatagttcttactaggttgagacaagtatttcctatacctagtgtattaagaatttttatcaggaggggatgttggatcttgtttaacactattttgaatcttttgagatgatttctcctctgttcacagtatttttatgtttgtttgcatttattgttttatttaccgagacagggagggtctctatagactttgctggccagtaacttgtttttgtacctgtgcctctgccttctgagtgttagaatttcaagtgtgtgcttcctgtcttaggtttacatcttgaattaaatatgctactctatttgcaaagttgactagttcacttattaagatatattctcatgacgttcccatgacgttccaactacctccgcctgtcgagtgcttactgggatgtatgctaccatgtcagctttaaaattgttttaaataagtgttcctaccattggcttggtaaatctctttttttgagtttgtgtgtatatatagatattaaagttgtaaaggtctttaatgtgatttaatattcttggaattccattttaaagtataagtgaactcagcagagtttagatataaaagcctgacacagaatttgctatgatagtaagtgaaggttcatgcttgtagcaactttcttctctttttccttctcctcttcatcaccttcctcttcctcctctttcttctcttcctcctcctcttccttctcttcatcaccttcctctttctcctctttcttctcttcctcctcctcttccttctcttcatcaccttcctttttctcctctttcttctcttcctcctcctcttccttctcttcatcttctccctcattctcctcctcttcctctttcttgtcttcttccttctcgtcctccttctctccctttcttctctccctcccctgctcctcctcttttttccttctatcttcttcttggggagttttctatacaagggtctctgtgaagccttagctgccttaaaactcactctgtagaccaggctggcctcaaactcacagagatccatctgcttctgtttcttgagtgctaggattaaaggtgtgtgtgtcccctgcccggcagattgattttcttaatgtttatttcttgtggatcattggctcctgagttatatttaactttgcacttctgtttagttacttgtcattcctctcctcttccccagttattcttcttttcctactattcattcctatggactgtatttttttttttttttttttttttgagtttttgagacagggtttctctgtgtctccttggctgtcctggaactcactctgtagaccagattggcctcgaactcagaaacccacctgcctctgcttcccaagcgctgggattaaaggtgtgcgccaccactgcctggtggactgtattatttttatttgactttaaaggtatattttaaagatttactattagggctggaggaatggctcagcagcatgtattgctctttcagaggactgaggtttgatttccaacacccacatcaagcagctttcagctatttgtaattccagttccagagatccagtgcctctggcctccgtgggcacctacattcacatgcacaaactggcgcgagagcgcgcacgtgcacgcacgcgcacacacacacacacacacacacacacacgattaaaattttttaacaagttttattattattattaatgtatatgcttgtgtatcagagcttactggaaactgaattctagtcctttggaagagcagctagaggatttagctactgagtcatcttatatgctttttgactgttttaaatcaatagaaattatcttgagtgtcatcttatatgccttttttctgttttaaattgaaattatcgtgagtgtattatacagactcatttgttcagtgattgagtttctgtcctatgtcagttaacagaatggataatgaggatgtggtgacagacaatatagaactgcccatagtcttcagagaattaatagtttctgttagggaaaatagacacttagccagcaaagtcaagtaagtcacatggtccagggtgcagagaagctatccatggaactgacacttaactaactggtgacctcagagtgagggtattctaccatgtgcgaacctagcacactgactggtatttatactacaaacaatagccatagttaaatgtaattggatttatctcaggcattgattagaagctgctgttttttgtcttttgtgactcccctcccccaaacctctttgtttcctatttcctatttatttgtgtgtgtgtgtgtgtgtgtgtgtgtgtgtgtgcatgtgtgtgtgtgtgcatgtgtgtagtggggatgtttttattcatttttgcttttgtttgcatcttcagtttctttttcttcttcttgatatatagatatgatgaacagtctgtgaaatagctcctgtcctctttcttgctgttagacactctatattaacagagtcactgtagctttctccagtccatgagagaatgatcaagaaaggaatttccctccttctttaattacataaacaatgtgaaacaaacagatttcagtaggttggagaacagtgatctctttttactcctcaacaatgcatagttgtttctgattacattaaaggacagatagtgagtgttgtagaaagtaaaacacttcccccactgggaatggaacctggaatagactcgatgaagcattcactctcagaaatgtaaataatatttttatgacttaatttacacaacatgttctcattttcttagactactttgtatcatatttttctaaaatgttttctgaagaatttaatattgttgaaatatttaaagagattaatatatttttctgcttattcaataagaaaaaaatgaatgttttttgtctttatcttctcgttcagtgccttctttatatacatgtggctttagacatttgggagaaaggatatttcaggttgctttgagccatttgaagcttggtcttgagctggtagtactgttttggcaggtacagcagcttttaaagtgaagtctggatggtaggagtaggtcactgagcccttagggttagccaggttgtacttctacctgagctctctgcttcctatctgtccccaacatgtaatggggcctgctgagtactctcagctcacactaccatggctggagccccaatgctggtccttccccatgataaactttacctttaaccaccagtggaaacaccccctcttccctcaagtttcttcttttcaggaattctttacggtaacaagaaaattacaagtaattgcttggaaattaattttaaattaaggaaattttagtatactcgaaagtttattgacattattggctgcattttccaacagaaccctgaacaatatattgtcttagttcttagagtgagtcttgctttttaccttctgattgtcagtcccaggtttcttgtaaaattctgaattttttgctttagtaaaatacacttgagagtagctgtttctctttgtttgtttgtttatgttgttttcaaaacaacttactatgtagctttggctgtcttggaactcactgtgtacatcaggctggctttgaaatcacagagctccacctgctccaagtactaggattaaagtgttagccatatgcccagttaggtttctgttctctttacctcgctccattttcccagcatcagttatatccgttgattctgaacagtgtaggtcatatgatttatgtgtttggtcaagctacgtaaagagaaggaaatgcggttagggcctattggactaagtctcaccgttgatataagaggagtgagatcaggattcagagccctcccatgccttcttcattagtctcactctaaagcatcagttgggttatgatgattttgggcctcataataaatattccaaggtaaaatagcattttaaaagaaatccatttgtaaactactagtattttcactatgtgatccatgagtagagagaagccatttaaatagttgataacactattggcattgaaatagaaatagttctttgggtgtggattacctacttccaatgttcggactttgaaaacttttttttttttttttttttgggtaggcgcatgaagcaacattggaagccagagccagtccagagatgagtgaccgaatacagcaattggagagagagatttccaggtacaaagatgaatccagcaaggcccaaacagaagttgaccgtctcttggaaatcttgaaagaagtggaaaatgagaagaatgacaaagataagaagatagctgagttggaaaggtaaggaaggggggctaagcagtgctcgctgggcagcgaccatgttctacctcttctgaagcagcgttttcagttgcatgtacagtggagctactgtgttacccacttactctcccaagtcagtgtgaagcctgggctacggtccctaaaggatgacacgggatagggataaagtgagaaactaccacttgaacatcatcgacaagagaacacatttattgctgaagggcccagtttcctcctagctatgttctagagagtccaaagagatccttggctttattattgctttgtgtaatgagtgagtggttctcaagtttcaaaagttgttgagctcgtactcttttgggctgtgaatttttagaatggataatttagagcatgggaaagcaaatcatgtcagttttaaattagaagggacagtgtgatgctaatgtaggagacttataggtgagtcttaccaggttttaagtttgaaatcttcacagtgagttgtatttgaacagatcttgacagagatagctctcttggaatattgcttttcttttatattgaagatcaagcatatagtcttattaccttttccttttatatggtctatttaacataatatcccaaatacacagaaacaccttttccagtagaacttcggagtcaccatattcttctagacacctagaagtcactaattcgtatagattttgaaaaaaatgtttaaggaataatttattttcttgaaagctagaaaaagtttctgacagcatctttaaattatttactaaagtttaaattttggagttagtagtagggttaatattttcctttcaagttactatttcttctattccacgtttgtagactttgattccttcagtgaaccaaaaatgcaaataatagggtttctcattcctgcctatacattttggtttggttaactatatattctgtagttcttgataagatttatttatttttatgtgtaccagtgttttgtcttcatgtacgtgtatgcactgtgtgtgtgtgcctggtgcccttggaggtcagaagaggttgttggatcccctgggagtagagttcgaaatgattgtaagtggactggaaagatggctcagaggttaagagcactggcttttcttccagaggtcctgagttcaatttccagcaaccacatggtggctcacaaccatctacactgaggtctggtgccctcttctggcctcaagcagaatactgtattacatattaagtaaataaatcttaaaaaaaaaaaaaaacgattgtgagccaccatatggattccaggaatccaacctgggtcttctgggagagcaaccattgcttttatccattgaaccttatctccagcccctttgataaaattcatttaatcaatcttgtaagaatatagattgtgtgcattttccttcatgttggtcttttcacatctcctttgccatagcatgtttgtatgtacacacttacatactttttgaggagcttgaaatcatcagtactgcacttgcactaagatgccatacttttgaagaatgttatcctactgtttcaacaaagacatttctgaataatattcctttcttgtttgatttttttaaattgaaagacttcatttgaagttattgttttctgttgtatgcagctagctttaaaaatgattcatttttagcttaatactgtgtgtgtgtgtgatggacacgttgcgaaagaaaataagaagtagggctaagttaaacatagaagattgaaaattaggaacactgtgtgagagggaatgtgtgaggtgtttgtctttctaaatctgatgtcctcacttagtatttctccagtctcatccattctctgcatttcatgattcccttttccttatagctgagtactgttctgttgtatctgccacatcttccttacccattaatcaggtgatgggcatctaggttaattccatttcctagctattggaaataaagctgcaatgaacgtgagtgtgcaagcatctctaccataggacgtaaggtccttcaggtccatgccttcgagtgggatgagtgggtcatgtggtagctttaaatgatctgcttcttccgcgacttcattttttaatacattggaatacattgtataattagatagaggtgtccattctttggtcatacaactttgtaatattgtttgaagactacaaaatttcttgcttacaaacagctaccaccatcaccaggaccatgaccacaaccaccacatactcaaaaaacttcaaagtaacaaaatcccagcccaattggtcttgcctcagccctctttggtcagaatacttattgaaggcttctcatctcgatgggaattgtctctgtgcttatatttaacccagtatcttgagcagaagtggctttgtactgtatcacggtttgctgagaaactaaggtagattttatttcctttcagttttggattccatttttataaactgagcagggcttgtttttggagttggtccatgtactctctctgagatagctggggttatttcagtctttgttcccagacttagtgctggagagtgtgcctgtggctgttgtatctgactgaggtttgcttcttgtatggcccttcctttgtttcctatatgtttttcttttgtttgttttatcctgttcctgttccgctggggtttatgtatcttaatgttgcaatgtgcatgttctctctgtatcactgccattctcagatagccagtcttccataaataatgctgccatcaccaggtttctgtgtctgcatcgttctgggttaagtgtgtgtatgtaaggctcagtcttctgagcaattgttgctcctgttgctggattttacttgatcacaattacagccatcaatttgagctatacctcttatatgctctctgctttaaatacaaccagcctgcgctctctcttgctaggttctatgtgctagtatattgcacatagttagttttttttctctctcttgcacaagaatctttgaggttgatgtttctatgttgggacacttgtatttggagacacgatctcatgtagtccaaattggtcataaacttgctgtgtagctatgactttctgattcttctgcctctatttcttgtgtgttgggagtatagttgtatgccattcctggtttatgtagtgttagaaactgatcctggggctttgtgcatattaaaaaaaaatcagtctgccatttgagttgcatatccattgtgggatactcttttaagtagcccctgatagatctgcaattccatcttgtactttagcatgtacaatttacttctagaaggtattcaacactgtttaaactgatgaaatttaaacaaaagaaaattctttgattttcgtattacttctttaactttaaaaagttatcagaattattctttgtggatgaaggtaataaatgaacagttcctttcccatgttggttcttaagaaaattgttgtgtttcttagaagatgtattaatgggattctttcgatttagtgtagtaacactctttgaccaactacagtttttccagttgaaactaatcacttaccagttcactttcaataagagaaatgaaggtgtcataggaacaagaggggtagatattaaaaaaagagattgtcttacatgtttgtgatgattttagaggctggttaagcaagtctgaaatctagttccaggaatggaggtttataatctggatggcatttgtagaggcacaagccaaagcagggctcctttgtctctcatgtaacctcagccctgtttccaacacctaaataattcatcgtgttcactcaggtaatatcccctagtatagtgactagtgtgtgtgtatgtgtgtgtctgtgtgtgtgcacatgtcatacatggttacacccatgtgtgccagagttcaatgtcaggtgctttcctcaatcactcttcaccttattttatgtgactttttattttatctcatcgaacctgaagctctctggtcagctggcctcactggccagaaagccccaggatctgtgctctggccctcatgtttgcatagcaagcactttgctggctcgctgtggccttggcgagttaatgttcatggaaaccaccattcagtggctatggatagtctccatagagaaaacaaagtgaagaataagatgtcctagtctgaataaatagatttagattacctcatgcttttcctctccattgctgtgataaagcacccatccaaaccagcttggtgcggaaagtgtttatttggctccctcttccaccccatagttcatcattgagggaagccagggcaggaagtcaagcaggaacctggaggcagaaactgaagtagagatatatcaaagaggaacactgctttctggcttgctctcaggtggctcagtttccattcttatacagtctagggccacctgcttgggggtgctactggccacagttggctgagttttctcatgtcaatcattaatcaagaaaatgccttacaaacatgtctataggctaatctggtagaggtaattcttcagtgaagattccctcttcccaggtaattctagtctgtgtcacatttggaaaaaaccacccagcatacctctggaaactgaatactgctactaaaaatgtgtcttctatacttagcatattagtttccatatagatctataaataataggcttgtctatggcatttcatgccagctcacatctagtgtctcttggtcaatctcttggtcctactctttccctactccttccactctgtggtctctccaagtcctagcactgggtctgctctccagctctgcccacttaagggatgtgaaagctgatccagccatgtttgttgtggaatatgacttgaaatttgccaagatgtcctgtccaccctatacctgggtttgcccagaatatcatttttaggttatagacaacttattaggatttagcttcctggatatttttgtctctgactagagaggaagaatatatatctgtgacctcagaggcgtgttcccacatcctagcacagtgtccccactcacttaccctgctacctctttaatagaattgacagtaaaaacaatctctagttttcagccacacagagctggctttcagttgaccccagcacatgtggaagtcataggtcatcttcccttttgctctctaataattttagttttttgagaccaggaaagtcttccatcaaacctgaggctccaaatttgggccagggtggttagctgatgacatgcctgtttctgttcacaaacaatgcggttacagatgtgtgtcagtattcttagctcttacaagggcgctagtgatatgaactcagaccctcttgcttgtgcagcaagcttcttacccaccgagtcatttcccaagtacccaccttctttatttgagtctgagtctctttgaagccctccgcaggctttgaactcttgatcttcctgcctcaaaactacaggtgtgaaccactggcttctttttctcccctcccctccccctcccctccccctcctctccccctcccctcccccctcccctccccttcccacctcccctccccctcccctctcccctcccctcccctcctaaattgttgatcacacatgaaattttattcatttacttatttactttttggtcagatgtgaagataaagattcagtccaccatggcagggagccagggtagtatgagaggttgttcacgttgcattggcatttatagagctgatagaaagaaatattgattctttgctttcttttccattttaaaaaaacatccttctgctgaaggggtttgcagccccataggaggaacaacaatatgaaccaaccagtacccccagagctcccagggactaaaccaccaaccaaagagcacacatggttgggactcatggctctagcttcatgtgtagcagaggatggcctagtaggacatcaatgggaggagaggccctttgtcctatgaaggatctatgccccagtgtgggggaatgccagggccaggaagcaggagtgggtgggttggtgagcaagggaagaggggtttacatagggggaagggtgtttttcagaggggaaaccaggaaagggtataacatgtgaaatgtaaataaagaaaatatcaaaaaaaaaagcatccttccttccttctttccttcttttcatcttttcttttttttcagtctgtaactctaacctatggatagatctttccttttcagctaaacctttcctcacaaacatgactgtaaatctaatcacattgacaataaagattaactactatcatatgtctactcccttgtcagtttaagtatatatttaaaatcagaatgttccatccctgttcttcaaaggctcatgaatatctcacaatgcaggatacttttattttacctatactaatgaccaaaatctcaatagttctaatattgctcaaaagtcctatgtccaaagggcaaggtagctcagtggacaaaggctgccaagcctggcaacccgagtgagaccccaggatccaatggtagagggagagacttctgccagttgtctttcttcctccatacatgtgctatggcacacacatgtgcacacatagacagacatacacgaatattttttaatgaaccaaaactaactataaagccccttgaacgtaatatgggaagatggactaaagtaacactgaaacccatttgcacaaacaccagatgttacagttctatttgttgctggcttgtgatggaatcattgggactcccacagccttaggtagccccacccttagcacccctactcccctaactacactctgcctatagctttcctcagtctaagtctcacaatcctggcatcttagatgtcttggagtctccattctaacttgcttcctacctatatagcttcctcctttgtccttttaaggtccttctgcaggcagtccaactctgctgtatactgtccatcctcagtgtttctctggcatcttagtgcaagcctctaggacactacctcacttgaattttgtttgcctggaagccacatggacagtgatgccaagttctgctgcacggacaatgtgtagctcatccatggctctaacgcttctgtgttttggcagctgagcctgggaaaccatttccctaggtagctgttattcagtccttttatttccactctcagttcagtctcctccttcaaatgaatgcatttttgcaagctctggagccttagatagtgaggtcttatcctcagggaacctttcctattgtttaggtatgaatttgaggttttttccttaggtgcattaatcactttaataattgcacctacttcctccactctcatcttgtctgtaactttgaactcacttatgtttctttccttgcctaagtgcatatatttaagaaatatattcccatatatttttgctctgttttactgtaaatatgaggaaatcagtctatattttatgtgatcttgaaatttctggcaaacagcttagtccattacttttgaattcactctcactttagtgtatatgacatggtggaacacaagaaatttatttttgccagaatatgagtgggttaaagcccactctttgatagtcgtaatttccccctgaaaccttttctgccaggcctttactgtttgcatttctattggcatctgggtcttccaaactcttaccagaatggcccattaatcttggcttacattctgggaccccgctaagcatcctgcttcaaactctcccacattactctcacaagtcagctccaaacgctaaagcaccacatggtcaggtttattacatcaacagccccacgccttggtagcaatttactgtatcagttacttagctgtggtaaccagatttcttacaagaagcaatttaaaggaagaaggatttattttggctcctggtttgagagtgtagttcatcatggtgggaaggcattgtggtggaaatgagaggcagttggttccaatgtgtctgcctttaggaggaagagagagatgaatgctctgcttttgattcttaaagtaaaaattaggtcatgaaaacaatcatggtgacattgggcactataaatcttaactgcggaggaagtagtactgacttccctcacactgactacttttcagaaaaagaaacctgcctattatcaaaggcagtgatgactcagaacatttgttcatggagggctgttaaacatggctattttgtaggtcttaatgctggacaatgttgcaaatgggattttttaaatagagccattcttgttcattattgttgttagattgtttttactcaaagactttagcagatttgaaatgattaatatgagttatgattaaggaaagtttgactttgagaatttttttttcaaattcttttaaggatattagttttataatctaagaagaacaggagctgtcagtcttggggtttttcccccattttggtgacccaagtcctcttcatgaaataggatgttgagggagaaaccagacttaagggggagtgtaaaaaactcaactgactgaatgctgatgtctcatataaaacctctaatggcagtgccagcaagccggctcagctggtaaaggtacttgccaccaaccctgataacctgagtttgatcctcggaaacccacatggtagaatgagaatagactcctacaagttgtcctgtgactttcatacacatgtcatagcatgtttacatatgcctacacacatacatacaaaataattacatgaatttaaaagccaacccacaactaattccagttttagctgtttaaatgacagaattgacaatatccatccccatttaagaaatttgctctcctttccccaagaaatggtcaatgttggacaaacgttttaaaagagttttcatcaaagtattaaactctaataggaaatgtatccgttgcgatctcaaattctaatttctagctcctgtgaagaatctgcatgcccccgtcctctttactccgtgttttagccttaccccattcataaacgttagcatttttaagtattgtccttattaattctttctaactttctctttcacgttttcttcctggatttgctgttctcttcagtctcacctcaaggtcagtatgcttgctaaaaatgtacaattacaaagagaatgtaattgaggctcatttactaaccttattttccattccaataaggactaaaatgatagaatgtatttcaggaaagtgatgcccatatctagttctgagcatacaaaatgtcaagaaagtaagctttgcatagcagcaaatgcaaacttttgttctttggaagatatgagaatgttcaggatgcaggactgagtggggttttactgaaagaactgaagatgtaaggagccaccaggggatagatagcacgggagagcttgttcatcttgatagcactttactagcagtgccttgggtaagaacttaagcagggtgaaaggaataataatgatgtaaattgaagtaaaaaagtatgatagagttaaaatataagcttgtttatgtcatatacattacctagcaattttcttgtcataataattaagtgatatgttgttcttatttatgaaagtgcccatctcttgatacttagtggctagcagtaggcaggggaggttgttattctcatggggaagtaggcacaaagaaatgattgccctgggttcaggcagccaaataacaatatttagctgtgaccttttgctttaggtttgatttttcccagacagggtatttaagtaggtaacccatattggttttacatttctgatcttcctgtctctttatgttatatgaactacagattgaaaagtaatcccagattatttgggctttcataggcttctgatgtgtaagttttgctctataaaattgggatgattatcacatgtaaagattaaatgagttactctaagtagcactagagcgtagggcacagggaaaatggtcttgttttcttggcattttctcacaagtacttagacttcccacaagactacattcttggattatgttccaaaatcaacccaattgctttttatttcactttgatatttgatttgttgtcagctttcttcactgttgtttgcttctgtcctctgttagtagtagagatcataacctgaaggaaaactacccattgagtgggggaaataaacttgtaaaaaccttcctatctcttcacataataaaatagaaacacaaaaacagtggaaaagcaagctagtagaaagctcccaacgcctgtagctcctcagtggctgcaaccaaagataataaaatagtgggatcccaaagaattcaaaataccacagctagaaatttaaagaagattcaaaaagcaaatgaatgaggtaaggaaatatatttggtatctacaagaacaccagtggtatggatgagaaattgaaaaacatagtgagaaaattgagattttcaaaaaagagaatggaaaaaagaactaaataaaaaatgcagtggaaagttttatcagcatacagtgtcatgttgagaaaaatatcagtattagaacacaagacaatagcagccaagaactttgggccatgaataagaaagcaaccaaatgaatccatttgctagaaaagtaaactgagaaaaaaaattgaggcatagaataaacatttagttaaataatatgagaagatttttacattgagggaaaaatacagacataagatatttagagcctcaggtacacacaaccagaagaaaaccatgccaggagatgccctagttaaatgtgaaaactgcagagcaagggaagttattgaaagcttccagagaaaagcacaattcatgtacaaagacaaattcactgggataatttcagagtttccaacagaaaccctaaaagctaggaaggcataaaattctgttctttaaatcctgaaaataattgtcagacaaaattatatatttgctaaatacatatcttttaattgatggagagataaagacttttcaagatgagcagaaatgaaagcaattaatgatcacaaaactagcactataaaaagtacttaaaggaattctatacacaagaggaagaaaggggagagagtcgcagctctagaatacagcagtaaataagtctggtgagaggactagagtagcaaataagaactagaaaagaatcaaacatatccatctaagtaaaccagtattcacctaaggtaaacctccttgtgctctgctagcaaattttatgtcagcttgacgtaagttagagtcatttgggaagaaggaatcttacttgaagaaaggccaccaccagattggcctaatgggggattttcttgattgatgattgatgcaggaaggccaagcttattgcagatcatgcatctcttagactggtggtcctggatactgtaagaaagaagtcagagtaagtcatgaagaataagccagtaagcagcacccctccatgatttctatgatctctgcttcagtttctgcctccaggtgcctgcccctgacttttcttagttttagactgttacctagacatttaagatgaagtaaactatcccccacaagttgttttaggtcgtactgtttatcacaaaacagaaactaaaataccaaccaagaaaataatcatcaaaattacagaagccagcaaatattcttttagtagtaccccgaatattaacgctcccagttccacaggaaaaagactgtaaaccaatgagtgaatcaaaattcaagagccaagtactagagggatgattcagcagttcagagtacatgctcctcttgcaaaggactcaggtcccattccaagcactggtgtggtggtttacaattttagataatttcagttccaagggatttgataatgttatctgggctctacatgcacttaacacatatgtgctgtatataaataaatgaatgtaaaaacccatacacataaaaagaaaatttaactcctctctccttaatataaagaaattaaaatcaagcaagcccttcattgtttacaagaggtggaccttattggccaaattatacacagaatataagttaaagaatagaaagttataagtatgcaaagtgattagcaggaaatggacaaaaatcgccattctatttatttatttatttatttatttaatcaatcaatcaatcagtcaatctacatttcaagtcttatccctttacctggtaccccccactctcagaacccccctataccatccccttccccctgcttctatgatcgtgttcctccacccaacccaccgcctcccacctctccgccctcagttcccttacactgggacatctattacaccttcataggacctctccacccattgatgtctgacaaggccatcctctgctacatatgcagctggagccatgtgtactccttggttggtagcttagtccctgggagctctgggggtttctggttggttgatattgttgttcttcctatggggttgcaaatcccttcagctccttcagtcctttctctaactcctccattgtggattccgtgctcagtgcaatggttgactgtgagcatctgatcctgtatttgtcaggccctagtagggcctctcaggagacagtgatatcaggctcctttccgcaagcatttcttagcatccacaatagtgttggagtttggtaactgtgtctgggatgaatccccaggtgtgacagtctctgggtggcctttccttcagtcttatatctgacaaagtagatttcaagcccaagttagaagagataaaaataagttactacttatttatatatcaaagatgatgatataatgattacaaatatagagtgttgatgtgcttagtttcataaaacaaatatcgttggacatacagggatagttggttccagacaagggcagagggagggacaaggaaatgctaagggggcagggagagagagaattataaaagtaagtataaaattaaaaagtatacagaagataataaggatagattctcatgaaacttgaagaattgttagtgaatactttgaaagcctatatcacgtaaactggagagtctgttgatggttaaggttctgtacacagaatacctaccagaggtaatccagtagcatgtatacacaactgggacatctgtagtgtgcactgatgctggagtcatgatggagtatctcaagtaagaagctaccagataatgaaatatctactagacagttgaagttaaggttttctgcattttcaccctcccacacacacattgattaccactctggctgcattgtgctgattctgagcttcttctaagctattaattactgccactgtgtccttccagctgccattaatgatcatctgctaggaccttctcagctgtgactgttgtctgatatgtatgtgacccatacctgggagaagacatggtagtcagatgacttacttattggtggaaatacctctgctgaagtctgagggcagagtttcagaaaatacagtaatcactggctggatagtgtcaggaaccatcatctgttggaaaaaagcttgcaaaagagacagacaagaagtacctcaaagattatattaattcacccaaaaagcctaacacaaagacttagagggtaagaagggcagaactttttatgtcaggtgattcagaaaaaatcaaacacatttgtgctaactttagcaactgccatgtatttttattggttaaaacataatccaagccgggcatggtggcgcacacctttaatcccagcacttgggaggcagaggcaggcggatttcaaggccagcctggtctacaaagtgagttccaggacagccagagctatgcaaagaaaccctgtcttgaaaaaacaaacaacaataacaacaaaacaaaaaaacaaaaaacaaaaaacaacccccccccccccatgaatccagatagcatgtttgctcttctggactaccatgagggtggtgtgactccatataggattttcttatttttatttgtttttaattgagacaaggtttcattctgtagtctgatctggaactcactatgtagaatgggctgacctagaacagacagagatctgcctgcctctgtcttttttgtgctgggattaaaggggttcaccatcatgcccagtcagatatgattttctgttaaggatcatttagaaatggaaaaatgttagtgaactgtaaaatttctttggattttttttgatcaccagcctgcatagctggctgcaacttgtcatttctagaacactaggctagttgatctcttcattttgatcatgatttatttggaatggagacattgtttcttaaaggacaaaataatgtcatgcttctccactaaaaataagtgtgtttaaacttagtaaaaaaaagatgaacatcagtgctttccaattcgttctatgaatcagaaaaccaaagaacactagcagccttattttatgaagttatttcttacactgaaccaaatctagataaggacagaacaggaaaagcgactatagtagtgtctggagcaatgggtcggtgggtaaaagagctgatggcacaagcatgctgatctgagtgtgatcatcagagtccacagtggacaaagacacccagctttcagaagtagccttctgagctccacctctacccaacagtaaggggatgcacatgcacagacacacggataaagaatggttttaagaaaagaaaattagccagacagtggtggggcatgcctttaaacccagcacttgtgaggcagaggcaggcagatttctgagttcgaggccagcctggtctccagagtgagttccaggacagccagggctacacagagaaaccctgtcttgaaaagccaaagaaaaaagaaaaaaaaaagaaaagaaaattatagagcagtttccttactaaatatgaactcaaaaattcttaatagaaatcttaaaaccatattcagcagtatcttaaaagttcatttcctgggaacaaattggcttgcttccagggatggctgggtgattggcatgtatataggctttattacattgaggcatttctttctattcctagtttctcagggtggggatccactatcatgtaagaatgctgaatgtttataaagattgttttctgcaccaactgaaataatcatgtaagtctacatgctatatgtattgatttccggagattcagattcagtactacaaaatctgtggccggaattatgtcagtatatccaattttggctttagactctaggaaggcattttcttctaaaaaccattttatttactttgtgtgtgtgtgtgtgtgtgtgtgtgtgtgtgtgtgtgtgtgtaagggctttagcagcctggtggcaaacatctgtatctgctaggccatcttgctggttctcagaaaccacggtcaacaggttaggtaagggcatgtacatagatcaccctaacgcagagacaaatgcacaaggagatttttactggtatggtagttaggaggccaacagtagttatggcttaataaaaggacccagttaagttttggttttaagaggtagggagttggggcaataatagcaaacatagggcacagccacagtgtgggaaattggcatcttataaattctttggtcccagggatcatggagaataaacatgtatttccttcatctctttgtgtttgaccttcttaggcttctgtttgctcccatcatgtgatagtgcagagttatgtctgtcagtgattatctcactgtttattgtcatcctgagaaatgatcagttgtgacttttaataaaggatatcatattagtcacactcacttcttttctgcttgaaaaatgataaaagatatgcatttacctaaatttaactcaggttaatccaagtataactgaagtccgagttttaaaaaaattcttacaaaactattggaattctttttttcctagtacattatggattttctaacatgtttggattttcttgtatgctaagatttaagcaaaattatttactgtttagtttgtaggggggaaaaaagaatgaaaatattccacagttcttacgtttcataatatatatttctacatatctattcaattaaatgccttctatttcgctaacatattgtgaagttgggttttatgtaccatactaagaaagtaagtgaaaagggtgtttagtgaggcagaaaactccatgggctctcctcggttgtcgttactttgggatacgctgtgtttacatacgcccatgctcactctcaccgtgcatacaagccaaggcgggaaaggtcagtggagagagatgtcaggtaatgcttattcttagtctttagaatgcaacagcaatggacgcaaactaaaacaaagggtactgagaatgaaaatagggaaccatgtggagatgtggactgcatccgaccattaagatgtaactagcttatagttagaaagaagttaaaaatcatttgtttagacaatcaagaaaaagactcataaagacaaaagcagacacccgatcttttgacatcttccttgtgtgtgcatgaacagtcatgtttgggcacattctctgtgttgcaagaactttttaacacttttttgagttaataaagtcatatgaatgttatagcaagtattttgaaaatcagaatgtaagtattttttaaaacatacataaatgaggtatagggtaggttagattatgagcaatggatttcttaaatcttgttctgaaattgaaaactgtgacctagttctgtgttgtaaggagtaaatttattttcttttactttaagatataattatgattttaaaaagtgctgaaaagtagcgtagcttcgattggatcagacattcggcctgtaattatgcctttaaccaaaaactaatctagtggtcttaagtgggttccttattttgtgtgtcacaatgccttcaataactaggtcttgctacagacatcactagctgcccgcgccatctggaataactcagataaaaagtgagaggaatttatgtatataatatgtgaaaagtctaagaagagttttgaaaataagctgtaccactcataaaaactgaactattcttagtttctttgacttttctaatgtgaagtctccaatctcgttgttgttattaattggtagactactatattttggagatgctaaaacaaaattatgaagttggaaaatcaaatgtaaatgttatctttatttcctttgatggtgatgtttttattgtgttgtctgtggcagatacctgtaaatacctcatatgacaaagtgaagcgttgtcttttcagtggtttgaattctaccacaggacaccttttatcttgttgtcagtgcctttcgtgcagcgtttcctcttgactcctctccctcagcagacgttacctcctcacgcgcagagcttcccaaagggggtggctctgtaagctctctcctccccatgatgcatgctgataggtaggcctactttttattttgaggcagagtctcactaagttgtccttgctgaccttgaacccactctgttgtcaggcaggctctgacttgggatccttcctgctcagctggatggcaggcccgcacagttcttaaaggatatactggttcagggtcttactatagagtagaaactgtcctgagattcactatgtaagccagattggtctcaagcttgtgacctgttctttcatctcagcctctaggctgctcatgtggtactgtttttaggttttttgaggatctgccaaaaaaatttccatagtggttacttcagtaccaggattctgttttgtccacatcctcgccaacacttgctatctgttgtttttttattatagccattacaagagatgatatattataagaggtgctacttgtaggcttgatttgcattttttataatgttgaatgtgttttcctacgtagatacagttattcctttgtctatagaacattttccccatataaaaattggtggtttttttttttttttttggtttttcaagacagggtttctctgtgtagccctggctatcctggaattcactatgtagaccaggctgggctcgaactcagaaatctgcctgcttctgaagtgcttggactaaaggtgtgcgccaccgctgcccagctgcattttctataaaatgttaagtcttttgttcattttaccacacacctccaacctccaaccccaccttctttaagttggttgcttttgtatattgtttggactggtcttgtactcacatcatttttagacttcagcctccatgaagctagcacgtgtatgcaatcgtccgatatcctttccccattctttactttttttctcttagtgaaatgaactgtttttcactaaattgtatattaactccttatcaggcttgttttctggtttgcaaatattttctgcctttctgtctataagattctcttaactctattatttgacatggaccagttttttagtttgagagaatctctttgctttgtagggagtattttgaaacaaaagaaggaactgcttattgttacggaattcctttctttatgtttcattctcttaatttttggcttcatatttaaatctttaatatggcttgggttaattttatatatggtgtgaaaatatgggctcaagcccattgttcttcaagtagatccaatttttcagcactgtccattgaagaaactagtctttcctcacagcgtgttcctagccccatcgtcagaactaattgactgtaaatgtaagatctttgtatgtggtctattatgatccagtggtggctaaatacaggtgcaatataaagcaattaatgaaatagctcatatgttgggggaaaatatttagacaacatttaagagatctgtcattacagagagagagagagagagacagacagacagagtcacagagacagagacagagagagacccttgaaaggcttcacccagcaactaatgggaacagatgcagaaacccacagccaaacactagtcagagctctcagaatcttgtgtaagagggagaggaaggattgtaggagacatgtgtgtcaaggacaccacaagaaagtccacagaatctcctacaagggctcataggggttcacagagaagtccatgtgggtctgacctaggcactttgcatatgttatagttgtgtaccttgatgagtttgtgtgactcctaaccatgggaacggggcattgtataactcttgggcctgtttttgggacccatttccttctgctaggttaccttgtccacctttaatgtaaggggtgtgcctagtcttagtgcagcttgatatactgtgtttggtcgatatccctgggagacctgccccttccaaaagggaaagggggcagtaaatcttgaggaaaaggaggtgggggtgtggagatttagaggaaagagggaaaactgtggtctggatgtaatatatgagagaagaataaattaaacatgcatacatacaacaacaagataaaacaaaggtgtcctaaccaatggaagaaatatgtttaggtgactgatagtggtggaaagaggaaaagccagaaactatatgaagggcggttcaacctaataaccaagaggctgccttttagaacttgaactggctggcctgaggatgtagagcagtggtagaagcttacctgagcatgtatgcaggaccctgggtttcatgtcagctttccagcctaccctataaaaaagtcctacacttgagacactgtgtatataacgctaagtgttagttgatgtggtgacatgtgacagatgaccaggcattcctatgagagaaattgttaaagacgtgctatgtgacctggacctatcctttggacaaactctttcatagttctgtcactttgtactgagtagcattgtttgccatagcaaaaaagttgcccattactttgagaatggagtaaaagattctaggcgttgattgatattatagaagaaattgagggattaaaataacccatgccgttttcactgataactctgagtcttagacaacacattgaaagtaagtacttaaaaatcttataacattagaaaatgtgaagctaatggagtcatctatgtatgtgtcacaaaagaattttcatttttatttgtttgaaaacatcatattctgtacattaagactggcctagaactcattatgtagcgtaggctgtccttaaaatcccagctgtccttcctaacccttgcaaatactgagattgtaagcatgaatagcattcttcacaacaggaaggccactttaaacataaaatcgaatttaatatattttagactactcacagtgaaggatagagtgacagcgtatcaagataatacagagctgcaaaaatagagtattctgtttgttctcctaagttcctagctgcttctgtcattattgtcatccacacgagtatttgaagtatttaataagcatatgattgtgatggtgttccaagatcatatcttaatcagtcaactaatatttcagtatattgatgtcaagaaactgcttctgtgtttcaccccctcctgcgcctttcttttattcgacaatttcattgtgtgtgctagaatacatttccattagaaaactgcagcattattattatgtacagcttggtaccttggacaggaaaaagttggagtttttgaaaagagtttgcatcaggagcatcttgttgctattcagatgctccttgtcacaggcaagcatgtcagtaaacacacctcctgtgcacacatgaaaagctttgtcttccttttccatcaacaggcaagtgaaagatcagaataagaaggtagcaaatctgaaacacaaggaacaggtggagaagaagaagagtgcccagatgctggaggaggcccgcagaagggaggacagtctcagcgacagctctcagcaactgcaggtcagagcccagggctgaaggagtgcacgccaagagctggtcctccattatctgctgtttgctctgcctctgtatcctcctctttctctctctaaccctgcttgctgccttccccttagactccctggtaagcaaaaaaggaatggcttttacatagaaaaggcaagttttattctacagctatgtgaggatacttcagcataggagtcatcttgcttcaagttgatcacacttaattggtaagttcaatgtcagacaatgagtgtgttacagtaaagcttcaggattgtttgcacaactgtctggcagatctattcattaaagtgcgttggcagttttggtttgtgtgggtctgtctccctcgacccccgactttgttttttcctcctatttttttttaaagtttaaaaattattattttataacagtaaattattattattattattattattattattattattattattattatttcacatgtataggtcctttgcctgcatgtatatgtactacttttatatgcctggtgccctcagagggtgtcaaacctcctgatactggagttacatatagctgtgagctaccatgttggtgctgagaattgaacataggtcctttggaagagcagccagtgctcttaatcacagaaccatcactccagtcccctctttctgttttttggttttttgtttttttctcgagacagggtttctctgtatagccctggctgtcctggaactcactctgtagaccaggctggcctccaactcagaaatctacctgcctctgcctcccaagtgctaggattaaaggtgtgcgccaccacgcccggcctctttctgttttttaaaggtgtgcaccccctttttaatttatcttttgatgttatgcatatgggtgttttgcctgcatgtatgagtgtggcggtcagagagagcatgacattgcacacagcttgagttacagatggttgtgagctgccatgggggtgctgacagtcaaccccatctcctctgggagagcacaagagcgtaattattcacaccttaattaaacttggtcttatcataatagtagcagctatagtgtgataagtgccaattagattcttagtatttaacttaggcctaaagcagttggggagttgaatgcagaggcactaaagtactacaatgccccagctccctgactgactcagcagtgattgtaatgtgtcatcgcctattttctgtagcatggcctgtttctcatgggcataatactttagaaagaaggcttggatcttagagaatgctcagcatttgctatgtccccttgaaggcagctaagctgctgccaccttgctgttctgacctctcagctttccttaggtacggtgcagtgtgtgctgtacagttggtaatcacagagttttcactgtagagatgtggaggaggaaatataggctttacagtgagtgactttattctagacataagttgttcagtgggtatcctttttttcttgctcttcattcattcttcatttactgcttacagttcttagaaaattttttcactcagttataccagcttttgaaaatgtaccttatcaatttctctcacttcatagtggcagttttttccttttcttttacttctcccttttcaaaatgtgaatatgatggatggaaaatactcatttgggggaatttcttttactcttactaccaataatcccgagtaaaataaatccagaatacagttttaattagaatatttgttgctgtatttcctcttcggttgtacttaactgtgggaggggcatttgctgggcgggggctgtaagatggggaacatgagctgagcactggcatgcatctattgctgcttctgtgattgtggatggagtttgaccgtctgcttccactttctgctgccttgacttctttgcccctctctgaaccttgactacattgtagctcaaactatgagccaagatgaattctttctccttcatgctgcttctgttagatattttattacagcagtagggaaggaagcaaaggcagcaatgcatgaaagcaaacagggcactctgtggttggacaccaagtctaggaagtgcccctagaaaagtcagccctacattaaagcagaacagcaacgtaaatgtaaagagtggagggaatgggtttagtaagggtcgttctcagggtgaaagccgcccgtccaacctgtagtagttaaggtagagtgtgcaagagagggtcagatcactaaggactttagtgaccacagtgggtttacagtgaaaggatgacagatccagtttgcattttgacagcattagagtaaaacaaatgagtgtaatcaatgtgtacagtatcgagtgcatctatggctgcttctgtggtggtggatggagtttgaccgtctgcgtagaagacaaagcagattgctcctttcaggagctcattctagtgcctgtggcgtaagagtgggaatgagagtgagtacaaacaatgtacatggaaggaatgggcacgcagatgggttagtcctaggatcttggcctagatatttgaatatataatggtaataaataagatgacagagcctgataatgatagttatttgagatagcctgggaaaaagaacaagtccattttcaacagttatagtgtttgtgagatagcccagtgaagacagcaaaagagttagatgtgggaggatagtagagaaatctggaagtgaattttgaaaatgatcttaaaaatcaaatgtattacaggcaggccatggtctggctagttcatcagtggcatctcctgacagaaagtccaagggtttcacttcttgaagttagatatctcagctcatctcagtagaatcctaaagaagtaggatctaatattaacatgggaatatctcagcaatgggatagatgaacttgccagtgagaggaaggcaagtaagaaaaagccagcactttcttctttatgatggtgtaacccaggcttagggtcaggcttcccagctcaaacgattcaatcaagaaatcctccaggcatatccagccgtttgggttgtaggattccagccctagtcaagttgacaaccacgattagataccttaactttgataggatcttgggtaagtgagtggcattcagcagcagtgatggaagagcaggctgtcgggacactttacagtctttacttacctgagatcctccctgactggatttggtatgatcaactgcttggaagcctggactcacggttgtttgagcctgcatgcaaatgcagactaagcctgaaaaacttaagaaggactctccctcctaacaagagatcaagttttaggatagtataatggttatacagtgcagggagatttctggttatttgtggttcaaagctttaatactccttaagtgattcctttgacctttcctcaaatttataatctgtaaatctacatcattcttctcaggtaggggtcagccttcctagtgctcaggatgagtttctgtttgtaaagagggctgtctgttaggcagccatgataggaaactcaccttataactcaccacatttagtctttaatgtaaagagtggaaaacatagaaaacagtaaaacctaaaggcactggaagggcaccagcctgtccttccttccttgcctccctgagtcattatagggaaaagtgaaaacaaaagtcagggtacctaggtcttgggaggacagaaataaaagcaggccacagttctggaatagaggagtcttgagaaggagaagaatactctatttcacttgcagaaaaacatgtagatatcatgcagaaagagcaggcgttaagacagaacatcctacatctcaagcctccttcccaagccaagcacttgctctttgcctccagctcttgtaggtgcccgctgacaggagcttgcctcgcacctggaaatctattcctttggtttcccttggtacctgtgctttccaaacactcagctctaggctgaagcaaattatatctgagcttttggagtctagccatttaaaagtgtcagctaccattgatacctggtagtgttgggagtacatgttgggaaaaccctgaagtgccctctagaaatctgtaaataaatcatgtaaaacgatgtgtcaaaattaaaacaaaacaaaacaaacaaacaaacaaaacagcatggaggcctggtgttttctcttaatttcatataaaatagaggctcactagcactgggaagttttatagctatcactgtttgggtttatgaaatgtggttacattaaccaagatgccggtgaattcatgtggcctttgccatgttcatgatatcaataaccaagatggtaccatgtcatgtgactgtctacattttaataacatcattagccaagatggtagctacatcacatggttccatccatcttgatggggttattagccaagatgacaaccaaccacatggttacttttttgttatggtaaactctactacataataaaattagcccaaccctcatcagggaacaagtccctatgggattcattatcttatagattaaatatgcatagccattatgggatttattcatttcatagattaaataaggatagtcaccccttttaccttaaagtcacctgagttaggttaccatgtaggtccaaaataacaaggcaacaaaataggaaattattccttggtttcaaaataagaacgatgagtccattaccctatcacgcaaatcctagcagtggatgccaagcaatgtcatctgaaacctgtttgacttctgctcagttcctgtgctcaagttgtgccacaaaaggaatccatgggccattttgtcccacttgatcatggtgtgggttgaggtcagcagggtctgtgactctcagtagctagaattttaaaccataagaaaccaacttgttcttaatttaaaatgttaatannnnnnnnnnnnnnnnnnnnnnnnnnnnnnnnnnnnnnnnnnnnnnnnnnnnnnnnnnnnnnnnncagagttagaaagctgcttgctgaccagaagaatttggtttgcttctgtctgagagaatcccttgtcttttgttgttgttgttgttgttgttgttgttgttgttgtttgaggctctctgtacctctctctccttactgcctcatgaagccctgcttcccattcctctttctagatgatttcacatcctggcctcactgcctttcatgcattacaagtttcagcatccagaatgacttgcctgactagaggatgctgtccctcatagcatttcttacccttggcctgttcgcacatgggcctggttacagtggtctttacacatttggaccctttgctgtattgtggagaaaccttccatactggggtaattgctgatagaaaaaaatgtatttcaccagaaaccctggaagccactgcagttggaaagggccatgtctctccttagggagggaatctgaacacattccagttgggtttgaactcccagaaaagcccccaattcttagcagtaatcttggtgtcccataaaagaatacacaaagcaagtgtattttagcaaggatatattttttgcaaaaggtgtgtccaagaatccaaactgggctgacaacacagactacttcatgtcctttcttcctgatgtaggtggttactgtgtctcaacgcactgctggcttcctgacttcagtctgacatgattagctatccacccaaagaggaaagacaaggttcaggaatagcccttgctgggttagctaccttacattaaagcaaaacaaggaaactgtttctcttccattctgattctatgacatcaactttttagattccatatgctcagtttagcgtcatgtacttagctcatttcagttaacttgatgtcctctggggttatcgtcataatggaaaacaaaactaactctctctctctctgtctctccctgtctctccctccctccctctccctccctctccctccttctccctccctccttcccccccacccccgctccctgtttggtagtattcctggtgtgtatatacagcacatttaaaaaaaaaactattgaacttaaagatgattttattattaatgttttaaaaatctccctatcaggtaagccataaattttggcaattgcctggaccagggagatagagaagaagaagatagaaagatagaaagtcatacaatctgagtaaggatggcatggagaaccttttactttttaaaattattgttgtttttgtacatgtctgtatgataaggggaaataccgtgatatgccatgtgcttgtatggaaggcagaggacaactttgtagagacagcttgttcattcttcatgcaagttctagggaattgaactcaaagcatctagctttgctggttgagtcatctcactggctggaagatagactatttcctcatccattcatctattgatagacacttaggctgattctggtcctgactgttgtttagccatgagccgtcatgtggtgctgtcgtaagactggtcaggtagatgttcctgcagcccaccaatatcctttcatttcaatgtccaggagtggaactgctgactcatgcagtagttgagtgttagtattttgaggaagctccatcctgtctgccatagtgaatgagaaagagtccctgcctgcatcctcatgagtactcacttcctgtcttttatagtgattcaaaaggactgaaatatatctttgtggtttctaattacatttcatcaatgacttgtaacattgaagagtttgttttcaaaattatgtgtcatttttatgtgttcttttaaggtatctatgcatctcctgtcctttttatgaacgagttggatctttttcttgctgtttagttctcattttcgagtattaacccttgtcagatatatagttgggaaaatttactctcttctgtaagtgttgctttgttattttgattatttgctgtaaagccaagaatgttattatctgaggtaatcacagttgtttgattttgtttctgttgccatcactttttggttttatttttaaaagcagaacccaaaccccactatccccaacccactgtcatgaaacaccccctgcccccagtttcttagttttgttttcttcttctttcttcctctctcgtcttttttgagactgtgtctcacactgtagttcaagatggccttgatctcatggacaacctcctgcctcagccttacgagtgctgttgtgtaggtaggagttaccatgcctggttttagcttcagttctttagttcatttgagttaacagatactaagagataagggcttgcttttattcttctttgtatcaacatataggcaaccttgttactcattttcatatttgaatacaaaactcaagtatcaaatatagtactgtgttccaaatcctttggtttgcgttcccccatccccttaataaatcaaaaagaaaatgcttagaatagtctgagaaatccatggttccattcttggctttttcttttatctttcctactgctatactgtccttgagatccttaagactaataagagttttgctacatagatgaaaagtaacattacaaactcctactagagtgtattacttgcttaactaaattgctcattcatattcaaaccagtggtattcataggtatatgtatacatatgtgtgtgtttctagttttttcaggagaaggcaaagtctcactttattcaaatgttaggaagcatgttcctttttgaaaagaaatgtttcagaaattgtctttatgaagctcgagtctgtcatctagttgtgactttcaaagggagatagtcttgtggtattgactctaagtacagactccatcagagctggctttcagcccagtttaagtggtaggttttaaaaatagctttgtatttttaaatagttaacctcttattgcttatgccatctaacaccagcacttccttctctctgttgcagagagcaaacccatcatgtctgcctcgcttcactaactttatcctatgctcttaataacagacttcagcttcctttatttctcttcttcccttgtttaattctttactctatggaggaatctttctggcctcagtttgcttctgaatagaaggatgtttaatgatagctcttccttgatgggtaggcactccttgaggtaactgagtaacctacttcaccgggtcttcatcgttttccaggacagtctccgtaagaaggatgacaggattgaagagctggaagaagcactgagagaaagtgtacagataactgcagagcgtgaaatggtgctggcacaagaggaatcagccaggaccaatgctgagaaacaggtctgcgattttatgtagctactagcaatgctgctgggtaaacacaaggtaaagccagtgcagtttcaggtgactgttagaactgcttcagaactgctgctgcagaactacttcatcaagtggtaatggttagactttcagagtgactaaaatataactgtgcaaggatcggctcatggtaacgtgaggtctctgcagtaatcatttaggaatgcttcatatatattcatgtagtaaaagctagtgaagtgtgactgacaaaacatgcaacatgtatgttctttacatgactgcaaaaccccagcttggatgtgaatgagaacataaacatgtctcaattagaaaatactttattttatatcatttttcaaggagcctttgcagttgtagaggtgatagcagctctgatcagcatgtgtataggtgcggtggcactccactgccacacggcccttgagaggttctgctattgctggccatggcctttgtttcacttgcttccacttctctcccaggtctctgtatgcttgcttttgactctattagatgaagaataagtgaagatgggagctgtaaattgaaggaacagttttagtaaatgaacgccgtaatcttggtttacagcttgaaaatttgacttgaggttttaaatccacctaccacagataccataatacttaatttttgtagcaccctattccttgtagcccttgtttatgtgagagaatgataaatactatctaggtgtcttaggtttcaatttctatgataaaacacaataactaaaagtagcttgggtaagaaagggtttatttccgtttgcatcccagtccatcagtgagggactgcaggtcaggaactcagatggggtagggatctggaggcaggaggcccctccatgcaggggcctggaggagtgctgcttactagcttccattcagctggcttgctcagcctgctttgttatatatagcaccccaggttcaaatgcccaggtggctggggccttcaatatcaaataaggaaatgcaaattggactgattttctgttgagggttactcttctcaggtgacttagcacatgtcaaatggccacacacctagtccaagacactaggtaagttcagtggcatagatgtaggaatcccatgggctagcctccctcctgagaagctgctgttactgggaactaaggaaatcaaactgtaaaagaagtgcccacttcagggcatatatactatagtaggtacctcatagagtccatttatagctgtggtagctcagtcatagtctttagtgctgttgtgtccctgagtgtctgacagtatttataagattggctatatcaatgcctggagcatataagtttataattgtcctaactttttgactgatcactttattcataattaatggcattgtctctttattaattttgacttgatgccatctcttcttagaagcgtctgacttagttagggttactgtctagtgagccccagcattcagatcgtctgactcctcccagctttgttttgcaccccagttcttgtggtgaagctcagatccctaggctagcactgcaggtgctctgagcatcccagccccgccctcttctctttgactttgtgttaatgccttccacctgcaacttttgtccagctagcctgacgtgcatgttagtaagatcatattccacctctgtgaactaaactttatttactccctagatatgtgattcattacttgaaatatgatttacaaaatgtacagcttaatcttaaaacaaggtactgacagttaccggttatcttttgtctgccaactcccgagataagtgctttgttcaccctattgtttaatcatctaaacagcacatctgggcagaaaaacgagcctttgtactcactggtcctctcgtagaacagtacagaatagtttcatttcttagagtactagatctctctacttgaagcagcatccctatttgtaacagtaggatgtagcctacttctctagaacttctgtgacctttcaggtctgaggcatgtgtctttatagagcttttgaatatttcctttcacttacctctgttttgtaacctgttattcttagctatttatgtaatgtataataggtatattacttgaaaatacacccactaatttctctagtagaatatgaactccctgggcgcaggaggtatgtctgtgtactgttatggctttggcagtgacaacctcctgggaaaacagtggcattaagtgagcatctaagtgacataattctatttcattagtgagggaatgagtggagtttcagcctgacctctgactgcatgcctgaggactgcagtcactctagtaactaaacatcctggaggatagtaatatttctatgattttgcaatagttatcaaagcagtattttagaatattgtattctctgattcagctagttttttatgctgcatttactaaagctcttcatctgaacagaatatcataatttcagttatatacttaaattcttagaatagctattttcaagtagtttacattccttagttcttgatttttaaaagattatagctggaaagcacaaataaaacctacaaatcaatattatctttactctaagagtaggaaagtatatgtctcaacatcctagccccctgttgcttgctattttagctaaggaaagctagcatgcaagactcaggtaacagctggttctcagcggaaataggaagtggtttgtaaaacacaagtatgtatgaattcagaactttcagagcattataatgtcatgtaatatagtgttcattaaatgaaaatcttttggtaaattgattttatttccttttggataatacttctgtcctttgtaaataagtttgacattaggagtttcaatatttgtctcgtcttttcctgccttagaaataggtttttaatgttttaaagactagtttttttattgtgtgcttaataggctacattcaagtttttaaaaattctttacatttattaattttgtatggggaagaatacatatgaaagcatacacgtgaagggcctaggacctttcttcattcttgggttatcatacattaaattccatccttgcatgcattttttttctttaagcaaggttctgaataaaagtgaaatgactcatttgaaactatcttgcattttgtttaaaatcattcttagttttctttctcctcttttctcttctctccttttcttttcttttctcttctttttttttttttttcttttctcttctttcttgagacagggtttctctgtgtagtcctggctgtcctggaactcactctgtagaccaggctggccttgaactcagaaatccgccttcctcttcctcccaaatgctgggattaaaggtgtgcttcaccactccccagcctttgttatcttgtaaataatttcaaaataattatttacatctttatattaaatgaaagtgtatctcagagtttcagtgaaattattgattattactaccaaccatctgtaatgttaacaagtaaagagaacagcatgattttaaaaataattatcatattagtaatattaaaggatatgactttctgaaaggaatatggaggaaattgtcaaatgaaatcagaaagtgctgtaaaaaatacagaaattgagtatgtgttaggtagtgagactgagcatgatgtagactttaaacatctttaagccaatggcataatctttcagtgtgttggattttcttcactgaatgtattataggaggattcattagattgcttcacatttatcttctattattgcatttaaaatttatcttgaaataaagtataaaccttagagtagtcaagagtgagtcattgtatctccctctgtcactttgccagtgggggtcagtagatagctacagcaggcctgatactgcagcaggcctgatagcaaccacatcaggaccaacactcaaaatcccattgctttctaatagtaattttttaaggtatgcacttagacttgtttttagttattatgcttgcttttaaacatgcttttaaaagttcaaaatgtttttaaatagtccttgacattctgaaattatttatgactccaaatttaggcttgcattttaatttttcattgatattttctaaagttgtgatccaatgaattattaatccaaagtggacccaaaagaaaagattggcactccccagaattgtgccttagagatgagtgtcagagcctgtgcatactgttatcatggtaggcatgttttatacttttgtcttttctgtgtgaaatctactatactagagagcatttggggaatacagcattggacgtataatctgtttatagtgagttcttgagcactttgggttttattctgctatctcccacagagaagtctaataaaccctgttactgatcatggcagtagttatcaaggtacaatgatcgggcctgagaatcaggggcagcttcttactggtttctgtgtgcaattgatattgttgttaggtacatcgtactgaatgtttgcaatgcaatgtattttcctagagaaatgtgactccaccgtataatttgtcttacccagtagatagttcttgtatgggttacatcctaaattttagtttgataattatttctttttccttataagctattaaaaatacactgggggttagtgtaaattgtattggataacaaatcaaatggaatgaattttattccttattctgttttctagttgtgacttagtaagttccctaacttctctcagaggaaagaaagccactcatgtctcacactgaaataacctataaagactcccttcgaacactgagccttattatggcttctgtgtgtgtgtttttgggaggacagtagtgtctgcatgtaagcctctgtgtgtgtaggcttgtacatatgcacttgatacttagaaattccctttctgcattcttgggttgtcagacattaagttccatgttttgtctttcaggcaaagtaaacttctagtaaagtgaaatgactaatttatttttccacattcgtttatctgagttcaattcccagattccatgtgttattaggaaagaaccaactccaaagatcctacgagtagtcccctgactcctatatatgccatactgtgcccctcaccaaaagaagaggggtatattaattaaaaaataatagttgctgcttctttgttagtgctatttgagaaagaaattgtggcctagtatttacattatttctaacattttttttcttccaaaagtacagaaaattaaatctttttaatttttcttgagcgttgtgaacctgtttgttgctgaagcaaccagactatagaaggtacttagtcatacaaacataagcaaagaaaaagccagtccgctgaaacattaatttgcagggtattacttcagattactttcattttcgtttggaagctatattgccaaattttactctaattgtccacaattaaacatttctcttcttatggcttctctccaaccttggcaacagaagtcctggcagcagggtgatagctgctgggaacacatgtgcccaggtattattggtggcgtttgccttttcaggcttcacttgggagtgttgaatgatgattacagagtgtatctacctacgcctctgacttgattgaaaaattttagaaacaggaaaactgagatttcttgaaagaagcatttcattcacacggacgttttctatctcttctaaagtttgtccagttacggaagattagttagattagaaccatgaagaccccagagtgaaggtgtagccaacaagtgttccatcctgccacctgccagcctgtctcagctgcactcatacttctagttcccttgctgttacacaagtgatgtactttagagatggcaaaagcattttataaattcttcacccagttgagcatattcactttttaagtcatttactaaattctcttttgtcaggatatatgacagtattgatttaatgggggaactgcacaatgtataaaaagtcaaaaagtctgccaagactcaaagttatattataaaaaggtgttttctttaggtctcttgtctgtgactcttgggttcttcatagatatgtctgatagtctggagcctaacaaagctgagctagtatcaggtaccattagcatatgtcaaaactcaattggaatttcctcaatagaaatttcagtgaacagaatagaaaacatatagatgtccctaagttacacacatgtacctttagacagagagtacagatatgaaaaattaatctctttaatggctctgatttattttgatgtcctgatccactgggactagtgactatcttcagataaactagtgaagtttgtctcagacaaacttccctggaaataagccctctgttgtgagctctgcctattaggtatcatcccattgggttgtgctttcttgacttaatcttcccatacctttcatctctcctgtgtttgccttctaagtcattgaacttcacaactgtatcagcatgtttcctgttcctgttgaccttcatgccttatatttttgtaagaagcctgacttgtgaaggcccatgcattcatctgcagcattgaaggctttcattgaagccctggtaagaatatctatgtcctaaccatccgtaactgttttctcagtttctggaccactggcttttgctcctagtgtgtcttttctttccagctcaagcatcctaaaccttgctttgatctagtttgatctagtctgtctccaccttcacccactctcatcattgttccttgccttgcgttcctcatacaccacgctctcacttccatttgattgtagttcagtctctttttatttcatcttagcccatttgtcttgctctcccttctgtctctattctcttccactttcttgcccatcattctgataattgtcttaagtttctaaatccttgttcctctgttagatccctttgttacctccctttcccccattaacatttcaaatggcagaggggtctcttaatacagcccaagatccttctttgtctattctttcttctctgtcacgctagcatctttacttccttgttctggagtttctgatattctgataatttaattctttggggtatgttttcccgtgttactgctgttgtacacagggacaactataatgcttttttcttccccatcttagggcctgggacaacaccaggaccttgtgctatatattttcatgacatcttgtactcttttgcatagtatattcttggcttacagttaagttttgtaattggtgactgtagcacacagtatagagatagtctttgatgcacagcatggtatctttcagtggtaggagtcaagtattttttttggcaggagaataatggaagaaagataccttgttggatgtggggatatgcctaggaataagtcaacaggtataattaattgtagaagcctgttggagagcatttcttgggagtgccaatgcactttagtagagcaagctaactggggggaagaccaagtcaggtggcagtcaactctgcttcctctggcaaagaactttagccactaaccctttttcttccatagaaattataatgatagcagtaatacctatttcatacaattcctgtgaagctatagtagctaatacatatgaaagatttggaacaaggcctttcagagcagttaaacaaagtaatattttcctattagtcaaagaagcacctcgcattagcaagaagtaatattgggaaaataatttgtagtgtaaataatatcataaagctctgttagttaaatccccattagtaacaactataagaaacctaaagtagtagtgagggagggaggagagagacagagacagagaagggaggggagagagagagagtttttatcttctctctctctctctctctctctctctctcagtctctctgtgtgtgtgcctgtgcctttatttttgtctgtttttttttctaaatatttcagaaatgtttatcagcctttaactgtgtacttttcttgtctccagctcctcctaaagtatacaacatgttgaatctctctctttttttttaaagacagggtcttaaactcatggagattctcctgcttcagtctctgagtgttgggactaaaggtttacaccgccatgtctggctgcaggttactttagaatcttgttgacattgagaaagctaataggcttttcatgggactgcttttcactgcgcctctgcaggccttaggccatcttgagggctgccttttgcttcagttttgtttttaccactcctcttctcttctagtcattttcttctttttcaagcagatttattcttccaaggaggtcctaccatgattctgcataaacaatatgaaaactacaaagtctcctttgcttttagctatggagcagaggatgatgggaaacgatgctgactggaaggttccccattgctttgctttcttaaggaaaatagtctgtggttgagtcatactttgctccctttttgttttgtataaaagtttattagcttgtgatttaaacaaaccatctggtcctgttggcatcacacactgtcagacctgagctttcgccctaattttactgtagacagttaggttatatgcttgaattccagttctggcagggatttttgaatgtttatcttaaaacttctgctttttaaaaatggctctgttacccaaagcacatttaaaatgatggagaatttcttaattgtttagtgtaagatttatctctctgtttcctcagttgtcatacttgcatttctcagggacagtgactccaaattttccaacagccattgatgagtgattggtcctggatagcagattcactaactgaatgtgttcttttgggttgcagaaaggaaacagaaaacaggataattcaaattgactttcagggttttttttttttttttcctgacttgtagcagacagcaaatcaagtgattagctggaaatcctggtttctgggtaccattcttgctttgtgtataacattcattacagcttatttggaggtgccggagtgatggctcagcattcctgagcatttgctgcgtttgcaatgatccaggtgtgattaccaacccccacatgacggacggctcacaactgtccacaactccaaatctgggcgatctgacattcgcctcctcaagcaccaggcacacacatgctacacatacaggcatgtaggcaaaacagtcatccacacttttaaagttttatttagttatttattttatttaaaaaataaatctaaggaaagaataaatttacttggatatatgtatgatcagaggcagaaatactttattaacctacactcaaatgcataggaaattgggcattctttaagaacattgtactttactaatacaggaaactcaagaagtgaaagttttgaattcaagtagaacatattcaacatggtgcactagacactaggaaaacagttgagtgttgttaaaatacatacttttgttaatgagaagctaggggaaatacaggaataagaataggcagggttcaaaagtaatacttggaaaactcttaggcttgcatttggggctttaatttgacaataagaaagaaacagcccagagcagcccaaggaggacgagcaagtaggccaccacacctaaccctgcttttacaggagagcaaccacagcgtccacagtggttctggtgagcttgttaggagggaatgtactcagtagatgggatttagaatgcttgtattttctaactactagtccctcagcgttaagttaaaacgataggtgtctttgccagtaatttgaacatttagagtaaattatcaatgccaagtaaaatagtacttggcaacgcttgttaaatatgagaatgaaaacctgaaaaaatgaaaattaaaactttcccacaaatttcaagtccagagatttatattggtgtcttagaaaccttaatgggaacatggctcatttgaggacaggtttgcggtcagcagttactttgaagactgttcatttggcagtgccaaaagtagtctcagcctgtgtcacatcagctaacaatccattgctcaaggcagctcaaacaacctagccaaagtcaaggtcttctccaatccaggagatcatggcagcagtgtggaggtactatatgtggtttctatagaacagtagttctcaacccttcacaggggtaacatcagacatttacattacgatgtataacagtagcaaaaaaaaaaaaaacagttatgaagtagcaatggaaattttatggttgggagttcccacaaaatgaggaactattttaaagggttgaggcattaggaaggttgggaagctgtagaggagtggataattggaaccactaattcaatctaccagggatgccaagtaggaaataacctgtgacattttgtaaagtaaggatttataaaaccgaacatagtcataaatcttagaatatattcttgataaattatgttccaatactgtatcaaaagatgctgagacaaaagtaatagatgcgtgctgaactgggataagtgatttgaatccttatttgtgtgtagctctgtgaaattaagaaaataacagaaacaagcagttaggggtaaattagacttgggatttcaagaaataaactacataggtggtccttaaataattaaaatagctttatcctcacatattagtattaagataatcatacatgggactggaaaatggctcaggtgataaggatgcttgcttccaagtctgatgacctgggtttgatccttgggactcatgtaagaactgacttcctcaggtatcctcgagtccattcacacagtgtagcatattttctctcagaaaataaagacgttattttttaaagaagataatggaagaagttcctaaaagataattgggaaactatattgcaactgtgagtcataggtatctccttttgacacaatagaaattacgtgatcgtctcatgatgggacactgtccgaaaataacaaaaagtcaaagcccagtctttggaaatctttaggctttaaagtttacagggaatctgaatatggaggaacaaattaaattacagtgtaaggaaactaccaagtgaatccagaaagtgttgcaggttgtacaggacgagggtatcatattgtcaggactttcatagcatggaaaattaaaagtgtagatgactttacctttgtcttccgtgaattgccttagcagtagtcttataaaggaaaagagggcgatggaggggaactccaaacccattgaccataaaagttagctctcatttctgactgtgcttccttcctttggttgacttgtccaccattctatccatactaaccctgcacctgtgtttacagtggaccttgaagttaagaaggaagagtcaccaatgtttcctttcttttccatgataattttgcatttacatttctttcatgaaatgcatagctgtgcttttcattctctttaatgctgtttaaattaaatcatttaattttactgtatagctatcccaaaagtcccccataccctcccccccacttccctacccaaccattcccattttttggccctggcattcccctgtactggggcatataaagtttgcgtgtccaatgggcctctctttccagtgatggccgcctaggccatcttttgatacatgtgcagttagagtcaagagctccggggtactggttagttcataatgttgttgcacctacagggttgcagatctctttagctccttggatactttctctagctcctccattgggggccctgtgctccatccaatagctgactgtgagcatccacttctgtgtttgttaggccccggcctagtctcacaagagacagctatatatgggtcctttcagcaaaatcttgctagtgtatgcaatggtgtcagcgtttggaggctgattatgggatggatccctggatatggcagtctctagatggtctatccttttgtctcagctccaaactttgtctctataactccttccatgggtgattgttcccaattctaagaaggggccaagtgtccacactttggtcttcgttcttcttcaatttcatgtgttttgcaaattgtatcttatatctcgggtatactaagtttctgggctaatatccacttatcagtgagtacatatcatttgagttcttttgtgattgggttacctcactcaggatgatgccctccaggtccatccatttggctaggaatttcataaattcattctttttaatagctgagtagtactccattgtgtaaatgtaccacattttttgtatccattcctctgttgaggggcatctgggttctttccagcttctggctattataaataaggctgctatgaacatagtggagcatgtgtccttcttaacggttgccccacaaatttataatctcttattctttattacggttttatacatacatgtatatataatatatgaatatatctttatataaatttattatttactatttattatttagatatttatatataaatatatttataaataaaacctggatgagttcatttagtcttgccctgtgtacatactttttggcctcattgcttgggactgaatgcctatcggagactcatccttggagaagactgggtctccttctctcagcagccatgtattgcctgaagttaatctgtttctgtcagtcatctccattacagtgttaaggagaatgatgaaagcagccactctagtcttagagggaaagcattcagtttttatcataaaagtctttgtcaactgaagaagttctagtcttagattttatgttgtttttaccctgaaagtgttaggaattatcatgctgggatttttcaactatctatatataatcatctataatatataatatagcataattaataatatgttatacattacaatataattatataacatactaatatagaatcatctactgggatattattctggcttgtattctactaacatggtatattacattctttgataatagtatgttaagatactaccttgcattctttaatgaagaccaattttgagatgtctcagtctttatgtttgattttccagctaagttctcttttctctataattttactctgttccatccctctcctcttccctcttagcatctcttggttttaggccttgggttttcttttacagcaatccttattttgcttgctttttagcagcaaagaacatttgtccatttctcactccaaatttggaatcaggttcctccactccgagccctcagtgaaaaggagcctgtcatgttagtgcaaactacagcaacatgcttcttggttgtctccgcttctagctcatgtgctgtaatgcacagttatttcattcttgatcttaggatataaactcatggtttcccttttggagaaagagaaaaataaaaagcatatggatgaaacaagccagaagattctaattattcacatttatgaactgtaaaagtagacagtgatttactttgaaatacattcatcttttttaaaaatgtaggtaggttggcaaaatggcttagcaggtaaaagagatcactgtcaagcctgacaactgttcatttcccagaacctatatgataggtttgtgtgtgtgtgtgtgtgtgtgtgtgtgtgtgtgcgcgcgcgcatgcgtgcgtgtatgtctgtgcatgtacacagatatgtcataaaaggaggcagagacaggtggatctatgaattcaagaccagctggaccttatctttaaaaacaaaagaaatgggggaaaagagagaaagatagaaaggaaggaagggaggaaaaaaggaaggaagaaaagagaaaagaaaagaaggaaagaaagaaaaaatgtagtgggcatggtgctctataacaccagcccatgagtggtagaggcaggaagattaggagttcaagcacagtcttagttaagtcgtgatttttttttttcagtccaccgtcaaactgtctcagaaaaaggaggcaggcaggaaagaaattgtaggcagccggcgcctaaaagatggtgctggtctcaggtacaccatctctgtaaacaacaccattgcacaggtgctagcccaaatctggtgccaacccctcccgagcgggtgcatgcaaattaaggtgccggcagactgaccaatcccaggaggacacatagccctccccagtgctggggtgtatataaggagtcctccctgggtgcccggggttctggtagcattgaggcgtacctgcagtaaagctgttgagaagaatccgaccatgttgtgttttccttggtgggtgcaacaagaaataatacagattaagaatgtggattacttttcagggatgtaggggatgcaatgaaataactccacttaagctgtttagggataggtatgaaggttttctactacatgtgggggattcttaatttgtctccaatggatgcctgaaactgcaaaccatactagatatatatagtaaaatttagtgtatgaattaggcacagtaagagaataacaataataaaatcattagaatggcatactgcattagaagttatgtagatatggcctctttcttagcacatcttattatacctttttatttaaagaaagcccttgaaccttctcattgtcaacatcactttgcatgttagggccgttacgaagaaaaagaaacactatttgagcacaagcactataagagcaagtcagggttccatccctgaggtcgctactgaagaatctgcaggcagacagcacacacaaataatcgacaagcaataattcttgattattcttgattatcatgataattcatgatagaggagcagatttcatcatactccttagactgctgtacaattaaaatgttagaaattgtttatttttggaattttctatttgctgtttttagatgataggtaagtgaaattgcaagaagcagaaccatgggtgagggataaatatctgttttgctgttaattctggaaagtgacataggcacttggatttttataaagacaaaatattttacattgcttgtttctgaaatttgaaagtagttgtatgcagtgaggcacttgtttttccaactctatgtagttattccttatcttgcctaaaagtatattgggatttttttttaaaacatgaacttaattttttgtgctgtgaagtaaattagatacatatacttataaaaatttaatttggactattgcagcatgtgttttataaatctatacatgaaaattcaagagtttataaagacagtgttcatctagtattctaggactttgatgtagacagaataatacaaagggcacaaaatgtgccatacagaagaaatatcatgtttattaagttcaactcaatttgaatattttcttttaaagcatcataaaataagtgttagtgttttctcaaagaagaatatgtaattttgaaatttacagaagtataattatatgatcagcaaggatggatttcagtgaaaaatccagataattgtatgctgtataattccattcgcaaagtcaaaacagttgagatagtcaagtatggaaaaacagaatggtagaatacttttcatctgcatagtgatatagaagcaatttctgagttgctgactatattctgtttattaatctacatgctaacagggtacattgacttggatcacatttttcaaggtgtatatttattatgtatctttctgtattttgcagttctgtaaaagacttagcaaaatgtgtttagctgcaaaggggtatatgtagccatgtcgtgtagagaggaagacttgatgctttctacatgctcgctgtgtgtatgtaagctctttagggcgggtaagaaaccgatccatttgatgtctagggatgctgcaacacaggaagctagggagacttttgaatctgtctagctatggcagcacatgctagtgacctgtccctgctcttgtgtgttagaacacctgcacatggggtgtggccaccagtgattttgtgcttaacataagaatctccacctaacataattactctgttttagaaaagttttgcatgaattaaatgaatagaattaactctattggcggtttccggaaatttgaggttaatatatatccctgtaaaatttgcaaacgtgctccagggagatctacccagtagtgtgaggaccccattagggcaagggtcagcttgagctcttaggaaggggtgtgtgtgtgtgtgtgtgtgtgtgtgtgtgtgtgtgttaatgtaggcacacagatgtttatcttggcatttagcacctggtgtgtgaggctctcactggaagaagcctgtaaatagctctggtatgtttactgtagctctgtctccaaacagctctcagttttagcacaaaaattggttcatgtaggaatgactgaatgagtccctctctctacctaccctcctccacttctaaaaagaacagttattagcaagatgagcagtagtgtaatacaaacttcagcagtcagtgctccatgcttacctgtgagatcgtgtcttggtaataatatgctttcattgctatagttttcacttttttttttaaataaattttattagtttaatgaacaaagaaaaacaaaaagaaaaaagggaaaaaagaaaaaaagaaaaatggggcctgatccattagcctgagtgcttccaatgacacttttaagcttgtggaaggtgccaccgttacacaatgattaaagataatggtgaggaaatctttttttgtttttttttttttttctttttttaactttcttttttttttttccatttttattaggtatttacctcatttacatttacatttccaatgctataccaaaagtcccccatatccacccacccccaatcccctacccacccactccccctttttggccctggcgttcccctgtactggggcatataaagtttgcgtgtccaatgggcctttctttccagtgatggccgactaggccatcttttgatacatatgcagctagagacaagagctccggggtactggttagttcataatgttgttccacctatagggttgcagatccctttagctccttgggtactttctctagctcctccattgggagccctgtgatctatccattagctgactatgagcatccacttctgtgtttgctaggccccggcctagtctcacaagagacagctacatctgggtcctttcgataaaatcttgctagtatatgtaatggtgtcagcgtttggatgctgattatggggtggatccctggatatggcagtctctacatggtccatcctttcatctcagctccaaactttgtttttgtaactccttccatgggtgttttgttcccaattctaaggaggggcatagtgtccacacttcagtcttcattcttcttgagtttcatgtgtttagcaaattgtatcttatatcttgggtatcctaggtttggggctaatatccacttatcagtgagtacatattgtgtgagttcctttgtgaatgtgttacctcactcaggatgatgccctccaggtccatccatttgcataggaatttcataaattcattctttttaatagctgagtagtactccattgtgtagatgtaccacattttctgtatccattcctctgttgaggggcatctgggttctttccagcttctggctattataaataaggctgctatgaacatagtggagcatgtgtccttcttaccagttggggcatcttctggatatatgcccaggagaggtattgctggatcctccggtagtactatgtccaattttagttttcactttttaattaaacatgtttatttaagtaattcaaatttggcaaataatcagaataagtgaaaatggcttctgacatttagactttcctctctttatttttcttctttgtctttagcattctgtagttttgttcccttgcacatgtgttttgtttgttccagatcttttcctgtcaaggcttccccttgccaggagctttttaaagtatagtgcctcttttacctgatcatatagttttagttttttgtttttttaaaaaactctttagcggtataagcaatagaacttagtccagatgtataagcactgctctctgtctatgctgtttctgttactcaggcttgtctgttctttcctatgatccccttataaataattgttattattttgtggcttatatttcatttgttgtgtgtggggctggtgtatgtgtgatgtaggggtgcacacgtgcttcccgtgcaggtcaggagactgcttcacggactttgtggagttatttctccccttttggctctttgatcttttttgtttgtttgtttttgattcaaaggattgaattcaggccatacttcatcattaagcttatgaagcaagtactttactaactgagccactttgctgtgcctctccctattaaacttttcttattacatctatctatctatctatctatctatctatctatctatctatctatctatctatgtatctgggggtgtggggtgtgtatatgtgttgttgctgttgtttgctaggtgctaaacttatagtcatgggtaaactctataccacagaggtaaatctacaccctgtttattcttgatatatatatacatgatcagaaagagtttggaactttcaaaatgaccttgtgcgccttccagtttaacagctcaggagttgcccatggccaagcagcactctctgcaattgaccatggtgttttactttttccctttctgtgtgtgtctgtcataggtggaagagctgttgatggctatggagaaggtgaagcaggaactggagtccatgaaagctaagctgtcctccacccagcagtctctggccgagaaggagacgcacctaaccaatctccgggcagagaggaggaaacacttggaggaagttctggaaatgaagtaagtctcgcacctctgttcgttggctccacttagttgagctgagtgtgctctttcatctttgggtatcatcctagcacatgaagcccaattacaatgccaacttgtttctcctacttcctagaacaaattttctcaagcgtggcacaaatcctgctcaaagcagaataatttttttttaacctcttttgtacttaattttacagtgtgctaccatgtgtatctttggattactccttgaaatgtttaaattcatctgaagaagtcaggtctactggagaagagtgtattgcttctcatgtcttcctatcacctcatgtcttagacacattaacaaagtacttactctaggactacataaagtggtgtagcacataaaggaactctgcaaagcctgatgacctgaattctgtcctcagaactcacatgaatgtagaaggagaagaccagtgtcacaacgttgtccctttacttttcacacatgcactttagcacataaaaatttaagccatgtacatttccaaatgtacatagcagtaatatagagtgaatttccatatacttagccattgatttgctaattaatattttgccacaccagacacttaattttttacaaaattgttactttcagacaagcattgctatgttctttttcttcttggttcctatcatgatgttcctgagattaaaatctgtatctgctattacatacaaacaggtcttttgagaccttttgttaaaaacaagtatggtggggctggtgagatggctcagtgggttagagcacccgactgctctttcgaaggtgcagagttcaaatcccagcaaccacatggtggctcacaaccatccgtaacaagatctgaccccctcttctggagtgtctgaagacagctacaatgtacttacatataataaataaataaataaatccttaaaaaaaaaaaaaaaaaaccaagtatggtctccatgtctcttgaagttccagtagtagtagtagtactgtttcatttacatttaacaaccatcacccacatctaaaatgctttcctgctctgccaaacccagtttctggtgggctaccttagtcccagtgtcatgtaaagttgtctgtgtttgtgctgtcttctctgttgtctgagagatgctctttgttctctgtagcatgggtgtcttacctctgtcatctcactcgctggtccatcctctctaacattcctgtgctttctctagtcatgcccagcctgccatcttctttacttcaatacacagtctttctagctaaaataatcatatttccaccacctagtactttaagctattaatgtgactttgaactgtggatacatgcagataaatgactacctgtatccacaggtactacctggataaatgcagttgataagggtctccgaggttctgtaggttctgtgaacgtaacactggatgagttttgttttgagttcctaaacacagttgatcccttttcttatcagagctttcctactcacttcagatggtaacttccagaaatatagaagtttgtttgctactggaatttccttttattattgatattacatgaaacaatgtttttttaaaatgctggaattcaaaggtaattgtgtgtttgttttgtattaacgcagtaccaaagttcattataaaaattacttgccgccctattccaggaaaataaataccatgattagcaaaacttattaatatgatcttgactcacgcatgattaacagagtatagaatatagagtgtgtgccaacagaatagaaattttacaaaacttgaactaaaacactaacccccactgtttagggatgactcatctctgtactttcttagtcactcatactgtataactgccatcatatttttttaaaaaggatttaattatgtttttcttctacgagtgtttgcttacacgtgcagcacaagtctacctcaagcctatgaaggtcagagagggcattttgtaactggggttacatgtgggtactgagaatcaaaccttggtcccctcaaagtgcaaccagtactctgaaccactgaacccacaacagcccttatgatgatttaactccgatatttcacaagctttgtcatatacattctaccatcttaaaaactttaagtgttttcaggctttaagttacttttaaatttcccctcctatctctgtcttcatactgtgtaagttacttgtctattactctccttctaacatctggttgttatatgcatagccactgtccagatcgactataggaaaagtggtggtaccaggcctctctccttatgaccctgtagatcagctggtgtgttcctcccaatggtccaaaacaccagttagtattccatctgcagcataatgtgaaacacctaagcattttaaatgtgtttttcttaagtttagcacaaccatactttgatttagaaatcctctattaaaaactgtgcatttaatctaagttgaattatatacaaaacactataaatgacatgctaaggattctgattctagtaaattttcagtttattttcactagctaaccaaagtatactagtcagggttctctagagggatagaactgttaataatgtatttattagagaggcttgcaggctgcagtcctgcttgtccaacagcgcttatttcatagcagaaagtccaagaattctatagctgttcagtttccaaggctgtatgcctcagctcactgcagtatacattggaaccctaaataattaggttctaataccactgaaggatgcctcagcaagaggatcaaagagttgccagtgaaagagtgccctcattcttgaggacagccaaaagacaaaatcttcctctttagtgtcctttttaggctgccactagaagttgtggcccagatttacagtgtgtcttcctacttactgcctcaaatggtttaaatggtggagtggagagtgtggtgtcttccaacctaaaaggatctggacttaaggtgtgctcagctgcttgggttttagtgactgtaggtggagtcaggttgaccaagattacccgtcacatagtcagtcttcattctgttttggactcctactctccatatgctgggtcagttctaatcatcctggctgtggtgtctcttgtttgtaagactttgctcaggatgtactttgtgattattaatgaatatgaggctgatgatgtgtgtctggtttcagtgacacagaacagcatatcccagcagtaaaagagcccagacctcatgcgctcaccggctctgtggcttcagcacgttattcagcctcttcgctcaggaacattctcattttagaagtgatggtctttcataagaaatgatcagtggattgcttacatagaattgagaacagcaccttgtacagtaagcaattaatagtaaacttttttttttttagtttttcctggtgatgattcataggaaaaacgagattctttaagccattaaattaaattcttaataattaagcaaacaaaaaagcttttccatgtaactagagagcatgaagtgccagagaaatgcagaggattgccatgggaaatgacatgcggacctaaccatgcttgcatatcgctctgcacccagaatgagaagtcatctttcaccagaagacagcatggcccatttacacataaattcttcagtaaagcactacaattgtccagttttctggaacaatcctggcctcatcagaccaagaaagatgactgactagttcttttccatctctagcatgtagagttagaactttggagcatctgttacagataagtggcagccatgagtttgggcaatgtaaaacggtgctcttggggccctgccagtgcttcattaggaacgtttgagctggttaaccaacctaaggagaaggaacatttttttatttccaaatcccacagtggtcttctttccctttatatgctgaagttttttttaactatgatttttttttattacccttatgttagactctttccttcaagaaagaaaaaagattggaaggagactggacaaaatataaaataagaaagataatgactatagtaattttaattttaagtcaagttaaagtgaagattcagacaagctgattcagtctcctctgattttagttagtggtcccttctccttaatagtcaaaacaaagcttagaaaacacgttcattccttttaaacaagattttatttttatttttcttgtaatatgagtgagtacgtgtcacgtgtgagcaggtgcctgaagaaaccagaggttcagattccttggatctggagttagaggtgtttatgagctccctcataagggtgttgggaaccaaactcaaatcctctggaagagcagcaaatgcttttaactgctaaactctctctccagtcccttctcattctttcttgatagatatgtttatcaggctattaatttttttgttgttgttgtttacacactttatacagaggcttggggaaagatggtagaagtccatgctgtctgctgtcctgcgcggggcagaccttacagcagtccccgtcgataagatcaggctattaatttaatagttctaagaattgatttgttcagggaagggaacaaaaaaagaactctgtagttacttgggaatctagagccgtgcatcctccatcagtcacctgcctctgcctccnnnnnnnnnnnnnnnnnnnnaaggtcagcctggtctacatagtgagacactgtctcaaacaaaacacactccaatacaatcacttttttctaaaggtctggcacctggtgggttcatcacactccagtggaaggccacacattcaagagtataagagcaatgccaacttcatgatttttggtgtgtgtgtgtgtgtttaacaaaaaaggacaaagtcaggttgataggtgaggcaggtggatatggcaggagggatgaatatgatctaaacacattgtacagaattttcaaatagccaaattttttaaaaatttcttttattttgtacagtccagtcattacccacctcccagtcttcccttgcacagttcctcatcccattcctcctcccctctgtctccaagaggatatcctcatatccacaccccacccctaccaggtctccccattccttagggtctcaagtctctcaaggcttaggctcatcttttcccactgaggccagaccaggcagtcctctgctgtgtgtgtgtcaggtgtgtgtgggggggtgtcatatcagctaatatatgctgcctggttggtgcctccgtgtctgagagatctcaggggtccaagttagttgagactgctggtcttcctatggggtcatcctcctcagcttcttttagcctttccctaattcaaccacagtggtcctcgacttcagtccattggttgggtgtaagtatctgcatctgtctcagtcagctgcttgttggaccttttggaggacagccaagctaggctcctgtctgtaagcacaccatagcatgagtaagtatcaggccttggagccttcccttgagataggtcccaagttaggccaaaaactggaccacctttccctcagtctcttttccatttttgtccctgcagtgcttttagacaggaacaattctgggtcagagtttttgactgtgggatggcaacctcatcccttcacttgatgccctgtctttctactggaggtagactctatgagttctctctctccactgttgagcatttcatctaagcatttccctttgagtcctgatagtctctcacctcccaggtctctagtacattctagaggatcccctacctcccaacctccgaggttgcatatttccattcatcctgctggccctcagggcttctctcctatcctgctccccagcccccatacctgatcatgttcccccccccccactttcctttctcccacctaggtccctccttctttcttcctcccatgattgctttcttctccctcccaagtgggattgaagcaacctcacttgggcccttcttcttgttaaccttcttgagttctgtggattgtatcctaggtattctgtaatttgggggtggggtggggctaatatccacttattagtgagtgcataccttgcatgtccttctgggtctgagttccctcactcaggatgaaattttctagatccatccatttgcctgcaaacatcatgatgtcctcattcttaacagctgaataatattccattgtgtaattgaaccacattttctgaatccattcttccattgtgggacatctgtgttgtttccagcttttcacagataaggccactatgaacatagcggaacatgtgcccctgtggtatggcggggcatttgttgagtatatgctcaagagtggtatagctgggtcttcaggtaggtctatttccagttttctgaggaacctccagattaatttctagagtggttgtgccaacttgcagtcccaccagcaatggaggagtgttcctctttctccacattctcgccaacatgtgctgtcacctgagtttttaatcttagccatcaaatagctaattttaaaatggaaaattggagaaaaaaaactccattagataaaggacagtttctccaataactactgtggggagagtggatatccatatgtaggggttgaaaccagacccttatctgattcttcttttaaataggctgtgaccatgaaacctacaacagatttgaaaatactaaagacacttgagaatattcctaaagacaaagatttcctacataagactccaaaactgtaggaagtgaaagcaagaattgatcactggaattacatccaaaggttttgcccagcaaggcaggtgtagtgaagaagccacttgcagaatcatacagaggattcaaatatgtagggaatcccgtctatacagttatgttaatgctgatagatagtctatagcaggtatggaatgaaagggaaaggcagatatatgcccacacatttgtagtaaataaaggggaacctagaaagcagtacaaaatagagttaccaaagcatattgtgtagtaagctcagtagaagttgtattcagtgtctatatatgtatatgaaattctcaaaggttgttttttaagtataaaacattactaaaagtaattaaggaatatctgatgaaatagatgtatgtagcccatggtgaatcagtcaaacctttagtcacctgattataatccaacttatattttttaataccatcctactcaaaatcgcagtggtttctctgtggattctgagaaacagtaggaagtagacactcatgcagaggccacagcaggcatagagtatttgaggagaaacagtaagttcacgtttacaaatggcgtagtcagggtttctactcctgcacaaacagcatgaccaagaggcaagctggggaggaaagggcttattacagcttacacttccatactgctgtttatcaccaaaggaagtcaggactggaactcaagcaggtcaggaagcaggagctgatgcagaagccatggagggatgttctttactggcttgcttcccctggcttgctcagcctgctctcttatagaaccaagactatcagcccagagatggtcccacccacaaggggacctccccccttgatcactaattgagaaaatgccttacagctggatttcatggaggcatttccccaactgaagctcctttctctgtgataactccagcttgtgtcaagttgacagacaaaaccaaccagtacaacaaacatgcaagaaattttctggctagaaatactgctgtgtttgagagccaggtgcttagtagttagcagcatcaactaacactcttaacctttacatgtagcttctgtttcccaggtaacaatgtaggtaggggtctgcagagaaccagtgagaatggtcttgcttctccagatctcttggggtgtgtctctgatttagtattgtccttgttgtacccttccttcagtacacatggactctgcaccctcccttgcctgcctggcttagccctttatatgattgccatttgttgctaggtttacagctcaactttgtctaatgctgaccactagaattcacatttaaacttgttagtgagagcaagatagttctcttagagaaagtgatccaggcatgggtgttattttgataaaagacaacacactggaaaccctcaaccctccttccccttccttctcctctttctctcccctgcctctgctccctcctttcctacacactactgggctgcactgggtagccctgggtagcttggaactcacagaaccccaaatgccagcacagaaagcattcactaccacactcagcaagaaacatacatatatatcatggcttcctctgctacaacaggaactatactgaagtctcatttaatttgcatttattttcacttttcatctttgaaagaataggtcacattactgaactgaataaaagtactactcggacaggtttgcagtacgcaagtttagaacagttttttctaacaagttgtttgttaaaataagtttctcactttccttgagtatctaaatgtaattattttataagtattttcaggaaccttcagaagttccatgttgtagtttgtcctccagaattttgtccctagatacacttctgacttttaaatctgcactcctcaaaatagcctattatgatataaccaagttatctcatatttcctccctttacacttttttgtttgtttgtttgtttgtttgtttgtttgttttaaactgttaggtgtttggaacattttttgtaattttgccttttaaagcccttccactttctttactctggaggctcacaccaagtctcattacctacctttaaaaagacttttatgttctgtatgtgtttgccttcattatgttgtgcacatcacatgtgtgcagtaccctgagaggccagaagagaggatcagatctccctagaattacagtaagctaacaggttggttctgggaatgaaacccaggtcttgagcaaaaacagcaagtgctcttgactgctgagctgtctctccatctccagcccactggttctggactcactgcatgcccccaaaatcctgagaagggttatgagtaagataaacatgggtaaacaaattaagatgctatcttccctgcacttaaagtgtttacacacgagcacactgtcttatgaagagtagccgtgctacacagcaaaacacccggttttttagctgaatacagactatatagccaccgtgagtgaagaatagctttcaggaaatcatcctggaggaggcaatactaatttaataaagttgcctatacatgtttgtttgtattgggtttatgtattttaacaaaatcactcatatgttacagttgatattcatagtttataaaatatgtactggggatatttggcatacagaaaattccttagtttagttttccttatggaaagccagtctcattacagccctaaagtattaggtttcctgtgtgcccaagtagactgggcatctcagtatagtttttcattcacctgttagccattgtgatagtttgttgctgttgtatttactcttgtaagttcccttgtatagtagagcaaatctctcttcagtgttcctcgccagagccatctggaatctttacactctttcatgatactgaatcgttctttgaaggagtccttaggaaattttaataggaatttgcatcgattttacagactaatttaggcaaaatgtggtcttttatagcatggagtctcatcccggactgcgtctgtttggtaagctctcctttgtgactatattgtgtactttccttattgctcacagtgaagggacggttcaggaaggccctggtggcaggggcagaagcagctggtcacatggggaagcaggaagggaaggctgctggtgttgggctcactttctcctttttgtgccgcctgcccacgtttgggatgggccctcacacaccagttaatgcgatttaggatgtcacggttacacccagaaattcatttcctaggggagtctagttcttgtcacattggtagtactaaccacacacggtgactttaattaacatcttgtgcatttttctcagcatcactcttaaatatgtgctaggtttattcctaaataacctcatttggtcctaatatgacacaagtttttttcctttaaagtttctaattatgttactgcagatacatagatagaaaggctgcattgaaaaacgtgctgtgagaaaatgagtagtagctcagttggttgagagctttgctgtactcattgcaagccctctgctggttctgggttttccagtatgaagtctcttatttcctgttgaaacttccatttttggatttaatagggagtgaaatccagggtaactcttcagctaactatcattcactgaagtatacatacgtatacatacagatgcacacatacacacccccatccctttgaagtgcttttgttgctgttgaatctcactttttttcagtagaaggttatttcccaattgtgaggaaatgtttccgcactacttcccgttcatttcagggcatcttcctgcttactctgtgataacccagaatatctatctcttctgggttttccatagtagtttctgttcacgagactgtattttgtgtatttgaatttcacatgattttccacccatcgtctgcgtggaccccaggaccagctttagagtgctcacatttttctaatattctctttttacaacatttgtgactttctttaatattcatcagagttagattcatcattccttacctgatggtgtttctgtgttgtgtagtagtactgtgttcttacctttcagaacacatgggaggctttctgtgtcacctgaattcacagtgtctttcagaaatgttccaagcctaaagtaaatttattttctttgtattttcccactccatttccccagtaaaatttttgtgcctatgactttatacatttagttttctgttttgaagaatgaaacattcattgagtgagtttggttcctgaattatagagagagtatctgttgtaaaaattttgccatggcatatgggatggataaatcgcagcccctgtgaagcagcagaaagacaacgatgagagatggactttacagcctcgttatatttctgaagtgttattttgtgctctacgtttcgacaaggcttacttctgcttaaaacttttccctttacttaaactttatgtgtcttgtggaatagtttatttattcagtattctttaaaggaaaaatctcttagtgttcccagcctgctcataatgtccagctcccgttgctttggctcagagttctagtccacatcatgataaacaccttcgtatctcattatatcttaaactccataagctctaggagcaggcgcatagagggagcgtactgtgctttttaaatgagccatggcaagcctgggagtggagctcactgctgggaagtagaccaggtggcattaacgggaccattccatgtggtaattgcttaacacattaatattgaagtagaactggcagcccaaagagcagtccacttgcagcttctcatttcctgggagggagaacagtcagacgggtgcatatttgcagctcacatgtcagtatacaggaagttgtgcctttttatttctaggtctccttgttttaatttattagcttattgacaagatactgtgcttaaatgctttaattttttcaattctgataccatgagataaactgaactgttgtcataaagaagccttactgtgataaaataatgtagtgtggagttgacctagtcagaagatttgttggcaaggacagatagatatacatgctacaccaaacctatagtaacttaaagtttgttaattattcatttcatggttattatcatggttagaatgtatccaggtaactacataattgtaaggtagtatgcaaatctcacgcaaacaatagaactatctctacatgattgtagttggtgattttgcactaagataatgtaagcagacgccccgtcctagcaggcaccacacttgcaagtcctggaggcccttctgacctgcccttgctctgagtgttctctctgtcgtgagaagatggctgcttttgcagacctcaggtttgctcagcttctctagattatcttgaaaagaaagataaaaatcagtattttttttttcttgacaataactgtcaggccatgtttttttttttttttaataaaggaataattaaatttagaaagtactttttaaaataacttgtttgtgattttactcttgagttaagatgtattttcttttttcaaacttcgtctctttttggtgctgtgcagaatactagtctctatacttcatgtatttttcagtattgagatatatcgactgtgtgtggaatttgatgtgatgcgcttctctgtgcctgcgttctgcaggactgtcgatttggaaggtgtttatttactctggttatattttggcctctaatccctctttgttttctgtgcatctccataccctgctaatgactacattgtcactttctaagcacaaggaggttccagagctgtgttttatgtttattttaaactaataacagaacatctttatggtaatcagtcactgtttagggaagattctggctcgttaaaattctttaaaattagaagcaagcatttttataaattgctgttcctcttagatttgtgcccactgctgtcttcttcctctatcctatcttttaaaacagtgttgtaaaaagaggtttttcagcctacaagatactgtgtttttcattgactagaatggaattaaatctgtgatgagaaaagcatggtatctcactgttctattgtagatgtgatgcagcgtgaaccctgccaactctgttcactctagttctcccctcgacactaaaagcaaggcagagaacatcaggaaataaatctcaaaggtcaccgggcagtggtggcgcacgcctttaatcccagcacttgggaggcagaggcaggcagatttctgagttcgaggccagcctggtctacagattgagttccaggacagccagggctacacagagaaaccctgtcttgaaaaaaccaaaataaataaacaaacagacagacaaacaaacaaacaaacaaactcaaaggtcattattgtgtaggccattgtgcatggatcagcttcaagtgcattaaatatagtagtgttgcttttacgcagaatccaagcctgtgacagggataccaactagctatagaattgtaaattttaggtcaaaattgtattaattctttagctgtaggattgtgtggggaattgtagtaattgtttagtaagcaaatttcccttggatgttagaacattgcaaaagagaaagacccagaatggaaaagcctgtgtgtgtatgtggggagggtaatgaccagttacattaaagtgaggaaattttattaaaactcaagctctttatagtctagaagtacaataataatacttggaatttctgaacttttacgtgataagctatgtcatattgttttccaaaggaaaaccgtgtttttgtattaaaacacaagtttccagaaactcttgattctagcatagtcagcaaagttcccatgattccttggccaaaataaacaccaaacatttcctaacagtacttggtatttaaatatgccctaacagttttgtaatcattttgaaatacagagatgcatattaataatatactgaaagaaaatcctttcattttaaaaattactacttaaatacttactgagtgctgcatagtttttaagcctatgcataatattgaacactcatttcttgatccacattgatttttgttcattgtgggactgaacatttaaaattctatttctacaatcagaatgcctgtactcctaaatcattatattgaaatcttcacccctatagttgtagtaataggagtgggtttctgcaagggataatgctgatgaaatgcatgtgatttgctccttacaaaaacccaaagactctgtgtatcctttctgccttgtgagaaaatcagcaagaaggcagcgcctgtgaaccagtgggccagtctgtgatcttatgctttcctgcttccagaactgcaaacagttcattttttgttacttatgcgatttctggagcttttattttgttgggggctatgattctagaggttaaatctagggtctcaggaatgctgggcaagaattatgccacatcttcagacaccatactttatgttgaattttttaatattttattagatattttctttatttacattttctattttcccctctaaaaatcccctattccctccccactccccctgctcaccaacccacccactcccacttctcttggcattcccctatttggggcatagaaccttcacaggacctagggcctctcctctcattgatgactgactaggccatcctctgctacatatacagctagtgccacaagttccacaatgtgttttcattgattggtagtatagctccaaggagctctgggggtactggttagttcatattgatgttccttctatggggcttcagaccccttcagctccttgggtactttctctagctccttcattggggaccttgtgatctgtccagttgatgattgtgagcatctacttctgtatttgccaggcactggcagagccccccaggagtcagctatatcaagctcctctcaacaggctcttgttggcatctgccatagtgtctgggtttgatggttgtttatgggatacaacggccattgaaaacttcacaaagatagaataatgtagcataatcctacattgaatgggaaatttgtacaccatctgatctattactatgcttcaccaaatatttcaaatattctgtagtaactttttggaaacatgttcacattatagaaatgaaaatgatctaattgtacatatccatgacagtttagaagttattagtatatcaaagtgtagaagaaaggattagattttgtatcagtctgatcttggatctttacctgcttgtatggagacagaatgacatattgattaaggccagtgatttccagtgttgtgttgttgttgttatttttttttaattttgaccccattgtttgttatataatgtcacacacacaaacacgcaaagatgaatagatacataataaaacgctggcacactggtcagctccaattactgctgtgaaatacttgagagtctaaaggagaggtttattttggctcatgggttcagaggtttcagcagcctctgtccttgattccttggcttagttcctctaggctcctgacgtgatagggtggagaagacatggcagaggaaaggtgccagaatggaaagagaagaggcttcaaggtctcagaacctccttcagggcgcacctctaatggcctcccttccccaccagaacccccacctaaatgcttcagtgcctcctaacagcacgatcagctgggtacattccctcaacacatgagcctttaagatgtaacagtaacaaatgctctggattcatagggccatttgcttcccctttcttctttctctacttccttccttcctccctttttccctctcttccaccctctcttctttcttcctttccttcttcccttcagttgaagataattatattttaaagcattactcttaggactcacctaactgaaagaaactaattcaggccacagaactctgggtcccaactggactctaaagtgggctatgaaaagggctggtttctaaggaaatgaagttgtaatgatttttctaacattctagacaaatcaagattccgctagttaagccctctttaggtcagaatttcttggaaatggtagctgtctatgacattcaatttgtaaacactatccactgtctgtccaaaaatgaataattatttcataaggttgctgatattcctctggctatttcacttgaccagttatgcttttctctcttcctgtggagataagtttatacaggaaaaaaaatgtttttacttatgaatggcatgaaatttgattagatttgagtaatagaaaagcttttcctttggctgcagattattgaatttatatcatgcagcacgaaaatatttatgttatcctagactcactatttggaaactacttactttcttcctcaacagcatcttttgcattttagacggggttgggggcacagaatatctgctcctaggtggggcctttctgctgtttacattcctatcaatagccagaaatggagctcttgacatctgctggtgctgcccactgcccttcttgcaccttgaatttgatcttaagtagctggcaaaaagaaatagtaaagagaaggaaaaaggagtgctctcctccgacctccttaaaggagtgctttcctccaacctcctgactttgatcttcatggtccaattttttgtcaaggaagtagaacagtatttttgacttataaatatttcttaggctgtctctggttgctccttttctcgattctaaggtttctttgactcagtttactttaggctgaggcgtcactggattgatgggctgctccattcttccacgtgagtctattagacgttcacgttcagttaaacactaaggaagcaaagctgtcagccagtgaggagctaatgaaatgagcaatttttaaaagaaaaattacaaatagctaatacctattcaaaagtgctcaaattccctagttatgaggcaagataaaactatcatcataaataagtccatcatcaagaaatctgaatagaaacattgaagaatgtgaaagaagccctattcactgctagtatagtacaaattaatacagtatcgaagtcagtttggaggttcctcaataaattgacccagcttatgacccagctcttccacacctgggtatatacccagagaactccatttatagttctatattgatcgctgctttctgtacaaggaaatagaacagccatcacaagcctatgtgcacatctaacttactatgtcccctctcagtcccccagattatattttaaagtgtacagtagagtatttatttgtctgctgctgtggtaaaaaagcacaccaaaagtaacttatagaagaacttattttggcttagggacccagaagtccatcttggtgagtaacaatggccagaaggagcaggaagctgagctcacgtcttttactgcagacacatagaaatggggcaaggctatgtgctctcagagcttgcccctagtgacacgtttcctccaacaaggctgcacctcctcagctctgaaacagctccacaagctggggacccaagtgtcaaatgctcaagcctatggtgggcattctccttccagccactgtagacacagataggtaactttgtttctttttcaaaacagtgtttctctgtgccctgacttctctggagttcactctgtagagcaggctggcctcaaactcacaaggtctgcctgcttctgtttcccggagctctgagattcaaggtgtgcacaaccactacccaactaggtaaatttttaaactaaaacgtatatgagtttctttctgttcatttgggttttgtgtgtgtgtgtgtgtgtgtgtgtgtgtgtgtgtgtgtgtgtgtgtgtatcacgtacatgcatgataacttgcatagtggtctaatgctttaagattctttttgtctactgtcaattcaattttaggcagtaaacaccatacctagtagctgctttgttttttttttcccaatgctgaggattaagccaagggcctcttgcatataggcaaatactttaaggccccacatggttgtgcatatttatctcagcactcaggcaggaaggttgccataatttcaacctgatgcatctacttggagggccaatcaggactacatagcaaaggcctaactcagaaaaactgaaaaaaacaacacacacaaaaatccactaagactcagctatacactaaacccctgcttctacactctgggtatttttaaacatgaagagtgcctcttaccaaatttacatagactcattacttttctactgctgttttccctatgcaatattctgtttgtttatattctagtcttgtgtgtactaaaatagaagagaccgttaccaggtttgaatttatagaatgactctgtgaatcttgacctttcttgtcacttatttcaaatggtaacaaacacataggacccacagcttctaacgggaaacatctcttacaagctaatagatacttttagcctaactcagtactggttcatgtgactctgttatgtatttaagaagttcttttgacaaacttttacttaatgcatgaccagattgagaattaacaattaaccaattgatgcctggcatgtactaaacacagttatttgattactcaaataagccatatgttaacttgttgagttgggttacttagttttgtttcttttttcttttttcaagacagggtttctctatacagccctggctgtcctggaactcactctgtagaccaggctggcctcgaactcagaaatccccctgcctctgcctcccgagtgctgggattaaaggtgtgcgccaccacgtccggcttagttttgtttcttatcaaactttttttttattctgcttacttgtgaaactataattatgtcctttatacttgtatgatgccaataatgaccttatatgaaaagatatatttttatgaaacttaatgctgaatgttttagaaaagaaatatgggtaagccattagaacactactgttttgacagctaggtccaagtcctggctacttgaaggctgaggcaggaaaatggcttgaccccgggagcttaatgtgatcctgggcagcaatactgaaacttcagcagtagggagcttgctttctctgagttagagaacagtaagagcctggtactttgcttctaagtgcttgaaactggaattacttttaaatgcctttaagatgattgaaagttagatgtattaaaaaaaaatatggccaaagcaaaacaaaaacagtgagcttgagtcattgggtcctatgatgtgatatggaccataccagccataagcaaagcagtgcacattcatgtgtcctttggctttgtagtgaggttattagtcagctggtccatttacatatcaagtaaaagagtatcctactctttcatagtttgttagttcttcatacactcaaagattttttttgataaatcatatggatattatgaattattcagggaaatatcagagacctgattgtcaggtagtaaataattaaaaatggcaccctttctgtgatgtgatagattgagtttattgatatagatttggttattatttcaaagaaacatgtcatagaatgttgtaatgtgtgaaaagaaaaaccaaccctagatctactcccacacactccctttcgccagctgactccgtgccctgggaaagtagggcagccgcatggtgatgtgtgttgtgccgtgtggtgatgtgtgttgtgccgtgtggtgatgtgtgttgtgccgtgtggtgatgtgtgttgcttggatttggagtttcactaagacacctgccagatggaattagagcttttggagcataaccaacatggactaattattagcttaccatgtctaaatacaaatgaaaacccctacaagattctgtacccaaactctgaagaaaaaaaaaaagagctgttttttggactaaaatttcatagcttttgtggctaatgaggcatgaaataaattggcaagctcaaactgctccaagtacagtggtacagtgtgcatgctctgatcccagcccttgggattccagcaaaggtcacaaattaaacagtcaggattaatcaaaactacaatcaaataaaacccaatcattaatcgtctcctgagttacaatggagcaattgtgtaattgtgtgaggcgcactggagagagctcttttgtcctgtataggaaaatcaacactgaggtgtcaagcagaaaaatgaaaccctgcaggtgaagctgtctctggagccaagagaaactggcagagcatttggagttgcgaataagccctcagagtattggggggccctggcactgagcagcagagtgtgtgggtgtctccatggggccctccacagaggttagtttatggtccagcaagccatttgctgagcagttcagtgttgggggtagtggcagttctacgcacaccccctctcttcaaggtaatgccaagaatttactgtgtgattcgcagctttgttatgtagaaggcgaggttatagaaaagatttttccagaaaactccatccttaacaatggaggggtggtagcaaagaacccccccccttgagcccttgttcctgtaacagtgctttgcaatacttgccctatttgtgatactgttttatattccaaaatggtgattttttttccttcatttttctttcttattaatagtattaatgtcaattccattgcctctctatttaaaagccaacaacaatactgtccagtggctctatgatcataactggcacttttgagccaggtatgtaatcccagcactcaggaggccaaggcaggaccatcacaacttggaggacagcctggcctccatagtttgggtttggtttttttttttttttttttttttcctactccctaccccagaacaaaacacacaagcaaaagactctgttttttgtttttgtttttgttttattccactgctgtatatggatgtgttttacatgtactagagtatctgcccctatgtgttggctttctgtctactatgctacatatacatatggacgtcagaggacatcttgcagaagtcagctcttttcttccaccatgttggttctgggggttaaaaacagactgccagatctggcctaaccctgcgccattgcctcagcccccaaacagaaaagttttagacaacttactctgcctgacatctcgtaactgatttgaagcatgggaagtttgagtgtaaatattgtagaacttgaaagatgtggctcagaggcagagtgcttgtgcttagcctgcatgaaggcctgggcttgacctttagcaccacataaaaacaacagcaacaacaacaacaaggtgggctggcgtcatacttttaatcccagaggcagggagatcagagagttcagggctacaggctcagcccctgagctacatgagactccgtctcaaaaataaaggaagtaaaacttagagaaataaataaatcaaaatttgtttttatgttgttttttgctgtttatgtactgacctctctttacagaatgctgttatgtcctgtgtagaacatgtattcttttatttcatgtagaaactaatgcccatatgtaattggtttagttccataaattcatgttgctaaaaacatcactctggctttatagtaagatttcactataatggtatattattttggactttgtcttttcatttatcaaaaataaataaaatcttgggttcaatttttatggaaaataaggcctcaatattttgagaatagtttctgtactttgtaccatcacaaagatgtgccttgcatgtttgaattcaatctattcatatatactagattcattcctaaagtaatgaataacatgttacaaatgggaaatcatataaacatgtatatatataacaggatttttatatttctttatacattttatatttagctttatatgaataaaattatatacatagttttccaatttattatgaagaataattgagttttaaatttttccttagcatacaaaataatagatttcatagtgacatttccatatgtatgaatcattgtgctctgcacatgcacacattacacacatacacacacatagaaatacacaccattaacaacctctcttgtcccccttctaacttgtctcttcctctcttcatgtagctcccttctgctttcatgtcatatataagaatatagataaatatgtatatttcacatggattcctggtgcctcaagagccaggtggatccctgagtctcaggtcagcctgttctataaaggctcttccaggccagccagggccacataatgaaacccagatccaaacagtgacaagaaaaaaaaattagactccagatgtaatatggtatgtttgtcctatgtcgtcctaccgtccccacaacaccttttcttaatccccctcctccccttcccctgtatattagtcattcactatagatgtgataaaacaccgtgaccaagacaactcaaagaagaaaggttatttacacttccagttctggaggtttgagccattgatggcagagcaaggccctggctgcaagagtactcacatctggaattggaaacatggaccagaggtctaacttgaaatggctggagtctttagactctcaatgcccaactcccagtgacatacttcctccactaggactatacctcttaaacctcacaaacagctctaccaactggagaccaagtactcgaatgtcccagactatgggcaacaactctttcaaagcaccataccctacacaatccccttacagttttatttttttggtgcatatttttaatccgaattttgtagtttgtcaacttgaacatttacactctgcttattgacaaccttttgttttggtgtattacagttcagagaatgtcattattcttgctttttttttttaacatatgtaagtatatttctctagcatatattctttaatagaatttgctaataagaacatatacattgtttgtttgtttgtttgtttgttttgagacaggtttctctgaataaccatggctgtcttagaactcactctgtagacgagactggcctcgaactcagaaatccgcctgcctctgcctcccaagtgctggggttaaaggcatgcgccaccactgtctgacatacatacttaactttgatacctcttactgaattgctgccaatattagtctctccccacatagtattatagaattttatattcttatatgtactagacaatatccatatctacttactaaatttctgctgacttagttttacatttgtattatccttctatatcacagttaactctcctatctttgggaatggtattccataatacatttaactgttcttcccttggtaaataattaaattacttttaaaattcctctattatatatgttatttagtaaaagtttatatgaatgcagattttcattagcatgaaaataatcttaagccaaagtcatttcatatgtgtacatctgcagaataaaatttgcaaagtagaaccataagatcagaggacttcaagtccaagttgatacttgtttctgtttgatatctgatttcaggtatatatcaccacacaaatcttctagttgataccattaaatgaaaataacagcatgggaatgttatatactactatttgttttaaaagaaggaaatttgaagctgggcatataatgcattaacctggggcagtaagaacagcatgagtgaaggtgtttttttttgtttttgttttttttttttttgtcttttaactataaagcacaatattttgagacagaatcacagtgtatagtctaaagtgctcttaaatctcaaccctgctgtctaagttccctccacactagtatcataagcatgcagtgtcatgctttgactacgtttatatattctttatactttttgaaaaaccgtatgaatgagacctgagtttatagtctgactggtaaatcacatgcgtagctgtgttaaaatctaatctgcatggagaaaggtggggagtgaatgtattacctatataatattttaatattatgtttctttaatatagcaataaaagcatgagttttcaacttagaattggatttaattatacaatgtgtaacactgacattattgtgctctcatttcatgtatataaagtagtaaatgtctgtctcataaatttgtgagaaattactttaaaagtacagaatttacaggcctactcataatgcataattaagctcatttaatctattctgccaattatgaaataacttagcccagtacttctcacccttcctactgcgactttttaatacagttttttatgttgtggtgacccccaatcataaaattattttttgttgctacttcataactgtaattttgctactgttatgaattgtaaatatctgtgctttttcctttggtctcaggtgacccctgtgaagcaatctgttgaatcccccagggctggcaaagcacaagttgagaaccactgccttagagcttatctttatacagatagcatttaacatagaatacacattgtcttttcctctcttcaaattgaatgtggaggcagaagtctttgttttactaggaaagaggccatgaccctgacttggttttgtgacagtcacttcaaaagaagtcataaaaatatttgcagacagtggaaaagtaaacacagcttgggaactgatccatgtcgagatgaatatagaagtgaactggtataaagtttcaaggtgcaaaatagctgtttggaagctgtgactcatgcagttgttctcagacagagttcacacattttcaggatgagcatactcttgaacggcctgaagacacgggcatgtgtagcatgcagtatattcttataagccagaattgttagcctctgagagcgtctgagggactcctgaagaatacatttggcagtaatgataatggagacacactcacagagatatagcaactttaaacttattttatgaaccacagtggaagagcttcaagagaccctctcttccttccaaattcattaactgagtttttccaagtaatttgaatctcaaagattttatttagttgttttttttttaaatcaagaatgtcagattagaaagggctagaaagtttaatcccaaaggtttctgtaataataaccaatctaccctggagctcctaccaactccagcgattttgaggaattttctgtatcatcttgttgtctggttggtttacctataaacattttagtttctgcatgcaatatacagcaagcaaaactaaatggtatataattatatatcagacttacattccatactacctatataatataaaactattcataaaacaccccaaatgaggtttttatagtaacattaaaattactacctgaaataaaatgtccccacttcttctaaaataacactagagcttatctttaagcccttcctctattctcaagaattctggtaccgtgtccagtccatgtctgcttgatttcttctcttgtcttttttcttgtcagaaccatagttgtgctttataggtgattcgcaggcgtggggatacttacctgcccctaagtgaccctcccgtctttactgtccctatccacttacctcacagccctctcacaccccttctgtagtgtgtcttcttctgtatgcacccgtgcttcattccgtgtatgtgtaacagtagctcatttacacttgctatgttgcattccatcctgtgactataccacagtttacccactcaaccataagtagaaatctgaggtgttagctggttggagatggtatcagttctttcattccacgtttgcttgggtccctgagctcaaactcaggtagtcaggcttacatcataggacagcaagtgatctctacccactgcgcggcctcactagcaagacagtttggcgatgttacaaataaaaccttgtcttttatttacctctctcatattttgggcttattgaaagcatacattttttatgtttgtcattttgatgtctagtgcattgaaagagtaggagagaagaggaaggtagacataacaatttagatagtaccattgcctttcttaaaatgataattttatgtttctctagatcttttctgcagttgtgttcactatagttctttgtaatggaaactcgaactcttaagtactagctagtaaactgttggaatttattaagcaataatgtttccatgtctctctagccaaatcttctgctccttcagaatgactattaaataaacttttatttttaactttcaaaaagttgactatataaaaccagtgatagatacttaaatatgaaattaagcatttacagttgtaaactgataataactgcaattaggacttcatgtttcctaacctttttagttttgggttcttcttagagcttattttagagatggcaaaagagttttcataaaatataacctcttggaataaagaattaggaattgtaatttcttgtttcaatttctaaatttagtttagataattaaacccatgatttattttacatgttctatttaagagtttacaatattgttcctaatgcacagttgggtatgtccacctggtgatagactcactttgggttcatatacaaccacattgcttcttgtccaaaacagcaacactgtcagggagtagcctgtgtcataccatggtcatgctaaagaaagtaatactgattatggggtagaagacaaatatttgctttcactgaatacattttagaaacaagtccagttgatcctctattagtaaaagctctatttgtgagtttactcgccgctaaagcatatttgcaaccccaaaccaacacttgggacatgttcagttcttcacatctggacagagtagcaaacaatttgagtcatattttaatttagagacagaaaaggtaacactttgtctttctggtttgggtgttgtactgtagacagctgacttcacatggtctttagcaccatctttcccacaggtttgcaaaaacaaaaaacaaaactggggatcttgcaaagctttaagcctagggcttgtagggtgtacagggtcctaagtcccaaaatactaagctattccttacagagaatatctaatacttgtattagataaccttcaccagtgtattagatacatacagagctttttgctatgagtttgttgtatgtctatttgttattatataaaataagattcctttaggtagaaacatacatagaacgagatttggttgtcaaagtgctatggccagatacttctgtgaacctagttctttcattcttctcttgattctcttctcagaatttgctaattcagtgttcacagtactttatagctatcatgaatagaaaacagtgactctacttgatggccttctacttaaggtattatcaagccatatttcttattttctctatcacttattacaaagaacggttggccttcattcactacaggtagagatttaatttatccaagcttaaatgttttcgtgctgtgatcttagctattatgtgcagtacaggtgtctactacaaaagtaatgactgtcttctgttttgccatgtactgtggcccccaatgacattgaagtgtctaatcagcaacccagtcagttgtcagcactgcaggtgcagcgtctggtctgaatgtgcttcacttctaagtaaagaccaaacaacttctcctttgaggcttctcaaggtcattctcttcctgatggatggtatatctaaagtcatttcaagataaaaggtcttttacatatagttttagtggtaaggcatccagttggtttagaaagctttataagtgatacatggaattaatataataaatgctgatcttccttaaccacttctgtaagtttatgcaattggttgtacagttacacaatgtgaagcatgtcttctttttgtgctaataaagttaaatgaaggactaaaagttactagcatattcaattaaaaaaaaaagaggcaggggcttactctatctgctcagagcatgtacagcagacagtatcattttagaatcaatcactcaaacactctatagactttgatgctttcaggactcacttgcttctaagtttactcttggagatgggcacatgttctgagggcattgtatccttgaagtaatactgtcctatagcactatccatcaagaaagacagccattgtcttcatcggatcagctgtacctgtttgcagaatctcatcatagctgggcttgttgacaggggatattcgatcagaaaaggaaaggctggatggaaaggaccatcagctcttcacctgagattccagcagtagttcctcccagccatttgatatttttctgccctgattgaacatggcccctgagtctgcaagatggtagcatatattgacggtggaagactaacaaagggtgtttgatctttgcagcaatagggaagccatcagacatgctgggtacagaccttcagtgcatctgctttaaagccacacatgctcctggccatagcatagcccttcacccatacaatgcaagtcaacttaataaattcactgatgctcctggaggaactgtggtggaagctaactttgatttgtcatgggtgccttataaggaacctctcttatatcctctttgtcttcaattctcccctttaatcctttcaaaagtcctcttttactcaactaccgttttgttgttttggttgtttacaattgttcctcacctagctactgaccttgtagtacagctcagctgttctatggtagatgttatagctaatgtgtgctaaagtgagacttcctgttcttgaggcactgggtcggttctctgaccttgctgagttcccgtccatcattcactgtgcagttgtcctggggctatagagactgttgaagggggagctctggactcaggcgcctgcctagaccctagcaacaacagtggctcatctccaaaatgcagcaagggaacacaatcttggatctaattttctttcttctcttttccttttcctttttcttttcttttcttttcttttcttttcttttcttttcttttcttttcttttcttttcttaaacaaaagcaacagattgagttttctactctaagaacatctggtcttagaactagccctggcttgtgaaaggcacttaggagccatcgtggtctctcacttcagctgtttatattgactcctgattcctaccttacagattcgttatgcttcttaattcctgctcttctgatactagacttccttccacacagtaattattggcaagtcggttcagtaaaccaaactcctgccggggtgagtctcagctgtttgtcattacagacgagctgctaccagcctgctcattcagctccttgtactgtcacctctattgtcacttcccactactcttacagcaaatacatatgtaatctaagggagagagtttttattttaatctattacatgtatttattatggaggggggagcaaaggacaatctagagtctcttctctccttccatcatgtggcttctgaggatcaaacccagaaggaagtcatgaggctgagagcaagcatccttacttatccaccaccatcctgcaggcccgagacgaggtgaggtgtttgttttgttggttggttgttccttatctcttgtggcttgacacatcttgctggaaatggaaccactgaagtatcaatgaggaagcaatatttcctaatcatagtgaaagtattgtcctttggtttagtgacacattaaaataattatttactagatgatgtttaaaatcttgaaaaggcaaactaacacaaggtaaaatcgagtgtgcaagatactttgtacaactcaaaaagagtggctgagggtaggtcagaggttgcacttgagttgcttttaaagttgtaaaggattgtttgtttgtttgtttgttttgttttgtttttgccagtagaaataaaccacactttaaccttgcagaggacatggtaaaagcagacaatagttagtggttgaggaaactttcttttctataaatggatcaatgtgcttaggaggaaagttgaaagcagaccatgaagacattcatgtgcactttgaaaatttttacctttctctatttatatattaaaagaatgtaaaaatatctaccttgtcacacccctgtaatcctagcattcaggtagtgatatgagaagtattgtgagtttggagccagcctggactacacaacaaaatcctgtcttagcagtgaggagtgatctagatatagcaaatgagtcttctaatatcaactttcattacttaaaaaatgcatacgatattacctcctaattcttggtggagttctaagtacaaggaaagtatcaaggcatgagagtaagtgggggtgtagtgggctctcggtcttgctgctgtccctgctttccattccctcagctacatttaaggaagccagcattcagagtgtcttatacgcagaatttacaggaaagttaataagagattagaaccacagcattcgattacactgggctcctccacagtatacagaacaccctactcacttcatttcagttgttcaaaaataagcagaaactgttgtttcatctttgttctgttgtggtaagatctagctcttagaagaattactaagaattaggattaattacgctaaagtaagcccattcagggacttgagtgtggagttccagtatagcactctagttgcagtggtgagcagttggtttggggctggtttggttttgtctgtggcctccctcagccgctctaggccatcttggcatgttttgcttcctctcattaccagagtctcctgtaccttgccttgggagtgtctttgtcttgttaaccttcttttgttcgttttagggcagtctattctttgtgtactgagttgattcagttatctcttaacatttattttctcgcttgatttttcatagacttattggagagtaatgaaagtctatatttcctaatgataactgaaaaaaaggaaaaacaaaattctggggatgaggatgtgactgcatggtggaatgtttgtctggagaagtccctccctgggtttgatcccctgtactgcacaaaccaggtgtagtggttcatgcctgcatcccagcacttgaacgaaggtgggaacaagaggaccaggatcacagaaaaagtttaaaagttcaaggtcatcctcagaatatagagtgtttgaggggaggctgggctacatgtttcaaaacctgtttcaaaaacaaacaaacataaaaacaatgaaaattcttgaatagagttgttgaaaccctacttcctgtacgtctgttctattgccaagctgcttatcacataagagggaaattttatttgtatgaagtcatcgtaggtcttacaagcctcactttaacatgttctgacaaatatgtcaccctctgacttcatcagtgtgtggctgtcatggggtttcccccacaaactaagatgtttactagctagtaaattgtgtgtgtgtgtgtgtgtgtgtgtgtgtgtgtgtgtgtgtgtgtgtgtatgtgtgtctgtggggtagacagtagaagacaacttaacttcagttacctccttcctcctttacatgagttctgggaatcagactcagattatcacatttacccgttgagccattccaccagtccattgtagaacatggcctttgagaaaagtcactttaaccaaactattggtatgcagcacataactgttttggagggaatgaagtgaatattagcttttttttttcttttgcttgtaaacataatattgggggggggttgtatgttagttcaagaatggggggttcatgtggaggcctgaggttgccatggggtgtcttctttaatctcttcactttattttctaaaacaggggctcgaactaaagcaagaactggctgactcagcttattgtagctagcaagctaagatctctgtcctgcctgctaaattctataattacaggtggattgccataccgacccagcttctatgtaggttatccaaaatcaggtctgcccactttgtgccaagaactatctattgaaatgcctccctaccccaaatagtaaacttacatatttttaaaaaagatttaattttctgttatatatgtgtttttgcatgcctgtacctatatgcccaaagaggtcagaagagggcattaaagctcttgggattgctgttgtggaaggttgtgagttgccaggtagatattgggaatcaaacccaggtcttctgcaagagcactaagtactgagccattgctctaggatgtctctgccccaatatttaaacttcctgacaaattattctagacagtatatatgcagtgtttaaagcatgagtaattctcacttcattgtcaaaagacttaattgggaatctgaattatgagattagttatagaagaaacacatgcagccgaaggtatggccttatagttacttcttctcaaatattagcttccttctagtcagtgtagttgaacttagttaactttgaaatagttgtttaaacgtttgaaaatttcaaagtacttttatacatatccagtgtatataaaactaaaattacatttcacaacacataaatgatcatattgccataccatatgaagaaggctacaaatactatttatcagtattgtgagtattgctcagaaggagtgattgcttttgttttgttttgtttctgtttctgttttaaatgtgtaatataagcctgcccctgtgcctgaagcctgtgtagttagttgtgtccttctcctgtacttacttcttctactaggaactccctccctccctccctccnnnnnnnnnnnnnnnnnnnncttcactcccttcactccctcactccctccctcccttccactcgaaatgtgaggatgaccatgaacttgtgatccttctgccttcagttctcaattctgaggttcatcccacgcagtgttcaggaagccctggggactgaatccggggctggtgccatctagacgagcactccaaaactgagcatccccaactccggaagtctcgtgtgttgcttttaccctccaagcatccacaccctggcagacttgactccttgttagtacgccatgggtccacgttcccaccctctttgccttggctttcttggtcttgagtcctggcagtgcagtgtattagaacaatgcctctttactgtcattatctactgtcagtccttcctggtcttgcctaactgagccagtaaattagaactggcaatggatacataggggtaagaagcatgcatctgttgtgaatttccttttgctgtggagaagccaaaaggctaggcattagtgactgcttcagtcttctctcatggttggcagctgacaggctcactgatgaggtgataatgaactcaaagtctgccctgctggctgggtgggaaaaaaactccagacagcaagcatacctcactcgggagcctgccaagagtttcctttattatagaattcatttcaaggaggttcacaggtagactttcctggatacatttcagaattataacttatgattccaaagaatatgtattttgctttcaacatagcaagtcagaggtcttagtctcagttacttggtcacaaaagaactgggaagtaagacttgaacaacgttcatttttgaaaaataagtatttcttttcatttaaaaaaatcattttttcgatatacaggaatcagaattcttgcatttttagctatccctgtttatttgattgattgaaagtttttctgaccatcccaaacttcattatcaactcttgtcagtacttacagtaaagctggggagtggcccagtgagtaaagtgcttgttgtataagcagggtttttgatccccagcccccatgtaataactggacacactggcagacattagtaaccacactgatgggacacagagctcataggcagccagtctaccctttccattgacgtgaggtgcttaagattcagttagagaccttgtcctcaaaactaagatggagagcagtgacttctggctccatgtgcacattcaggtaaatggacagacacacttttaaatacttcaaggaaatctagttttgttttcagttgtggatattggtaaatcacctataatttcaaatgcagttcaattccactgctgttaggggctgacatagcaaagtatatagggtcctcttgatgctaaagctattgagtactcaagtccttcacatcaaatggcatacactctgcatgcaaactgtatctatgctcccttatactgtaagtcatcttaagctcaataaatgtcattaaaatgtaactcagtaaatagttactataatagagcacgaaataataataaagcctaatgtgtatgggtgcactatagactaaaaattttaaaactactttccacccatggttggttgggttctgatgtagaccccacagacacaggtagtacaggaggcatcttaatattagtgtacaaaatgttttagattagttactagagttgtgctaaatataaaatattaaaagaaccatggaaacctttaacttgaagcatgactatagcagaattctctttactcagagttccctgtgttcaaagaaagctgctcagtgatgctcctcagcttcaggcaaacatgaaccttgggaattgataaaaaaaagttgtatgattgtctccatccaagtttccctttgtctctgacctgcagtaattttctagcacttaagcagcttcataaggaagaaactgaagggtatgcttgtagtaagaggaatggtggagtgtgccaggagtctgcattgttatcaccaaaggttgccagatccccggggcctgtcctggttagcttctcctgagttaaggggagcctctaatctactgtttataatgagttgaagattgaaccgatactcagggtttatgttcagtaattgaatcaaagctgctaattttcagttggcatttcctatgcagtaagaaaataactctggcagccaaggcacgtgactttgttggtgaacatagggatgagagtacatctcataaatctgctagttaaaattaggataatagttggaaaagacagtttaataaacatatataaatccatttttcagttccattacttgttggaaactttaaggttgactacattaattatttatctttattaacaaaatcaaaaacaatcaaataaagtgcatagatattgaataatccaagttttatagttttaactcagtttttcattcattaataaaatatatatcctttctttcataatacagtatatacaaattgctcatttatttgtgtctcatttatttaatttggtcattggttgttactatatgcagccacttattatacaaactcctaccaaaattaatccctgttagtttgggaatcttcttgcagtatgaaactaccagtcttctacttccatattcacagtccaaaatgtaattcattcctgtgtagaaaatgaggccaaggttgcggttagtagtgatgttttccttgtcgacaagtcttttatcagtttccccttaacccttattttctcagagtccagcagaacagtccttgcggtccttgctttcaacctctgacagtggaacaatttaaagtcaagtcaaaatattttactcaaagttcattatttgaacagggagaaactagagtctctggcctctcaacctaaataactacttgcattaaattctaccttcccatctaaactgtttttcaagtgacaaaactcctcagatgtgccaggattgaagttccttagcttaaagacattttgtaacaagctctgccttggaagcagaaaagcagttcctggggtgaagaggaagcaaaagaactttgccctgctgatggcgcagtctccaggttatacttgagcatttttaactagagtcagaacagtggtaggccaggagtacttgggacccatgtgcctcaggtcttaagaaagctgctgtttccaatgcttaagagcccgatgacctgtatgccagtcctatacaggctgtccttgatatctacatacacacacaccatggctcattcatattccacacacacaaacagtaaatccatgccatttcaaaatcactgatttgtgaattttaggggtttgaaaattttttaatttccttatatttaatattgaaagtcaatactttaaaattattttgtcttctgtcttaaaggcttgttttgattctaactcttctgtctcaagtttattacttgctatcttaatttaaatgtgtgtgatcatattctgtttccacaaaagttgctttcagtatataatttagatacgttagtatggcagtggagcctctgcataatctgatccttcctgttggtcacccgtccctagcacttaaagtctttcttcttccacacaccactcctctccccttcactgactatatattattatcaggtaatattgcttctcttttttttacatacattgttgtccctgaattcggaaggcgctatatacctgctggcagtagtaagtaccatgattagggcggtctctgcttccaaggagacaaggagtctttgttgtctttgatctttggactctgtagaaattacctgataaatgtaaaagttagtttggtttcttttagtcttggaaataccctttttcttgatttctaatatatcccatatctcaaaaataacagtttaatagtttgaagaaaatcagccatacatgtatttaatgatagacttttatagctgagattctatttagaatataaaatacaccaaataaaacaattacagtgccattttctattttccgagtgtgtatggtactaacttccagaagcctcacagcagcatgcaggggagcggctgcctccaccacccactcacatacatttgagggcggaggtaactgaagctgttagacaaggagccatggtctctgtcatacatccactaagtggaaggagcagacttgcagctggatttcttttgccacccaatgctgttcttctagaatttactcacctgaaaggagaaaaaaatgtgtatatttaagatgccccaaaaagtgaatgttaaagtaatttggaggaagcaaatgaatgagggttaagtcgaggtggagggtgaagaaatattgaggaagtggagtgagcagaagatttaatggcgaagaatatatgggggttgcaggaaaggggggagctagagagagtttaagctaaaagctcccaggatctctgacctctgtcttcttctctgcctcgtttctcttttaaagaaattctggagaatagtttaacagttcccactggatgacgcagtcagagctgaggtgaatacttgcactgtggacccagcagccatggagtcaaccctgaagctctgagtagtttcctttgttttgtggctatgaaccagtatccctattatttaagtagaaacagcaactttacatttttacaatttttactaacttttctgttgtttctctggtaaaatttgaaaccagcataatccatagcgaaaatagaaaatgagatagtacagaaaggcctgtaaggaagggcagtgctgctcctacccttccgcccaggctcacctcctgggccacatgcttctaagatgcactcatcatttgagaacagtatcgacttgtccatccagcactgctgagggctgctgccggctcgcctcactctgtgttctactttgtgttttctaaagttaaaggcttagtggttgttttcactgacaacttgagaaatttcataaatgagaagatgaaaatcacgtatgctccttcctaaaactgattatctgacgatatgagctatattttacattcacatcaagatttccccctacccacagtgaatattaaaacctttctaaatcaactactgacaagctgtagtattagctatggcaaaaacattctggtttactgaacagcatgcctcacgttgtttctcaggcactcttttgttaaggatctgatgtttgtccatttcttagattttaaatctaaactgtatgtccccaccttattctgctactctaagtcttccagaagaacacatacatagttttaaaactatgattattaatatttttatttttccctcaagcctccatttattctatgctacaagaaatatgacaagccagatgctgagttctagaaatagaaacttgacattaagtcattgttcaatgtgtgcagtcattagaacagtcagtgtgcactctgtcagctgccgatcaagaatagacttccttggagttcgctatgcacatacttagatttttggtaacttgtagttttagtttttatttttaaaataaggtatagaccaggctattatagaactcacagagatctgcctgcctctgcacccccctctctttctctctctgcttctctgcctccacctctgcttcctgaataccaggattaaaagattatgtcagctgggcatgtttgtgcacacctttaatcccagcacttggaaggcagaggcaggcaggtttctgagttcgaggccagcctggtctacagagtgagttccaggacagccaggactatacagagaaatccggtctcaaaacaaaacaaaaaacaaaacaaaacaaaaaattatgtcgccatacccagctcttgttctaatcatcttcttggactgtttattagtattatgcatatttacactgttatgcaacaaatttctagaacattttcatcctgtgaactgaagctctgaacccattaaacaattattttcctccctccagcctctagccaccactattctgctttttcttctataaccatggctactttagaaacttcacattattgggttctttttatttttttcccttccctcactccttcaattgaacattgtctttaagaaagtctaaggtttatccagtattctaaaatagggcctcagatataattcaggatggtttatcctgcctgagccccccaagtgctatgtgtatactatcacatccaactgtatagtttattttttattagatattttctttatttacatttcaaatgttatcccctttcctgatttcccctctgaaaaccacctaccccatcctccctctccctgctcaccagcctatccactcctgcttccctgccctggcagtcccctacactgggacattgagccttcacaggaccaagggctctcctcccattgatgtccaacaaggctattctctactacatatgtggctggagccatgggtccctccatgtgtactctttggttggtggtttagtccctgggacctctggttggttcatattgttgttcttcctatggggctgcaaaccccttcagctcctttggtcctttctctaactcctccattgggaatcccgtgctcagtccagtggttggctgagagcatctacctctatatttgttagtcactggcagagcctctcagcagacagctatatcaggttcctgtcagcaagcatttgttggcatccacagtagtgcctgggtttggtaactgtatatgggatggattcctaggtagggcaaggacacatgctccactatgttcgtaacagccttatttataatagccagaagctggaaagaacccagatgtccctcaacagaggaatggatacagcaaaagtgttacatttacacaatgaagtactacttagctattaaaaacaatgaattcatgaaaatcttaggcaaatggatggaactagaaaatatcatcctgagtgaggtaacccagtcacaaaagaacagacatggtataaactcactgataagtggatattagtccagaagcttggaatacccaagatacaattcacagaccacatgaagctcaagaagaaggaagaccaaagtgtggatacttaggtccttcttagaagggggaacaaaatacccatgggaggagatacagagacaaagtgtggaacagaaactgaaggaaaggccatccagagactgtgccaactgtatattttaattgcatttatttatttgggtggtgtgcatctttatgcacacaccttagtgcacatatggagctcagagaacaacttgtggaagtcagttctctccatccaccataagttccaggaatcaaccccaggtcatcagggttaaagacatggacctttaccttctgagccatattgtttgccccttggtatgtttgtttagtcagcaaagaatttgacattttgagatctagctgtcataatttgcattcattctgttcacagttctttgtgaatcactttgaatagttaccaaattttaaacttccaaaaaatatgcatgtgaattttgtatatttgtgaacaattttatctattacttccttgtttggggaattcatagatgagaagtgttaacagtaagctggttagggttctcttagccaggtagtcaagaaggagctcttcagcggccagcctttgggaacttttgtttctatggattctgacagcttccattggaagccacatgcatagaacagcagctctttgggaccatcttgtattacaatttttattcaggttttgggcctcaggaccgtacctctacaggtattacagttaggaagtcagggttgctcagcccttaaccacagccaatgttgtggctctaatgccaacctgggaaattagaattcttttgcccttaaaacgagccagtattattgcattgttggccaaagaatctaagatgctgccttgccatcttctcagcttgaccactgtctcagctgtagctgccattctgttctgctattttgttctttatggtaccatcccaggatgcactgctgatagcaaggaaagactgctggagtagagttggtctctgtcttgcaagaccagaggatacagcacaggagacttgtgttctagctaacttaattaactgaacccaagaagcctgcagacagccaaagaaagggtgtttggataaagcatagaatattttacacgcaattaaggtttgtgtttgcaccgatcacagtcttgcctgtttagcagcatcaatcacagcagtccctctactaaaccactaggggaagtcatccccctctggcctaagtgcaaatagttgcagtcagctagagttaatggaggctttggtagcaaaaagggtgctacagaccatttgaaatacccttagctgacactgcattttcagaagccaggagagtctgctgaatcattacacagttgtttcaaggtgtctgtggaatgttcagtgcacccagtgatggcaaaaggatctaccattgactgaatcagtcaaagaatcctatagctgccacttaaggagttaaattgtccagcccccaaagtcttaactttttttttattaggtattttcctcatttacatttccaatggtattccaaaagtcccccataccctcctcccaactcccgtacctacccactcccactttttggccctggtgttcccctgtactggggcatataaagtttgcaagtccattggccctctctttccagtgatggccgactaggccatcttttgatacatatgcagctagagtcaagagatccggggtactggttagttcataatgttgttccacctatagggttgcagatccctttagctccttgggtattttctctagctcctccattgggggccctgtgatccatccaatagctgactgtaagcatccacttatgtgtttgctaggctccggcgtagctatatcagggtcctatcagcaaaatcttgctagtgtatgcaatggtgtcagcgtttggaggctgattatgggatagatccctggatatggcagtctctagatggtccatccttttgtcccagctccaaacttagtctctgtaactccttccatgggtgttttgttcccaattctaagaaggggccaagtgtccacactttggtcttcattattcctgagtttcatgtgttttgcaaattgtagcttatatcttgggtattctaagtttctgggctaatatccacttatcagtgagtacatatcatttgagttcttttgtgattgggttacctcactcaggataatgccctccaggtccaaccatttgcctaggaatttcataaattcattctttttaatagctgagtagtactccattgtgtaaatgtaccacattttttgtatccattcctctgttgaggggcatctgggttctttccagcttctggctattataaataaggctgctatgaacatagtggagcatgtttctttcttactagttgaaacatcttctggatatatgcctaggagaggtattgcgggatcctccggtagtacaatgttcaatttcctaagaaaccgccagactggtttccagagtggttgtacaagcttgcaatcccaccaacagtggaggagtgttcttctttctccacatcctcgccagcatctgctgttgcctgaatttttgatcttaaccattctgactggtgtgagatggaatctcagggttgttttgatttgcatttccctgatgattaaggatgctgaacattttttcaggtgtttctcagccattcggtattcctcaggtgagaattctttgtttagctctgagccccattttttaatggggttatttgattttctggagtccaccttcttgagttctttatatatattggatattagtcctctatctgatttaggataggtaaaaatcctttccccatctgttggtggcctttttgtcttattgacggtgtcttttgccttacagaagctttgcagtttcatgaggttccatttgtcaattctcgatcttatagcacaagccattgctgttctattcaggaattttccccctgtgctcatatcttcgaggcttttccccactttctcctctatgagtttcagtgtctttggttttatgtggagttccttgatccacttagatttgaccttagtacaaggagataggaatggatcaattcgcattcttctacatgataaccaccagttgtgccagcaccatttgttgaaaatgctgtcttttttccacaggatggttttagctcccttgtcaaagatcaaatgaccataagtgtgtgggttcatttctgggtcttcaattctattccattggtctacttgtctgtcgctataccagtaccatgccgtttttatcacaattgctctgtagtaaagctttaggtcaggcatggtgattccaccagaggttcttttatccttgagaagagtttttgctctcctaggttttttttgttattccagatgaaattttaacttcttaagaacaaatgaacatcagaaagtgtgtttacagaaagaatttataattaagagtggggttggtaaaatggctcagcacataaaaagctcttgtctttagcctgtatacatgaattcaatccttgggacccacatggataaaggacagaacctactcctgcaggatgtcctctgcacttgggcagattgtgtacatacatacatacatagagaattttttaaatcatttattttaacacatgctaacagtaatactcaccacctgtccattgtcccaggaagatgaagcctccttatctgtttcacagagcatgggtttgatcttccctggagggaaaactaaaagggtcttcagtagggaaatacatagaaacagaaaactgtgatagtaagtaccaaggaggtctgagcaggtgtcagtgggatattatagacagggtagaatccatgtctacctgggaacatgacagtcaccactgtagttccattttgtccctcttaaaaagtctatcagagggctagagagatgactcagcggttaagaacactgactgctgctggacatggtggcgcatgtctttaatcccagcacttgggaggcagagccaggcggatttctgagttcgaggcaagcctggtctacagagtgagttccaggacagccaggactacatagagaaaccctgtctcgaaaaaaacaaaacaaaacaaacaaaaaaaagaacactgactactcttccaagggtcctgagtacaaatcccagcaaccacattgtggttcaccaccatccttaatgagatctgatgccttcttctggtgtgtctgaagacaactacagtgtacttattaatgataataaataaatttttgggccgaagtgagcggggccaaccagagcaagcagaggtcctaaaaaaattcaattcctagcaaccacacaaccatctgtacagctacagtgtactcatattagatagatagatagatagatagatagatagatagatagatagatagatagatagatagatagatagataagtagataagaaagcaggctgggcaagccagtaagcagcacccctccatggcttctgcatttaaaaaagaaaaaatgtatcagagacgggagcactgaaagtatgctttaaaaagaaaacagcatttgaaagtcacagaactatggcatattaagatatatttggggaattattagtagcaatagctagagcaaagaatgttgtaggaaaattctgaagaaatctggcaggactttgtatgccaggcccctaaaattttattctagaggcagaggggccagggaagcaatagggtttaatccttattcctgaatgcccaggctggctctgtagggctggataagaatgggagagacaacagcagaagacttggaagtgatcctggcatgaatgtagacttggaaactctcagagtttaacattgaagcattgaagtgtaggtagaagttgggtgaagcaaatgccagcggcagtgttgtttcttttacctgtcccgtgcactgtcatacaaatcctttcagcccccaaactaatctgacctggtgtaaagcaactttgagatatgtattaggaaaatagcagttttgacagacagagagagcacctggcataaaaccaatttaccactcttttggggggtgagatggggtggggatgggggctcctgtgagcaacaggaagtcaatagagccatctgcaaacaagcttcataagcaatggacaatttccattacaactccatttctcagagtgccatttgtcacaatttttatttctctgttctttatttaaaagtaactgtctcatatttaaatgaaattttaacattaaaatatagcagctttcgagttcttttttctttcacaggttcagagttgtactgttgattttttttttttttttggcataatgatattctattcattcagttgtgttgtcttcctttgagctccactggggaatgctgtgtccaaaaaacaaaaactcgtgtttcctcctcctggaagcagattctcatggaacttgagagtttgttacattggtggtgccctcggccctttttagcgaggctggcagtattcatcactcactgactgcccctgcaaacatctgtgtcatgcatcaccaccttctgctgtgtcacttgcttatatttcattctttgcattactagaaagcttcacacatgattcctgtaattcctttaatgttctcagcagtgtgcagatatgctgaaataagtgtgtgtgtgtgtgtatgtgtgtgtgtgtgtgtgtgtgtgtgtgtgtgtgtgtgtgttcctatgcaagccagggatcaggaaagtcaatacattccagtgacccacgaaggtagaaagacactaatacactagaccccgtagtttctcatctcactgtaaaggagtgaccagtgcaccagcattccctggtctgcagctggctgcatgtgcccagaacacagtcatcaaatcatctttatcatgtcgatttgcctcagttgtgtccaggaagaccaaggtattggatttactcccttgttcatagtagtaaatcctgcacttcttttcctccaagctacatgagaagaagcataaaaccgtgctagcatgcagctgctctttgacttagcatcttcagtaaaactgtagagcaaaaacagcatgaatacttggttctagctggaaactgggatttttgtctttaaaggagttcttttgcttctaaaaaacatagttctctttgttttagctgcttttaagaattttattcaaagagttgaaaatatacaagacagcttggtgattactctttgtcctcaagttgtaagtccttaaaattcaacaaacacatgacctttacaacaggttatttctcctgttttcctcaaaactagtgcttttactgatcttggtttgagatataatcaacttatgtgatattggctgtcctgtggtctctttaccgagtacactttggcgggttggtctgcaggactaaatggggaagtggacatatggaaattgctttctactgtgggacgttagcgaagagtgggagcatagagatgtacctcagcaccatagtaacctacgcacatggaccttttgttgaacacagcacgtcacgcaggggtaaaagaaacagtctcgggcaagtgcaggacagccctgagaaacagtacttgcttaaggcccgttgtatttttaagtagtctcggggatgtccaggtgtcctgatttaaaggcaccactttttaaatcaggaaactgtgtcttgttctgaggtctgatgtaataaaatacatattcctaggggatagtacggctggacccatgaaccatgttacagccagtgatttattcacagtgttaaccacagttaatggcaaatatgtaagccacacatggtctcagggtggccttttaactggagcacagtcatagatccgtggagtaggacaaaggcagaacagtttgtgtcctgtctagaaaagctctcctgctgtgcgactcagtagtagttactcgtatccagcattctctctggagctcagccatgggctgttgatgtcttgtttttgtttacccattctttacttcattgctcacagtgccaaatcctgctctaagatgtctactattttcactcatttcttttcttgcattgaattttataaagtaaaattgactttagttttttagatgttaaccatatgattttaaacagtttttctactttagtgagctactaagttggtatcctaatttgcttcactattgctgtgacaaaacactgaccaaaaccaacttggggaggaattaatttattaggtttgcagggaagaactgaagcagagccacagcgcagcactgcttacaagcctcttcccttacggaccaggcccacctgcccagggccagcaccacccacaatgggcttggccctcccgtgttaatcagcagtcaagaaaatgcccaacagacatgctcattaggctagtctgatggaggcagttcttctgttgagatttcctctccccagctttgttgaggtttgtgtcaaattggcaaaatcgatgacagctacggatcattcttcctctttcttgtctctgttaaaattgccaggaccacatctccgtaagaatctaactcccccagcttcagtgtattacagagaactaacaaggaggttcttttagagctgtacttaccatttgtacggaatattcagatttcaagccaaaatgtacatgtacttcattcaggtgtcacgtttccttggcccatatttccatgatttagtagagtttaaagaggtgtttgtttgtttgtttgtttgtttacttattttgcacaccagttgttcattagatacatcttttgcaaatatattcttctattctgttgcctattctcttgatttttgaaaaatttaaaatacttttaaaataatcttagatactattctctaataaaatttcagaatacaaagatttttatatgattaaacagcttaagatccttgttttcatggaaggacattataaagtaaaaactttagatatacatggctaacctgatgaataagagaggatttattttctaattttgctttatacgcgtcactaatagctaattcagcaggagagagccagcccctatgcacctccatggtttaacagttcctatataaaccataattagaagggtctgtactccattagacctcgtgttttaacccagcattgtctgttgaagcttgctatctatccatcccagaccttcaaaagtctcaggacttgccagccccttgctcaccaggatctcttagaactcaccagacttcaggctaacattcaagattcattccacatttagctttcttggtgcttgtagccatggccacagagaaagcatttaggaaaaagaaaggaaatgtgtactgaactgagctgaaccagcagatgggacaggggtcagaagactgtcattgtaagtacaaggataaaatagtttcctttgagaaaggaagaggcagcatgtatctgtggaacactgaaaatgttcaaataactggagctcttgactggaaaagttatacaggaaacagcagtttgaatgtcatcgtatctttttcatagaatgataaggtttacagttaggatgttcttaaaattcatcttattaatccataaaacatcaaattgaagtctatcagtaaatctcaaatacttttttgttgtcacagtcttaactcttcagcaagtgccttatagtctgattcagagatgcatatctctcatcccagtctacttaggaaagcaaggcaggggagcatttcagtagttcactgcaggcagcaggctgagataccatctcaagagagacaggaaaaaagacaggtccctaagtgtattcatacaagtccatagtggccttggaaatttaaaaagtaatattcctaattaaaaagtatctctttttttaaagcataacacttgcttttccttactctttgtgttgttttctctctgcttctttcacaattcctacaaatctctctctctctctctctctctctctctctctctctctctctcagtttttcaagacagggtttctctgtgtagctctggctgtcctggaactcactttgtagaccaggctggtctcgaactcagaaatctgcctgcttctgcctcccaagtgctgggcatgtgccaccatgcccggcacaaatatctctttgttgtaacgcatgtttatagtagaatataggactgttgtaaacttgagataccttttcttctttgcataagagtttttaatggtttacttttattgttatactaaatatatatatatatgtgtgtatatatatatatatatatatatatatattgcaaatatgtgctcacatgtgaaaagaggccagagtcatcagaccccctggagcaggagttacaggcagttagttgtaagccacccagcactggtgctgggaaccaaactcaggtcctctgcaggagcagtgtgtgcccttaaccttgagacactatctctccgacctcagaatgttgcctcttttgtttttttaagttgttgtttagtgttttgttagtgttgtgtttttgtgtgtgtgtggtattggtgccatggtacttatatagaggtcataggacaattagtgggaagtccgttctttctttgcaccatatcctgggaaacaacttgataccaaacacatttacacactgggccatttcactggcccttaaaatgtagttttaagtattatttaggcattatgttcaatctaatctcttggttctcattgtaataaaaatcgcaggacatgaaaagtaatctacttttcttacctagaagcatgtttaggtaataaaaacaatatattttataaattaagaaatcaggaggctttactatatttgcaggcactttcaataattttaacacaattaaaaagaatccacgtatggtggcccatgccagtaggacatgctcaaaaggcagaggcagtagaatcatggatttgaggtcagacttggctatacattgtcttttctgcctttaacattaataaaaaggaatttttaaaagttatcctgaattcctctatacttatttaaaaagtaaaaaaaatgttcagtttctaaattatatatggaatttgacaagcagcttcgagcatatgagagggatcagggcttgctgatcaagctgcatcctcctcaaccacggcagcagaggtgctcactctagatgctaacgggcgtgttcaggagaagctgaggaaacctcgaggttgctaaaagcaaacactatgattcttcttcctatcctaatgagtcagcaatttgtcattcatctgcatcagtttgctagcaggacaatgtactacaagttcaaaggttagttgtcggttatgtcgggcgtctgaggagatggaaacgtgcggagctgagcctgtgacaccgctgccgttcctctacaagtactacaaccctcaaacctgaggcagtgcccgctggagaacaggcaagggcgtgtcctcagaagatggcgtggacagctggtgtgagtgtgccatccatccagagttgggaagggttgagtaaacagtgggacagtgacagagtacagggattaatggctgaaagcattcagtgattcttaaaacagacattgaagtaaatggaggcattctgaagctttagttctgaggaacgatataagaaaactttcctttcctttggaaacaaacttcctgcagaaagaagacaagataaatggagcttgcagcctcaagtgcactttatattgaagagacatgaactcacatggaggagagtatgctgccatttcttatagatgttaagctatcagtgaggcagagaataaatattgttagaaaagaacactaaaatgaaagaaaattgtagtgagctgtagtgccactcacgaaggtttatctcatgaagcgtatacttataagcctccctgccccaaggctccagtgcagcgggaagacgtaataattcagcgggcgcttgaccagatttgactaaaatcaccagtaaaaactctctctctctctctctctctctctctctctctctctctctctctctctctctctctctctctctctctcttccccccctccccgtgtgtgtgtgtaactggttctggttttccaccatgagtcatggatatcaaaatcaagtccacacacttggcaacaagcacccttatccactgagctacctcacagatcctcaagctgctataaagtcagacacataaaaagcagaggggacctcatgccctttcttttcttttcttttcttttcttttcttttcttttcttttcttttcttttttgacagggtttctctatatagccctggctgtcctggaactcactttgtagaccaggctggtctcgaactcagaaatccacctgcctctgcctcccaagtgctgggattaaaggcgtgtaccaccatgcgcggctctcatgccttttcatacatgtgcatacacaccatctactgtaggagtactaggattgctggtgtgtgccactacatccagcttctttatggcacttgcaggggtcgaatgagtcatcatgcttgtgagataagaagcctcttactcactgagctgtatgtgtggccctcttctaatctctggacttcagttatactttgcattcttctacatagagtctttccacagactgttgtagattccccagactaaagctgtcataaaatattttacaagcttacctaccataattgaggcactaggttcaaccaccgcactttagaaagcaagtaaaatattttattaaaggcaaggtatatgttcactgctttgacaaaacagtagagtgcattagatgtatatttatgtctccttcaggtgagaatgcagactggtataatttcctgaggttgccagggcttcagagtccctggagtgactccataacattgtcactgcaaacacaggatgcgcggtactagggccgcttctctgtgttttctgtgaacaactatgaacttggtccttttccctgctgtttgctctgcaggacctcatgtgaagtaaaggtgctcctggaagggatggtagccagtgatttaggagtaggtgcttcccctgcctagcagctaacatggatgctctgcacttcagccagtagggaatggagaagaggaaggtacacagtttcaccactaagtgctttgatcagttcttttcaaagaaaagatgcttacagatcaggaacaaaatctggacccttagtcagcaaaagaaatagtttcctttgagaaagaaagaggcagtgtgtatttgtggaacactgaaaatgttcaaataactggagctcttgactggaaaagttatacaggaaacagcagtttgaatgtcatcgtatctttttcatagaatgataaggtttacagataggatgttcttaaaattcatcttattaatccataaaacatcaaattgaagtctatcagtaaatctcaaatacttttttgttgtcacagtcttaactcttcaacaagtgccttgtagtctgattcagggatgtatatctctcatcccagtctacttaggaaagcaaggcaggggagcatttcagtagttcatacttgagatagtagatactatctcaagagagacaggaaaaagaaaagatgcttacagataaggaacaagatctggacccttagtcagcaaaagaaatctatgataaaacattgtttctgaacgttctgttgctctgatgtagtcataaggattgagcggcttaggtgtaaggtattaaaactattttcttttagaaagaatggaaattcaatatccaactgagactcaaaatatataccaaaacagttttacacataatcctctagagctgtcattggtaaatatacatgtaatatctttcttggaatgttttcagaaccagtttaaaagatgccctaaaagaatatgtatttgtttctcactatgatctgaaaatccgtcctcctgattcatactgtgagccacacttaacaaaattctttttaacaataataatatttggaggctcaatatatagcccacatgtctaaggccataggtttgatctctagtactgtatttcctatgcacatgtaacacatatatgtatccagatctttaacgaatataacagtgggagacttcaataccccacttgccccaatggacagtcattgaaacagaaagtaaacagagacacagtgaaactaaaggaagttaggaaccaaatggatttaacagatatctatagaacatttcaccctaaaacaaaagaatgcatcttcttctcagcacctcatggtaccttctccaaaattgaccatataattcttcacaaaacaaccctcatctgatacaagaagattgaaataatcccatgcatcctatcagattaccatgccctaaggctggtcttcaataacagcaaaaacaatagaaagcccacatacacatggaagctgaacaatggtaacttggtcaaggaagaaataaagaaaggaattaaagacttcctggcatttaatgaaaatgttgacccatcatagccaaacttatgggacacaatgaaagcagtgctaaaaggaaaattcataagtgccctggtaaagaaactggagagatcttacacaaacaacttaacagcacacctgagagctctagaacaaaaagaagcaaacccatccaagagaagtagaaggcagaaaatagtcaaactcaggctgaaatcaaccagatagaaacaaagagaactatacagagaatcaaaaaacaaaaaaacaaaagctggttctttgagagaatcaacaagatagataaacccctagccaaactaactaaaaggcccagaggcaatatccaaattaacaaaattagaaataaaaaggaagacataacaacagaaatggagggaattcaaaaaaatcattagatcatactataaaagcctgtactcaacaaactggaaaatctagatgaaatggatggttttctagatagatactacataccattgttaaatcaagagcaagtaaactatctatacaggcccatatcgcacaaggaaatagaagtcattaaaaaccttctaaccaaaaaaagaccagggccagatggatttagtgcagaattctaccagactttcaaagaaaacctgataccaatattcctcaaactcttccataaaatagaaacagaaggaacactacctaatttggtctgcgaagccacactctgatacctaaaccacacaaggacccaaccaaaaaggtgaacttcagaccaatcttgcttatgaatagtgatgcaaaaatactcaataaaattcttgcaaaccaaatccatgaacacatcaaaaccatcactcaccacaactcaagcagtcttcatcccagggatgcaaggttggttcagtttatgaaaatccactaatgtaatcccctatataaacaaactcaaaaaaatcacatgaccatctccctagatgcagaaaatgcatttggaaaaatacaacacccctttgtattaaaagtattggaaagatcaggaattcaaggcccatacctaaacataataaaagcaatttactgcaaaccaacagccgtcaaattaatggagacatacttgaagcaattccactaaaatccagggacacaacaaggatgcccactctccccatatctattcaatatagtactgaaagtgctaactagaacaataagacaacaaaaagatatcaaggggatacaaattggcaaagaagatacaaaggtgtcattatttgcagatgatatgatagcatacataaacaaccccaaaaattctatcagagaactactccagctcataaacaacttcagcaaagtggccggatataaaattaactcaaataaatcagtagctttcctttatacaaatgataaacatgctgagaaagaaattagggaaacaactcccttcacaatagccacaaataatataaaatatcttggggtaattctaaccaaacaagtgaaagacctatatgacaataacttaaagtctctcaagaaagaaattgaagaagatctcagaaaatggagagatcccatggtcatggattagcagaattaatatagtaaaaatggtcgtcctaccaaaggcaatctacagattcaatgcaatcccccaccaaaatcccaacacaattcttcaaagacatggaaaagatcaattctcaaattcatctgggaagacaaaaaacccggagtagcaaaaacagttcagggaaacaactcccttcacaatagccacaaataatataaaatatcttggggtaattctaaccaatcaagtgaaagacctatatgacaataacttaaagtctctcaagaaagaaattgaagaagatctcagaaaatggagagatcccatggtcatggattagcagaattaatatagtaaaaatggtcgtcctaccaaaggcaatctacagattcaatgcaatcccccaccaaaatcccaacacaattcttcaaagacatggaaaagatcaattctcaaattcatctgggaagacaaaaaacccggagtagcaaaaacagttcttaacagtaaaagaactgcttggggaatcaccatcccctgacctcaagctttactgcagagcaatagtgataacaacaacaatactgcatggtattggtacagaaacagacaaattgataatggaatagaattgaaaacccagaaataaagccacaagccaggcagtggtggcgcatgcctttaatcccagcacttgggaggcagaggcaggtggatttctgtgttcgaggccagcctgatctacagagtgagttccaggatagccagggctacacaaagagaccctgtcttggaaaaccaaaaaaaaaattaaaaaaaacaaacaaaacaacaacaaaaacaaaaacaaccacatacttacagacacttgatctttgacaaagaagccaaaaaatacaacggaataaaagaaagcatcttcaataaatggtgctggtctaactggctgtatgtatgtagaagaatgaaaatagacccatatttgtcatcttgtacaacgctcaagtccatatggatcaaggacctcaacataaaactagatacactgaatcgaatagaagagaaagtgggaaagagccttgaactctttggcacagggagaaatttcctaaacataattccaatgactaatactcttagatcaagaattgataaacgggacctcataaaactggaaagcttctgtaaggcaaaggacatagtcaataaggcaaatttgcagcctacagattgggaaaaaaaaatcttcactaaccccacatccgatacagggctaatatccaaaatatataaagaactcaaaaaactaatcatcaaaaaaaaaaaaacccaatcaaaaaatggggtatagaactaaaccgagattttacaactgaggaatctcaaatgactgagaagcacctaaagaaatgttcagagtccttactgatcaaagaaatgcaaatcaaaacgaccctgagattccaccttacaccaatcagaatggctaagataaaaaccacaggtaacaacacatgttggagaggatgtggataaagaggaacactcctccattgctggtgggattgtaaactggtacaaccactctggaaatcaatctggaggctcctcagaaaattggaaatagatctacctgaagacccagccataccattcttgggaaaaaaagatgtcccaccttgccacaggggcatgtcttccactatgttcatagtggccttatttgtgatagccagaagctggaaacaacccagatgtcccatgacagaagaatggatacagaaaatgtggttcatttacacaatggaattctgttcagctattaataatgaggacatcctgagttttgcagtcaaatggatggaactagaaaatattctgagtgaggtaactcagacccaaaagaacatgcatggtatgtactcactaataagtggatattagccccccccccaaaaaaatacagaatacccaatatacagtccacagaactcaagaaggtcaagaagctgaagtgcccaagttaggactcttcagtctcacttgggagggagaagaaaacaatcacaagtggggagggagggagagacctgggagggaaagtggatggggtggggggagtgaggggaagaagggaacatgatctggtattgggtgagggaaaaggactgaagccctgagggccagcagaaagaataaaacaggcaacctcaggagataggactttggggggaccctccagaatgtaccaaagaccagaagtgagagactcaggactcaaagggagggaccttagatgaaatgcccaacagtagggatagggaatttatagagcctacctccagcaggaagactgggcatcaaatggggtgggggggcacggcatcccacagttataactctgacccataattgttcctgaaagaactacagggatggaaatggagaggagcctgaggaaaagaaggtccagcaacaggttgaaagagctcaagggggaagtcccagggcctgacactattactgaggctatggagtgctcataaaaagggacctagcatgatcacactccagaagacccaacaagcagctgaaagagtcaaatgcagatatttgcacccaaccaatggacagaagcagctgacccctatggttgaattagggaaagggtgaaagaagctgaggaaaaaggcgatccagtaggaggaccagcagtctcaatctggacccccgagatctctcaaacactggaccaccaaacaggcagcatacaccagctgttaatgaggaccccaacacacatacagcagaggacttcctggtctgtgttcagtcagagatgaggcacctaaccctcaagagactggtggccccaaggagtttagagggtggggggtgaggggggtggggacatcctcatggaaacaggagggtggggaagaggtatgggatgtggaacattcagagggtggactgtgggcagagaggaaataaagtctgaatcgtaaaaaagtaaataataatatttttttaaaaaaagagcatcttgaaaaggggggcagagaatataataaataggctgggcatggttgtgcatgcctctcatcccagtactcgggagagagaggcagtcagatctctctgagttcaaggccagcctggcctacaaatcaagtctaggacagccagttcttattacacagagaaaatctgtctacaccccacaccctcccccaccacacacacacacagaggctttgaagctgattttgtaagcacctttaatataactttattgtttctttcaaataaatgttttatataacaatgaattttctttaagcttaccttacttaaagaataaatagctgtatttcacaaaagaaggaaagttaataactttttctaaattaattgttaagcaaatatctctgtatactaataaaatgaagctttcattaattccagaattgagttcatgtactgttgtacaaggcagtgtagtcgtggaatacagatcactactgctatgtgtgataactgcttcacagagttgagggtggggagcctcaaagtaagtagagatgctggaattgttagggagttacctcagcaggcaagaacgccagtggaattagaggctgatgtcagggtgtatttattgtgagtccaccactcagcattgttcttggtacttgagtacatgagtaaacaaagcaaatactatgcctttgcaggacctgtattctatcagtttaaacagaatatggaagactggcataaaactcatcatttgtagagtagactggataagcataacactaagagaaaaaactatgaacagtttagctatgtacaaagcagaaaattaacagtctttaaaagctgttggctttctggaccatgagctgagattctagaatgaagatacttaaaaattaagtgtttcatcaccattaacaatatctaaaaagcataagtgcctcaagtgtctgtgagagaaagatgggttagtggtggatacatgttttcaatgttgacaaaaaagatgctgatacatgctataatgtgaatacatcttaaaaacattctgctaggtgaaataaactagttacaaatacaaaagataattactgaatggttccactttcctaaaatacccagaggagccaaagttactaagaaaggagaatggggcagggagttggtgaagtattattcagtgggtagtttcactttttcaagattcagagtcctggtagagattggttgcacaattgtatggatgcattcagtaccactgaacctctgacaacagttcagatgtttctaagtgggactggagaggtggctcagtggttaagaatgtatactactcctgcagaggactggatcacaactgcttgtaactctagttcccagggattcaacattccgtttaggcttctacaggtacctgaactcaagtgcatatacccacatatagatacacaagtatacacataattaaaaataaatcattaaaagaggtgttataaacattttattacaatttaaaagttatgttgtaactagttgctagagaaaaaaataacataagccacagtgtatcatacttggggaagctgaccttgaatgtatgaaagaattgaaggttatttataaaatacctttcttcatcatccaggtgatgtaagtgctcaaaggagatgctgacaaggaaggaagtagcaggcagcggaggcatagaccctggcagagactgactaggcatgctgcaggtagagagggttctacagccactaaggagaggggcgctgaaagtctgcaagaaagatgtgggctgaaaagccagaggtggtcctgaatatgcatgtgcccacgagacccaagaaattggctttgaagaatcaggatagtatgtaatgatgggaaatggaactttaagaatacaggggacaccaaataaatgggtggtggtggttcagaaatggcaatccccatataaagctgtgcattgagtaaaatcttagaaggaaagagctatgctcagtattggtcatatgatgcaaagtacaattggattatgcaggcactgtcagtctgggaacccaggagtgggtgcctctattaacatggtggggaaacaggatggtgagggaaatactgagttagtgctgacgttttacatccagggtatttcctactatctaaataaaagaacagaacacacggttcaatttctgagagatcaggtttacccccagcagccccgttgtgcctttcacaaaggttaaacaggttaatgtgtcttgcatacactgagacctctgcagagaagggaggaaattatagttgagtggacatcttcagggcatgagatagaagaacaaaacagatatcccagaaatcgcctataatctctggatagctagtgagttaaataataaggcaacagaatcaaagtgcatgtaatccattaataagagaatgtggatttcctatttaatatgggttgttgacaattaacctatgcctcttcacccatggtattagcatggtattgctcatggagactgacctcagggccttgagttccaccactgagttaaatcctttgaaaaggtttaagacaaggcaaggatgtgtaagccacagcaacagctttaaacttggtgggatcacccttgctgctctcctggaacatctgacaggaaggactgattacacggtgagcttaccccatggtattaacatgctaagccactggcctccttctttcatctgatcttttccccaaaagctttcaggattgtggagtatattgtatataattctgcagctatccaacttggaattcatacttggacaaggagggaatggtaaacattgttggttatgctccttaattcatgtcccgtgtacttcagtgtgcttctgtggaacacacacatgcttagcactcccgccaagtcactgtttcagtcttggttgcagtttcttacttactggtgctggaaggccaatgtgttaaagattccgaaatcatcaaaggatgctcagctttctttgcctttgatatttgtctctggtttctgaaatttgcccagaatggggaaaggaacagaggggaggtcttactatttcctggagctcacatgccacagtagtgcacatcttgattccattagtctatgcaggtcaaagagcaagttcagctggtgtagtttacagcaccagggacagagtgactagccactttaatgacttgcctttctgctgcaacttactcaggaaataggggttgctaaccactgaaatgtttgtatccatggttgacggggtggggtgtttgtttgttaactgaggaatagactcagaatagggagagtgactcggcaggaagtgcgctgacattttgtcctctgatcctctgggggttctcccttgtgtcttcctagttgctctcttggggctctccaggcaaacagtgaggctgcttgtgctagcaggactccatctgggggcagcctctagtcgggagcactctgttgtgatcaacttctgatttctgtatcttttcctaaaaatgatcacttctgactttttttatattcttttctgtttctctgttttcatcagaaaaatagtacttttatcaaaaagtatcttcttacaaagactgttttcaatagacaacaactaaacccagtttctttcacaacttaactgttttgtttcattctgattttttgcctctgaaaacacaacattttaaacaagtttcaactttttcacagtgggtctaataagcacctaataaccagctcaccgtgtaatcagtccttcctgtcagatgttccaggagagcagcaagggtgatcccaccaagtttaaagctgttgctgtggcttacacatccctgccttgtcttaaaccttttcaaaggatttaactcagtggtggaactcaaggccctgaggtcagtctccatgagcaaagaagagggagaagctccacagtgttttcaaggcggttcgcccaaagagatccagtttgctccacacccagtatgtgtactagcaagaggacaagcttgcaaaagagactttattcagcaacagtcaactgtgaggagccaggacatctctcctgcctccccaggactagtaaagggagagctgtgggacatagatgataagtgtaactctccatgctaggcctgagcatagggcttttgtcctaccagatcttgcaaggaacccaagtaaaggcttagtagttccaggtagttttaaccattgctaaatatctgaaaaccttgggaatgcatacagcagaggtactagctatagcaaagcagtagaggtgtattgctgtgcttcactatataacatctaaaacataacgagagtgcaaagtctcaggtttgggctcaagagaaccccgaggcagattgttcatgtaaataagagcttggtttattacaagagttattaacaagacaggcatggcaaaggtcctgaggaaagctgaggcccaaaggacaaagtgaggttgccttcttacaggaaagggagagtttgtatgccagggggttgatgagtccatagtaaatgcttgcaagtcaggcagtctctgattcccagatggcaatgggagaggattgtttcttgcattctgaggaaagaatgtgtcacctttagggtgtggggaacatgaggataaggcacccatttggttagtgtgcatctattatattaggtgtttgggagttgggtaactcatagcttggaatgtgctagcctagagtctgtctgcagaatcagctgtcaggatggggagagacaccactcactcaggtgtgacctgagcagcatctggagtggatcctggtgaaaagcaagagaggctccagagccttatgcatgttttctttgggcattaatagtatccattgcaaatttattaaaattataacatatccaagagaacaatactgtctctatccctaactgtccaagcataccgtttatgtaagaattggaactcgatcaaaacacttcacaatgtggaataatttcaccttttcacactgtgctgttcttctttttttattaccccctcgtgagtatgtgtacatgcacacatgcacagtgtagaggctagaaactagacatctctccccttctactgtagtcagttttctccttccaccatcaagctcaggtcagcaggcttgccaccccatgagcattttttataatacaaaactcaaatccctgtcatatttgaatttgtatctaataaagatactgatggtgctatataattatattgcttatattaattcctcatttcctttttggctaataccaactgtgactcttacaatcagtacagacatgcagcaccctcattgagagtgcacgcttctcattccacatcttatgtcctgaaaggaccctgatgacaaccaataggaagtgtacagtacacagttgatccagcttgaactccttcagttatgagggcatttcaccacttaaaatatgtgtttcaaatgatgagctgatgtatttagaccatcttgattgctttggtgctaactagagcctggatgtataagccacctgccatttctctgagttccacggtgttgagacagcagaacgtgatactaggatccatgaggatcttctcttctcttccagcaacaaaaactagttaaacgaatttttattttcatattgtaagctggtctgtggctcacatttgttagtattacttgttcagagtttagtaaatctactcatccaaaattaaatctcagaatatttaaatgatagtcttccagtttgtggcttcactaaacttttccgtatgactgcagttgaagctcaattatcttaacaaaagtcagaagcaaagctaagcttcagcagtgcgctcagagtcagcatttcctgggtcaaaacctaatagctacttcatgtagtagctcagatctgtccccttccatgacagatgacctaggggagatgggtttgggcctgtagacagtttcttcacccagtccattctgtttatttgtgagttcctttcatgtacctccttgatctttactttttgtacatagactagaatacttagcagactgtggtaaagagtagggtgaaaagtgaggtcagaattagcacagtattaaagtttgcacagcgaagctgaaagctctcatcaaagcggacatgtaacgccaagcacagaataagtttattatatgtaaatgatcccaaaatccaagactataaaagcgtcaatgcttggtgtacagcttgccgttgagcctcagcccttttcaccagctctggcctactttcatttttagaaatgttttctttcttgataaactgtagctgcttctaccacttcccttgtgtccctgatccagttcctcattataagaaatcccaatgggtatatccactgaaccccaatatctgcctgtaactaaaccagtggtaatctgagacatttaacttattgtttcaaagtatatataaagatcattaccaataagtcacacccctaaatttatttgcattaataagatcaaacatttactgatattcagcatgccctaggaacaaatggctatgtttctaagtccactttcttgaagttagcaaatcaggactgtgacagcacggttcagtacagtaggtgaaggcatttgtacccaagcctgacaacctagttcagttcccatgttgcaaacaaagaaaaagaaagaaagaataatctccatgtcccacaaaggaacacagtaacaaagcagacgtagcttggcaaggcagttccttctgtaaaaacagtgcagcaagactcaaaccaagctggcacccaccaggacaggaagttgccttgatttgtattctaacacaggtagggactgtttccttttctccattggctgagcttcagcctcacagtctttgctgttggttagttttaaaagaatcagcatgaaggaaagaagtaggggttaagatttgaataaaagctaggggagatttatggattattggccctgggtgggcaagttacctttaatagaaaaaatggttttcatacccaaaactccacatgaacagagagaacagactctgtttttgagacgatctcactgtgtggcccttgattgcttgggacttactatgtagaccaggtgggtctcgaattcagagattggcttgactctgcccctcgagtgctgggattattaaagacaagtgtcaccattcctggccttattttactttttaattaaaaaataaaaatataaaataaagagttcctacatagagttgtagctaaatttgaaaaatagagttagtgacatttttgtttagttggtacaattttgtcacatatatgctttaactacttaattcctcctgctgatgagtactatgtatgtatcagactatgaaggatggaccatctagagactgccatatccagggatccatcccataattagcctccaaacgatgacaccgttgcatacactagcaagattttgctgaaaggaccctgatatagctgcctcttgtgagactatgccggggcctagcaaacacagaagtggaagctcacagtcagctaatggatggatcacagggctcccaatggaggagctagagaaagtacccatggagctaaagagatctgcaaccctgtaggtgcaacaacattatgaactaaccagtaccccggagctcttgactctagctgcatatatatcaaaagatggcctagtcggccatcagtggaaagagaggcccattggacttgcaaactttatatgccccagtacaggggaacgccagggccaaaaagtgggagtgggtgggtaggggagtggtggtgggggagggtatgggggacttttgggatagcattggaaatgtaattgaggaaaatacgtaataaaaaaatatataaaatttaaaaaaaaaagatactggtcacactcagaagccagattccatcaaggaaatcaggccacacatcacacatactcctgcagagacagacagacagacagagagtgtttatatactttttaccccaatcccaacagagttaagaagctgtcctatgctgtggtttttatagttcccaactttaagttctactcagtacttggctccttcatgctctttgtcaagtgaacaatgttgaactaaatcacatggtatgaacttcctgccaccccgtaaaatgatataaaactcagttattttcctttgttctccagatttttctttgtagaactacaaaaaaagtgtttcagtgctcatgtggtttttttcttcccctttcaggcaagaagctcttctggctgctataagtgaaaaggatgctaacatagctcttctagagctttcctcctcaaagaaaaagacccaagaagaagtggctgcactgaaacgggaaaaggaccgcctggtgcagcagctcaaacagcaggtattgggtgtgcccaaggatagcagagacaggccgaagaggtccagtcctcagccctctcagacatgtctgccatttcaaagatgttttagtaccctgtgtttcatgacagatattaaatacaaaatattttcataattagacacataacaggtctctggctatatcttaaaaaaaaaaaaacacagaattctcaattggactaggaagaccttacaagtctcaaggtttttaaaaaacattataaagttacactggtcagtcttttattcatactcacacttgactacttattatgttgaacatttacttcctctgtatttgcaacttttgggggttcagtttgctttcattttattgagacgggtcttgctatgtaggtctggctgacccagtactcattttggaatctaggttggccttgaattcatgacagtccccctgcctaaacttacccagtgctgggattagaagtatgcaccagtgtgtccagatgtatctaaaacatttttgttatagtgtctaacaagaggacttaatattaccagtaaaattctgtttcactggtggtcaaatcagagcattaatggactcagaacagattagccccaagtgtcagaggtcaggagaatcctagctttcctccagcctacgcttccagatcagagtcagcttccactctatggcttgctaatccgactctcaaacttctcagcacccctctctctaggaactctcttccctgtatcacactctttactgtagtcaacagatctttctagacgctcatctgacccaagtattagtaaatgctaactatatagcaagacctctcctgaaaacttgcattacaagataatttgttttatccagcattcttgatatttcatcacacaagagttttcaggtcatctagtctgacagacatatttccttccatttatactaaaaatctgagcaagaacattttttattactttttttttttacatcctatcaggttacttagcaaatctcattttcaaatcctgtaagtaatttgtctttgtttcgctattataaacaactgtcaagttccagagcgtgcagtagaactacagacgaagagtttagtcttcttgagaagactagtacttaagtgcaaagctgcagtgtatatgtgcagaagttcccgggagctagctgactgtcagatcctaatgctgttagttactccctggtggcatcctgctcagttgaccagagcctattcctggtctcactgatgcttctgtcactgttaaaggctgggtgttacctttctccgtacacagtcttaatcagggtgtcccctgggattatacccaggtgactggcacagggtcagggtggggtctacactctacagttgagcattttcctagtttcctattgtgttgtattttacctgtttaaccttcaataccacattatttccttacctccaagttcttactgtaaaggggtatttgattgtttctaagtatttcattgcaattggaggaaatgcccatcagtttacattaattatttatgtattttgttgggcacacatgtcacagtgtgcatttagaggctagaggacaacttgcaggagtcttttctagaaatgaaacttggcttagcaggcttcgtagcaagtatctttacccactgagccatatcactggctcccaaataatactttaaataattcttctatgtggttctgtccattatgtagttgccaggttttagtctccctgggaattactgggaggacacatgacactttattggctaccttcactcttgtttactgcttcactatataaagccagttactctgacagtcactgatttagaccttgagataggccgaaacttggatttgaagcatcttggattctagtagacctcgcaaacatctacttatctgaaaactaacatttgtacatactttcaaatgtctcctgaatcctgctggaatactcgttcccacagtgacagttgccagtgctctgtccatattccatgtataaacaagctgtctgccctcaaatgtataccactctcttgacaccttcacttaggatatttaactctctgctcatgggtagaatgtgtttttttattttgactttgcacttttctttcataggctgtggggcctcctctccacaagttccctgagccttgatgggatgatggagatgtcacatttagggctgagcactgagtgggtgtataatcccagtgttgagcagttaagagtctctgcactaactgctgcccactacagaaggagacttctctggacaaggttgggagcaactttaaagctataaatgtaaatacttagaaggcagtctgacatttcctcttatcaaaacaatagtagtagattccccactaggacttttcacctcctatgccatgcgttttgggctaggtttttaatatggaacaacttttaaggccaccaagttgcagcatgataaatatgtagatccttacctatccagtttactgttggctttctgtagtacatagagagttctcttcgaaacacaagtaaaactgtatatgaaaaaaaaaaaaaaccaaaacactgaagatctaatatgaaccaaactttaaagtcactgatttttaattaattttctttctctacaatgaaaaaaataataatgttggatgaaaaatctttctagccagccaagaaaatagagctttctgtaaactagttacaggtttaaagcctttcattatgaaataaatttggaatgtgagtcttttgccaataaaaataatggagactaagcctttaaagcttcatacataatgtagaatcctgacttaccctcattctttgttgtttcagaaatgatgacaagaaaagtcttttccagtattttttatccactgattgttaatcaacagacaaggagtctgtggatttagaaagccaacttaattcaaaatttaaaaaccagcatgtatttgtatacatgtatttatatacatttttcttgtcattatttgtatatataaattttttcttgtcattatttcctaaataataccagttatttctatggatataaggtatatatgagactatgcataagttatatgcatatactatacaatttttatataaaggacttagatgtccttacactttggtgttcatggaggaggaagtcttagagattagaaccaatgtccactgataccaaataacagttatacaccacagaaaacaattttttaaaatttatggatgaaaagaatatatttcatggtatgttcgtctcattttccactttcggtgttattttaatacacacacatacacacacgtataattaattttttttcattttcacttatgtaccaagagaggccatgttcttgtactttctttcacatttgctggaagtagtgagaagagacagagccactgtgtcagtgttgtggttggtgactccttagcagagacattcagttcatttaagtaaattcctatattttgaacatgactgcacgtgatgctgttgctgaagttcttgaatagggtgaggaatatctccatatatcgctgtggaatcccttggcggcctcctttaaggagcctgtgtttcactaatatgggttttcaccaatgctctcctttccagcttgagtagatatgcctactgcccagttccaaagttactcctagatcttcagtttctgttaccatataccattgtaccagttaccagcatcaattactcaccttctactctataaaaatcccctcaacttcatacaattattatttcaagaattcaaaattatttcaaaaattatttcatttagggtcctttataagttgcagtcaggctgctggccaggtctatatccttagcttactggagagcctgtgacttcttcctttttcctcttctggtcctaaagacattaatactttctctgaccaacttcgatctaagtgctggcatggaaaaaaagaaatctgaacttttttattattattttatgtgtatgggtgttttgtctgcatgtatatttgtgcactacttgtgtgcctagtgcttggaaaccaaaagaaaatgtctgaactagagttacaaatgtgaaagggaaaacataatgttctcaggataagagtcagatagttctcttcttctaccatctggttactgaggatcaaactcaggtcatcagactttgtagcaggcactgtaatacactcagctaatcctcctgcttccacctttcacagcactaggattatagcacatgccacaacaccccattttaagacctgattttctattgaaggttagtgactgtaagccacatagagaaccagtacgacaacataccagtggtcacataggtgaactgtgtaattagtgagggaaatttgaaaacagagtcaacaagactttgtgattccatttccaatacacactggaaataaggagccaagagtagctgaaaatctagactggacagcttgaagaataatgattttttagtagatgaaaggtgagacctgaggaagcaaggggctcagagtgttcttccttgcaacaaattggcatcataccctgatgtaagtatcactacagaggagaaacatgggagaaggtagaaggtagaccacatagtctcatttggagagttactgtggctgtcactttcctctctgtcaaagcatggttattttaacagtcattcatttgatgcccctcaggactctctgaaggagatgatacatcttttagtctggtaaacagagcatatgatatctcatagtttactattaagaataagagatttcaaccttttcctttaaaacaccaggcttatttctattctttttctattatgtcttctttcttggcttgagtatttttctatgaaatagtttctgcaatgccttatttagtcattacaatgtgactcttagaacaaaaggctaatagaataaatactgaacttctttctcacaagtatgtaggtatgcatttatgactttaaataaagttgctagttccttcctttactttttctttccttccttttctctcttcaaagcagtgttattctttgtgttgctagaactagatttcatctatcctgtgacagggttgaagagagaagacatctggtataaaatccttccatgacagtgaagtgcttatccccttgcattcttatcttacctcaagaagcacatcacacaagagctgctcctgaggagtcgagtgtgtgctgctttgcatctcatgtctgtgagaggccaccctgactgtgcaaggaacggcttgcatcagatttctaacagaccttgatcacgctcatgtcttttaggaatgaagaagtaaatgctgtatcttctgtcacatgggtcaagtatatgatccttgctctttctactgaggtcagcttcttgtgcttatacactcatcccaaaagcacttgaaatgcttctctgccttagaaatggattagtgtatgctttattcagattgcttttaattttaaacatgtcctagatcaggtacgaaagattggctcgtttgccaggaaccagcctcatcttggaaaggggttctgaggaaggagtatctgggggtggagaaaagaacaactcagagtcaaatcgtagattacaagctaatgttctgcttgaggcagctttccaaaaaactctctcaagacagctctatcttaaaattataaagaactctctggatagctcatctcttgcagatcaaaagtccagccttttatttacataccaactccatcatccacccaggttcccttttgattagctcatgaatctgcatcccatgaacccagccagccccctgatttttagaagaagactgcaagcacattttttaacattaaaaatgaattcacaaatctgactgcctttgtaagcacagacaatgagctatcagggttggatcctgccctgagattaccatttccaacatacctagtcccaaactagctctgtcccagcctgatcttgaactcaggaatgtgcctgccttttatctgcctgcctttgtgtttttctgacaagctgtttcataatatagctgcctctgttattttaggtcttcgaagctccttaatacaattcatattgtatccttatattttgcatacttgagaaattatgtactcttgaactcatgttttcagagttctttcccacagccttgagggctatcttgaaggtctcagcatttaccattttgctgagacactagccacacccttgcctcctggtcttgtgtcatctctgatgatcatttaccttggcagagaggaccttccttgaaggaagaacatgaaaatatgcacattactatacaaacaagccttatgccacagcaaccatcaacacttatggaggcccatgctcagctggctttgttccaggggcaggagccatgttatgttacatggccagacatgttttgggaatctaatccttgcccacattcacagtaaaatcaacacagacattcctgagcacatggtggtatccagatgctttggtcattctttaggtgtgactttgttgttacttcttgtccttccttgtcttctgagaactgccttgcaggcttactagtcattatcctagtatgttcaagcgaagtatcttctttttttttcttttcatttatttattttaaactccagattttattcctctcccggtctacctccataccacatcccatacctcctccctgcttccctgtctccagaaggatgtccccaccgcccacccctcaccccaccagacctctaaactctgtgggaactccagtctcttaaaggttaggtgcaccttctctgactaaacccaagcctagcagtcctctgctgtatgtgtgttgggggcctcgtatcagctggtgtatgctgcctggttggtgttccagtatctgagagatctcgatggtccaggtcaattgagattgctggtcatcctacagagtcaccctcctctttagtttcttccagctttcccctcattcaaccacagcacttagcagcttctgtccattgcttgggtgcaaatatttgtctctgactctttcagctgtttgttgggtcttttctgagggcagtcatgataggtccctttttgtgagtgttccatagcctctataatagtgtcaggtcttgggacctccccttgaactggatcccactttgggcctgtcgctgcactttcttttcctcaggctcctctccatttccatccatgcagttcttccagacagaaacaattatgggtcagagttataactgtggaatggcaaccccatctctcacttgattccctgtctttctgctggaggtgggctctacaagttccctctccccaatgttgggcatttcatctaaggtccttctctttgagtcctgaaagtctctcacctcccaggtctctggtgcattctggagggttccccccaacctcctacctcccgaggttgcatgtttccattctttttgctggccctcagtgatttcagtcattttccccccacccaatacccaatcatgttcccctctccactcccacatctcctttccttcccaccctccccctcccccactttgtggttgctttcttcaactgtaattcataaacatcaaaagaatggaaacctaagctagggcttcaacagttagcatcaacggagtgcttgctctgctttgccgtctgttccttctcaatgtctgctcatgtggcaaaacggatgggtgctccccttagccacctttagaagaagactgacttaagacttaaaagctctcacctctcaggctttccagcacttgtggtaaggtttcaatatgtgaacttcgagcagaaacaaacattccgactatgtgagaggtcaccagaaggcattctagaaaacaaaaatgtagtatctcagtctgttgatatatattctctttctgccataagctagaaggacagactgacaaatatatatgtgttagattaaaatataaagaacctgagtgttcaacaatacaggataagcaatctattctatatgaccagaaaaaattaggagtgagactgtgaaaattaatgtttatcattatcagactaataatcctaaagagttattaggtgctgaatttaagctatgcccctttctaaatgcttttattctattagcttaattaaccaacctgtactatacagtcttttagtcaaaatccatgatctacccccattttaaagatagggaaattgaggttcagaatttacctcatagcatgcctaaggatagatgactagtatatggaagtagaatttaaactaagccaatttggccctgaagttcttgcccctaggcgtcattcactggatatctctgtaactttttttttcttttttttcttttttttttttttttttttggaaataatcaaaatgcttttacttcaccatgaaatgtgttggagataagcagtcaaattttgacaaagccagatggctggaaaattgaaacagtatttcctcccagagatgaaccctgcagggtagagtggagtttaaatgtatatagaaataggtaccaggtgagggtgaatcagagagtgctccctcttactagttcactcccaggaggaggcagaatggaggacttggtgcatttgttcctgcccattgctgtgtaacagaccatggccaaaagcagttgatagaggaagtttattttggcctacattccagagggatatgtcgggtgagcatggcagcaggaacaggaagctgacagatcacttttgttaccttaaacaaagagcagagagttaactggaagtaggcagtgtccactccagcaaggctgtgcctactaaacttaccccaatgggacctccagctggagaccaagtgttcaaatacctgagcctatggaggacatctcatttaaaccacttaaaatgtcttaatattgttagtgattgtcactcataaaaggagtcatgggggatctttaacgttattcttcagattgtgttcatggtaaacacttaaaaaccatacgatatgacttttgatgctttaaaactttatttgaacgatatttttattgtgaaccatacattacttttgtatattctgactcaaataagtggtcataagatggttgtagggtactcatctaccagctgcccatagtcaggctacctttgtagtgaagatagaggatcaaaaaggcctttggaacatttgattatttttgaaacctaaattatttattagttgctgttaaatttatacatgtatcttctgtagtaagttacacactttttaattctctaagatttttctagatgatctgttaattaatttataagtaataacttcttcccaaatacttacagtcataatatttatataaaatctacccaaaactaaatgagctgtttaaaataataagtagtttcttagataacatggaaatgactcctacctaaatataaactaaaatattaatgttacaggatatcatttatagtacaacctatccttaattatcagtataaaaaatgtagtgtataaagctttgagactgttgtcttccctgcacaaagttacctacctgtttcagctcaagtgactacaacaaataccatagagtaggtggctgaaatagtagtttatctgtttgctcacagtatagaggtctggaggtccaaggtaaagtttctgctgactcctttcctggtgggagcactcctcaccagggctagcttctctgtgttcacatggaggagttctttgactcatttgctctcggaacagctacagccacaaggtaggagtcaacccttcgactccactgagtctgaattcattcctaaagaccttgtctctctagaagcagtgacattggggttagagcttcagtatttgaattgctttgactaaacccttggcagtatcctcccaaagtctgtgtttagttgattttattgtggatgggactattttcatactcatgaacgtctttaaggtatttgttgctctacggtgtatcatggagaaattatctcaatttaaactatgaatttctttttagacacaaaatcgaatgaaattaatggctgacaactatgaggatgaccacttcagatcctcccgttccaatcagacgaaccataaaccctccccagaccaggtaagaccatgcttgcgtgtctcatctttttaaaaggatcacttatatccacgaatgttgtggtaacatattgcaaattctaggttataaattagaagaatcttagcttttcctcaaataatttcaatataggaaattcatgattctgaacatcttaaaagtaattgccttgatgagataaaactgagtgactcctacttttcttattaaagaattggttctgttttaggaaagcaagactgctcaagtgcaggcatggctcagaacagaaattaattcttgttgaattgcaaagtatttagtctctgtacatcatccgttaaaggtacagctgcaggctgggatttccctcagtggtcagtagcttatcaaggctctaatttgaatgtctatgaccagaaaaaaattaaatattttttgaggagtgtgatagatgaaatttaatttcttcctttcgtttcctggtataccctttcagcatgacattttcaagagacattgctttcagcttgctactaatgcagaagagacagtcatgacactgaagagaattatactgaattgcacatttttgaaaggagaaaacaagatcttgaatgtgatgaatccctattcatggggattgggcagattatttcatatctctgtgcccaaaatcagtttcaacatctctgtcacacccagtcttaaaatgtataaaagtgcaaaactaaggggaaaaataatagccaagtaattacaaccatattactgcaaaatcaaggaaaactcccctgctaaagatctccaccaagtgacaactggggcattgtcttagaagaagccatagaaacatatagatgaaagtagcaattggtatccggaatgttaatctaagagtcagacggaatggtcctgtaagatggcctttactaaggcagctgagactcacctagtactactatagagtaaacagaatcagccttacatcaaatggagagccatctgcctggtgtccccacctagaaaccactgctctgcctgcttcctgctactggattaagactgtctagcctctgcatgaaacatgtcaggtctttcccatgcagcaagcttgggtattcgatagaggtgataggatgtgggaagggcagacagagatggaaaaggcaaccagcagaccctatagaaaagctctgacctgagaacgttacagcagctctgggaaaggaggggagtagacatggaccataaactcattactaatttgtagtttagacagctagaacctaatgtacaaacagccaagaacttcttttctgctacattatgtttatgtctttgttttaatactaaccaactctttttcattcccatgctgccctggggcattgttcccttgtcatctctccccgtaggatgaggaggagggtatatgggcatagccaatcagatgctcttagttcagccattttgttcagaacggtgagaaacagctttccttaattatgggaatgattttcgcttgttttcatgtttcattctccgtgctcacttcacatcttctctgtacagccatgaactccctagtgtgctctctgctccttttattttcacatgactcttgtgtggattgctgtgtttttgacatagtggggtttggattttgtgtcttttttttctttttgtgtgttattagtcacatttataatttctttctgtacatttttgacagaacttccagggcatataacaaaaattgatgattttatttataaatcatcctatcgctggtgattttacagtgtcctgtttaataactcaccacgaattgatgggattgaggggtggacaaacagctatgttgctattagcctatgtttaaaatatactttatgataattataaatatgcaatctgatttatatttgtttttaaaaagaattctgagggccagtccctaggatctacctggggctttgacattagttttaaaatatcaatttaaaaaaagttggaacaagggagtaaagatggaggctatgttttaaatttcttttcttccactgctgccgtgttcaacagctgccaggacactgtctagattctcctttacaggccatttggctggaaaacacagtgcagctgtggctgtgtcttcctttgatctgatgcccttgaggtttgtctaaggaaatcagtttcttggaaagtgataattgtgactactaagctcacacgtactggtccttgcatccgctggacacactgcccatgcttttgttgacctcactcctttggagtctgctctccctgaaatgtctgtgtcttgatgttaaactgatttaaaaatgcaaacatatcaacctctgaatattgaacacagccaaaaaggataaaaggtaagtctttcagtggccagggttctgtgtgacttttagcagcaggtgggaaatgtacagtagcaaccagaaagcatgctgcacatcagaaaaagctaaaaatcaaaggacatctgtgtcctggttgttcatttacacactgcaggggcatgtatttgttaccatgaggcacgtaggggccacacagtagctatagtttagcagtcatttgtaaatgaatgattctgcctcttctccagtgttttgggttttattttgtttttggttttttgttgttttgttttgttttgtttttttggcaggacaaggtagcttcttggcttgtggcaagcaggaagaatgcccctcatatacatgaattgtttcactcacagccctttttctagtcaatgataagaaatgcataagccatgtcctgagtctggagtctacatttccaggtctgctgctctgatggagcaaggtctataccaaacttcctgctcttgcactaaccctttctacctgtgttcttagaggcctactgtgcctgctgctgtcggtggctctcatgttcattgcagctagctggctggaactgttgttttacaatacagttcttcatactttctacactctgccacagactttatatggtaaaacattttacctaagggggaaaaaaaaacactaataaaggctggggttgtggtgtgtgcctgtaataccagcacttagaaatctgaggctgaaagattatgaattcaagaccatcttgagctacatagcaagaccctgtctaaaaacaaaatcaagagttgtaggagcaatccctaaagcactgcagaagtcttggcttctttctttcctgtgttttatttctttgtttctacagagaatggatttttcttaacaaacttttgaatttgaattttatgctttcctaccaacttaagaacttaatgttttgtctaaagcattttataagctaccactcactgacgaagattgagtctaaagtagaagccattgggaggagctgaaagttctaagctgggccaggctggggggctgcagagcctgaggttccgagtgcaggcttttgagcagtctttgctgagtccttacagtagaacctgctggctggtgtgctccctccactttgaattcctctctaagagacagtggtgtaagaagtagagacattgtgagacatggacctagactacacagcctggatctagacaccaccacttaactctgtggctgagggcaagtaaggtcacctctctgtaggagtttctgtacctagttgtttgtcagtgctttgtgttaatgtaggatgctgtcagaagtttcttacatccttaagcactgtactttatgcaatgctattactgttttcttgctgtcgaactcattaatttagagcttattctgagaagaataagttttcagtgactgttagttgctattattagaaataccatctaagtactgtgtttatttcagagataagactgtagggctggggagatttgaagttgtgactcgggggtcctaagcatttctgtgttctaggacaagtgattagtagctgttcttaagtggtaaccaagatacatttttttttttttttactgaatgtttgatgtcatgtatgttgaggaatattttcctttaggaaaacaacttgtaggctagcaagattgctcagtgggtaaagatacttgctaaacaagcatgacaacctaaattctgtctctaaccccacatgtgtcagagggagaaaactaactccacaaacttgtctactgacatccatatgtggaccatggtatatgtgaaccataacacacacacacacacacacacacacacacacacacgtgcatgcatccacatgcacagtaataatagttaaaagaagacactttgaattttgttaaggaatttcctctaatagatacatagtcagtggcattttctgtaaaagaatactttccatcagtagcaatgacatgtttgccaacataggactccaaacagtagtacaaatctgaccaccttggccaccccggtgagagcaccaaaacgaagacaggcagttttctgtcaactcaacacaagctagggccatcagagaaaagggaacctcaacttagaaaatgcctacataagatggagttgtaaggcaccctcttcagtggtggtcagtggggtgcaggggccacccttatgttggtggtctcagttctatgaaagcagatggaacaagccagtaagtagaaccactactaactgcatggtctctgtatcagctcctgcctccgggttcctgccctgttttagttcatgttctgacttctctcaatgataaagaatgatatgtgagtgtaagccaaataacccctctactctttgacttgcttttggtcaaggtgtttcatcacagcaccagaatccctagcaaagacagatttttctgtctaaattagcttaaaacaagtgctttagacattgctttggttctgttctagtggggtgtccacactgttcccttacctgttggacactgtcttagggttatattgctgtaatgaaacatgatgagcaaaagtaacttggggggggggcattattctttcacagttacatataacaaacaccatcatccaaagcagtgagggcaggaactccagcagggcaggaacatgaaggcaggagctggtgtagagggtatagaggggtgctacttactggcttgctagctgtgacttgctcagcctgctttcttttctttttctttctttctttctttctttctttctttctttctttctttctttcttcctttcttattagatattttctttatttacatttcaaatgttatatcccctttccttgtttcccctcagaaaaccacctatcccatcccttctccccctgctcaccaacccacctactcccacttccttgtcctgacattcccctatactggggcatcaagccttcccaggactaagggcctatcctcccattgaggtccaaccaggctatcctctgctacatatgcagctggagccatggatccctccatgtgtactctttagttgatagtttagttcctggaagctctgggggtactgattggttcatattgttgttcctcctatggggctgcaaacttcttcagctctttgggtcctttctctagctcctccattgggatcctatgctcagtccaatggctggctgagagcatctacctctgtatttgtcaggcactggcagagcctcttaggagacagctatatcaggctcctgtcagcaagcacttgttggcatccacaatagtgtctgggtttggtgactatatggtatggatccccaggtggggcagtctctggatggcctttccttcagtctctgctccacactttgtctctgtatctcctcccatggggtggctctacctataatgagctaagccctccaacaagaaccactaattaagaaaatgtattgcaggcttcttacagcctgatctaatggagacactttctcaattaaggtccccttctctgatgactccagcctgtgtcaagttgacataaaactagccagtatgacacatactggttgcattagtgctacagtttgtaagtctttaaaatcttcagaaaatttgtctgtagaagggacgtattaaataagtcagcagaactaaggaatgtccaatcttttggcttctcttggctacactggataaggaataatgatcttgagccacacattaactatatgaacaataacaaaagctaacagagggtgggagttctatgtaattttttttaatatataaaccactacaaataaccaaaaaaatcatcacatgataacacagaattatatggcacgtcatttagtcttctacaccatgaaataggtcccaagtttgtgatctttaataaggaaaacaaacatttctaataagcttcattgaatttttttattataaaagttataatgtattgtaacactagttggatatttggcattatgtttgagagactaatgcattaatatctggtttattgaaagcacttgcagttctcagtgagtctttgaggtattcataaggcatttttcccttaatatatgtcattctttggacatgtgtgttcttacgtatatgtatatgcacacatatgtgaatgcacacttacatgtatgcccgtggaagccagaggttgacatggtgtgtctttcttcttccatagctctccattttatttattgagacaaagtatttcagtgaacctggagcttgcttgctgattcggctagtctgaatggccatctcctgaatactgagattacacgtgggctcccactcaggttttacctggattctgaggttctaaattccagtcctcatgtttatggccaagcagtttatcctctgagttatctccccagccattagttcccttcatttgtatattaaaaaaaaatgcttacaaatgtaggtgctacctaaaagaaatggcctgaatcacacgcatggttgcaatgaggtgtatttgcctatggggagatagaatctatggaagttcaaagacagttgcttgtccatcagattgcatttctgtgcattccatttggaaattaacaagtcaactgaatttgaaatcacagatatatcaaagtattaattaatttcctggaaatatttaaatattgctttcaagttattgtatcaaattgaaaagtaaggctgcatgttttccactgtccacaggactgtcagtaatataatgaaatgcataaaatgtttgccctgatttgagcttgccataatttcaattccatttgcaagactatgtaactgggaacgttacattgataaattgatttttatcttgaatctgtgttttatcttgaagtagttaaaaccattaaaaatgccagttttgatcaagttctggcacaaagtttttttatgatcttacaaacaacttaggatgttaaagatcacaaaatctttttgacaattgacctcaaccatcctatttctgaaagtaaatggtgttgccataacctgcatctgtcagtgctgtgagggaattcttagaattggtgatgatttaatccctggaccattaggaaactcacatatgcagttcacatgcaggttttctcaatatgagtgtggtggggcaagtacatcatctccctttaatcccacaagtttctctcatgtctgccatccccaaggcatcatcattaaatctgcatgctgactaaggaagttaatctaacataactttttactgctttgtataaatctcttgatttattcggtcatttttttagtctttgcgacatgacatctgcaaagttcatgctcgagaactacacagtcaaattacaaaaatttttgagtttttccccctttccatcttgtgtcacaaggataattcagcaacctcatgggactttttgctgaagatacacagtactagaaagtgcataccatacaaagtatgcttggcccatcacagttattgttcagtgaggctaactcaaggggattacaagttaatgggactgtagaacgtaggacaggcatggagacaaaggaagtattaatatggatttaagtgtggacattgggggaaagagatagacttaagaaatgacagtattgcacaccctacagttgttggcctggccttctctaaagagtcacatttaacccagcacttgagagacagaggcaaatggatctctgagtttgagggtggcctggtgtacagagtgagtttcaggacattcagggctatgcagagaaaccttgtctcagaaagaaaaaaagaaaaaaaaggaggctgggaggagaagaagaaacagaaagagagggaattcaaaagttttcctcagctatatagtaagtttctgaccagcctgagagcggcctcagaattactcccttaccaaaaaaaaaaaaaagattttggtgactttaaaagttatattgtttaaagaacttaaaaacttaagttaaaatattttagtatactttttagctacaaagctttttgcaagtgttttgggtccctccctctcccccggaaagaaattaggacaggatgtcaccctgaacctaagctagtcctgatacttactgcctagcacaggctagcatcaaccttaaggcagtcctcttacctcagtctctccagcgctgggatcacacatctctactccaagcttggttcataaggtaggtttttggatttgttatatgcatatgtgtacaggctgataggatgagaacatgggtaaagggggtgaaggaaattcaggcacgcttcgactgtaagcatggtttctaaccttgggctgtgtggtccgggtgatctcaggtgatgggagtggcaggcttctttaccttccccatcccttaactttcctttatagcttgtcttggtttcccttctgggactttaattccttatcttgaaggttgatggctggcctaagttccattttctgaagtttctatatgctgaaccagagctatagaccctgcctatcctgaaattagaagtctcggtctaaactaagagtcaggggaccatcatttaatgagaatttagtagaaacaatgtcattacggaaaacatcagactgcaaaatacagttagcatacagcagatgagttgtacctaatttagcaccaaatatagaaggatgttttggcatcataatatgcttgagacattaatctcagtaaatcactacagtgttaaggctgaacctggcagatttaacttcatcttggaggacagaaggccaagttgtcaggtatgcatcatgtatagatccatagcagcttaccctactctcacaggttccctcctgtgctctatcagatatcaaagtccaagtttctaagagctgtttccatcctcttaacttttgagcttaagaattagatcccttgggttataaaaagaaatttaaaaacatatttttagttgtatactaagaatatagcaaaacaggcacaattccaaaaaagtaatccaagtagattagaaggaaaatattacatgattacatgtgattaaatgagcagttcctggaagaaaaggcagtaaagcaaaccaaaacataaataccagccagagctactgggaggttcataaacaggatttaccttggtgcataagcctcagctacaagcactgttgttatggatatcgtctgtgaccattctccatatccataggtatagtatatagctggagaagtaagttatgggtcttctaatgtcccctaacttatttgtaatgactgccaaggtcacaccatgtcttcatacctcatagaaggcaaaggttctcctaattgggagcctcaaagctgagactgacactcattattgctccagcttttgaagctgcttgttaaaggtttagtcggtcttttgatgtcaggttcccttccacagtgcttaatgtacaaatatgtttacaaagtttctggtttatcaggtatggtagagaacaaaaccctcataaccaacaagaaaaatctgatctgctacctcaaggttccaaggcaccgtggttcttacctatatttcttgtgggccaggatttcaagaagaaaccccagatagttgggttttaattttttaagttatcatacaaagaagagggtttcattatgacgtttgtctacatatacatcatgatcctttggttctgttcatccctctcccctactgcccttccatggataacacctaccagccttcctggttccttcccctcctccccccaccccgtacttcgatcttctgttcattccattgccctctcttgctccctctccttttctttaaaatctcctccctccttctgatggcccccatcctgttttcatggtctacacatacatgtgcacgcacacacatatataaatgtaaatcgaaagtctgcaggtgaaagaaaatgtggtgtttgtttttctaattctagcttatctcgcttaacataatgccagttcaaaccattttcctgcaaatgtacggcttcatcttttaagccaataaaattctaagtatacacaggtcacattttcttcattcactcatctgttgatagattcctagctggttccctttcctagctattgtaaatagtgcagtcatgagtatggctctacagtagtagtagtcacattaacttgtgagtaaccttcatgctgacttcgtgatggctgcaccagtttacattgccatccccattggataaggatccctttctccccacatccttaccaggagttctggtcatttgtctttttaaagtgaaattgactcttggagtagttttaattttcatttccctaatagctaaggatattgcactcttcaaatatttataggccttttgtaattcatcttgtagcccatttgttgattttatgatttgaagtttggtgggtttttgcagcctttatttacctattggatgtgtacttggcaaagatccgttccattcactaagctgtctgtgtttggatagcttgagtcataatttcttttgctgtacaaaagcattctcatttcatatcatcctacttctcagctcctgaaattatctcttgtgtccagaggcctttcagaaactccttgctacacctatatttattattgttgttatcattttattcatttacatttcaaatgctatcccccttcctggttacccctctacaaccctccatcccatccccctctgcctcctcccctttgcctctatgagggtgctcctccatctacttacccactcccacctcacccctctaccatccccctatgctggggcatcaagtctcccctcccttcccattgatggcacataaggccatcctctgatacatgttacatatatatctggagccatggatccctccaagtatactctttggttggtggtttactctctgggagctctggggggtctggttagttgataattgttcttcctatgggattgcaatccccttcagcttcttcagtccttcccctagctcttctattggggttcctgggctcagtccggtggttggctgtgagtatctgcttctgtattggtcaggtgctgatagagcctctcagggaatagccatatcaggctcatgtcagcaagcacttcttgatatcagcaataatgtgagggtttggtgtctgcaaatgggatggatccctaggtggggcagtctctggatgacttttcctttagcctctgttccattttttgtccctgtctttcctttggacaggaacatttctaggttaacaattttgacgtcggtggatggcctcattcctcaaccaggagggcgtacctatattctctacaggttctgtcatccttttgttgcatatttgaactaaagtcatcccatctgggtcctaggagcctctcatttcttttgcatctggaaatttctagtggctacccccagttatccatcccccactgctacatatttctattcgatttcctgaccctctgcactgctctctgtcccttccaacacctgatccttccccccacccctttttcccccccctcctctctccctcccaggtccttccctccctgtacctcctctgattcttttgctcctccttctatgtaggattgaagcattcacactttggtcttccatttgaaaatacctgtacagtttgaaattttcaagtcttgcattatgatcctttttaaatggctcatttttaattgttttttgtgcagagtaagagatgaagtttttgttcttctacatgtatatatcctgttaactcagcattatttactgaagaaagtgtcttttgtttacctttcttgaatattgtgtgatactagctgtgcgggtttacttctgtattctccatttcattaatcagaagttctgtgccagtatcgtacagtttccatggaccctaatagtgcctggtgttacacctctattactgttcttgctgcttaggattgcttttgctattctggaccttttgtatttccatatgaattttagaggattttttttctggttctgtgaagaatatgattggtgatttgatgggggttatgttaaatatgaatatcactttggcaatacagccattttgtgtattagctttgccaatccatgacagtctttccatcttggcgtgtcttcagttcctctattccatgtctctctcctggagacaagaaaggaagaggcctcaccattcctcctagatactcctctcctctctgacagaaatgacctgggctatatggaccactgtgggactttttgcgtatgagaaaacacacagtagcttttggagcaggaagatagaaaataggagagaaaaagaattgctgctgatcttgatacagtctcagctattttgctgtatccctgtccagtggtgctattttttcttgagacatgtcattgtgtgacatatgtacaataatgcgcctacacttcctacttttctctagtgaaagactgcatctcatctatgaaactgagaaggcgctctttggttagcctctctcatagtgtttgacagtgttgaagaatggagctttgcttttagccctgtgtaactgttgctgcaagtcacttagcatctttaagcaccagagcctctgtgctaagtcataataaaacgtgtgctctcctagaaaggcctgcgaaggaagcaagagttcttcatggaggtgagaaatacagtaagaaactaagtgggagaagaaataggaactgcagtgggggcacatgagagcaaagtatgatgtgtacacgtaaacatgctaagatggaaccattactttgtatactatcctaaaattaatgaaagaatgactacatcttgcattgagggatattgtgaggattaaatgtcctcactcattccatacatgtcacccttctccaggaacccagggagtacacagtaatagctataaggatagcattggttgtggtggttatacagctttcgaatggtccttctctgtctcctgtgtcctattataaaatacattcttctgatcacccataaaactaggcctgctaaccagttttttcatcacgaaaatgtaatcataaaaatgacaatctttctgagcctctgatgaatccctagagagctcagcactagcccagcaactccattgttttgtccttaaggtgctgtggtaggtaagctatagacattgcgccctgcctgtttaccttcaagaagcaccccacaatagacagatttgtttcctccacttctgaaagtttctgactacagaaaatatttatgcagtagcaacaaatcattaaaaatgttacctctttatactgtggttcacagatccaccctgcactcttgtggtgtcctctatgtgattaggggagggctgtcctttacctcatttgatttactgcttagaccaaagtggccgtgtctaagcattgctaaggcgtatgcactcagattcatgggctcatatcatgatgaggagtattcactaatgaagcatcgtctcttcctgctattatttatgatttgggcattttcccaaacaaccagatatcctcagcattatgtgcaataagacccttcacatcctacttggttttcatagtcatctgaaaatacagaggcctaccaaagcagtttgtaatgtatctcaatggccctggattcaatcctatcacacacacacacattacatgtgctttgcttacttttatgcaagagtaactactgttttcattattcttttgagggggattgggtttttgttttgtttgggtttttttttttttttggtttggtttttttgttgttgttgttgttttgggggttttttgtttcttttttttttttttttccgagaaagggtttttctgtgtaaccctggctgtcctggaactcactctgtagaccaggctggtctcgaactcagaaatctgcctgcctctgcttcccaagtgctgggattaaaagctcgcgccaccaccgcccagccattttcaatattcttgtttctccccacaccctaaaaagttattatctaatctgataccacttgcatgtaagtgcctgggtgacccatccaatatttattatattttctagcatattatatattaagttcagtgcccggccgcttagcttatcctgtacagccccttttgatgctagttttaaaagacaggtctacacttgctatcctgtgacattattttattaggtggtgctgtggagggctattagttgactcctgtcttatctggacccttcaacagcagttttgtcacagcaagactctatggcactacttctgttaacttgtccatgactccccacagttatttttatacatcctctctggtaggattcttaggtatttgtggttaaatgaacattttcttggatacagaatagtatcatcaaccaaaacagaagagcccttctcctgtgaagtatcttcctcttcctaatgctaggatgagaccaagtctccagctgggcctggcagtccgtctttctggggtaatgaaatgagcagagttgattgaggtgtagctggactgtatcactgcttttcattgtgccaagagatcaaagcagtgtacaaatagaggcttagtctaggaaatattcaaaacagatggctcgttctttcagtgaaaattcggattttaaggcagaacacttgttaacaagacttcattgaaagatggtcaactatggctgtttcttcctagatttcaagactataatcacaaactttttgtataaggaggtagttgacaaactttttgtataaggaggtagttggcaaacttagagtggcctttagctgcttttcctgtggctatgaaataagttattcagattttgcttttggcactctggatatcaaatgaaaacatcttgaatttgctcctcattttgttggttggtcagtattttaatatctggtattcatattgttatatccccctggggctgaatcaggatggtagtactgtgtgccatgttttaacaaggtaaaggcacattctgtgtactcctttgctgtttacacttgagtcctcagtttaacatagaaaaattcaattagtatatgtggcttaaagttttcattattttggcctaaaacttattgaagtgagaaataaaattaacccataaatattttctggacatatcctgtgtacctatgatataccagtttcatggggaataaatgaatgtcccaaggccattaaacactacaaaatggatttttctacaacaagaaaaattgtacaaattgccatgggaaacctcagtagagactcagtagttaaaatgtactatgatatttgagctaactcctaaaggagcagtaaacatctgccagacagattgaccttatacaagtcatgaacagcttttgcaaaggcttagaagtataaacgacataatacggttagtgccttttctacaatagttcactgtagatagtgctgtgtatattagtcattttctttgctatgcaacacataccaaaatacggtaacctaagagagcacttaacactaatttattttaaaatttatttttattttatgtctgtcagcattttgcctgcatatatacattgtgtgtgccttgtgccaaaggagggcagaaaaaggtatcggatgccctggaattggagttaaagagagttgtgagcctctatgtgggagctggaaactgaactcaggttctctgggaaagcagcaggtactcttaaccacttagctttctatcgagccccagtaaacgtgcattaattttgttttctgggatactatctcttacttggatctcttgtggaatggagtcaaattatcactgaggactgcagttatccacaggcttgccttgggctggatcatccagtttacactgcagttaatgctaggcttagttccatgaggtccatttattaattgttgctcttagagccagtgctaatggtgttctgttcagagagtcttttcagtgccaatgagttccaggctgttcccccacattctcttcagtcaggtttgatgtatctaattttaaattgaggtttttgatccattggaattgaattttgtgcagagtggtaagtatggctctatttggattctttttcatgcagccatccagtttgaccaatactgtttgttgaagatcctgtcttttttttccagtgtgtatttctgccctcattattaaaaaaaaaaaaaatcaggtgtcaatatttatgtctgggtcttctattcaattccattgactaacatgtctaatttgtgccaataccattctgtttttattactatacctctgtaatacaccttgacgttggagatggcaatacccccccccagcagttcctttattatgcgtaattgttttagctatcctaggttttttgcattttcatatgaacctaaaaattaccctttcaagacctatgaagaattgtgttaaaaatttgatggggattacactgaatctgtagcctgcttttggtaagatgatcatttttattctattaatcctaccactgcatgaggaagagagattgttccatcttttgatatctttcccaatttctttgttcaatgacttaaagctttattttacaaactcattactattctttttgatatttcaactgtatcatgattttatttatcagtaaggattgtacttcagacatttctttttatgactgttgccaaatctaaatcctcttgtaatcgttattactgctgataacagtaataaatacctgttatgaatagatttttaaaaataatagttaactaattgatgaaaagttctaagaatttcttctctaatgtgagtttctctgttgtctgagattgagctgttgtaaggatttgcaattttcttaagacttttttatttttatgtgtatgggtgctttgtctgcatatatatttgtgcactacatatccacagaggctggaagaatctcaaatctattgagactggaattagatagttgtaaactgctgtgttggtactgggaattgaaagagggaccttagtcattggcctgtctctccagcctgtcaacttacaaatattttctaaagtttctaaatagtaagtgctttacacgttgcaaatcccatgttatctgtcaggctatttggcttctctgtcatagtgctgaaagcagccatagacacatataagcaattgcgtgtggctataagttaataaaacttgatggactctaaaattggtttttatatactttctgtgtaacataaaatactctttagatttttctttttgagaattgaaaatggcaaaataaaaagaatacaagcgggctggtgagatggctcagtgggtaagagcacccgactgctcttccgaaggtccgaagttcaaatcccagcaaccacatggtggctcacaaccatccgtaatgagatctgactccctcttctggagggtctgaagacagctacagtgtacttacatgtaataaataaaaaaataaataaataaatctttaaaaaaaaaaaaaagaatacaagcatgcttgttggtataagcctataatcccagcatttacaaggctcagacatggggctcatgagtttgaagtcagcctgggctacataggaagcaaaaccctgtctccaaaagagaaaaatatatacagcatccttaactcagaaccatacagaagcaggcggcaatgctagatgtggtccacaaactgtaattttccagttcctagtttcctctgttccctctccagtccctggtgcagctgagcactggggtttgcttgacacgtacttgaatcctcatagaacagccatgagcatcccattgtagaggtaatgaagcctggctgatgaccattgtggaagttaacaaagcagaggttctctttgccagtgttgtaggcctctccactggagtcaggcagattctagaattcagcctgcccatctgtctccaaaacttgagcttatcttcagaaacagcattacattgcttaaccattctgcactgtttcacaaagtattgaagattttgtagcatataacctaagtgacaccgacagcactttacacacatttgtttcccctctgtccctctctccctcccatctccatgcctctctctctctctcttcctccctccttccatctccaaaccccatgtcagagggcagcctctgaaactgaatacccagtgattactgcatgatgtcaccaagcaagggcctgcctgcttctgaccactgtgtttaaataaccatttctaaccagagccacagcggccatgctgcttgccctgaagaatgtagaatactttgctaggcagagcacacctagaattctagcacttaggagtttgaaacaggaagattgcaagttcaaggctatcataaacaacatagactctggagagacagacaggcacacaccactattacttgtgcttaacaggctgtgagttgctggatttccatatcagctgttgctatagcagtgtccaaaataagtgcagctctgttctgtctgggtttttgttttgttttgtggtcaggtcttaatgtgtagaccaggctggcctcagacttttggcacacttcgtctcagtctcagtgcccggagtgctaggattacaggtgttagtgaccacaccaatccaaatcagttctttattaaactcataggttacaaagcatcagctaagttcctttaattccaggatagctaataaaatgtcatgagtatagtcattgacatggaacacacaaggttaaactgccaagtaaacagctatgcttttctagagctgcaagttgtcatggctctaggacatcccagcatacagcagaggctcctgttgtctcagccactccaacactattccctgtgctggtagtgaatgcatgtgtttttagtaaaactaagagaaaataatgatttatcttcaaggagaattaccatagttcttcatattttaaaatgtacagtcttttccagtttccatagacaagcttacgctttaacaagccgtaaagccctatctcagagatcttcagagaagctttctacttttagaaccaggtatttattagtgataagatttctaatcactgactgtgatggcacatgcctttaatcccagtacttgggaagtagaaacaggtcgatctgaggtcagcctggtctacatattgagttccaagacagccagagctacagagtaagaccctgtctcaaaaagaaaaaaaaaaaaattgttttttctaacacatttatctatcctggatccaaggaaccctggatctgcactctttcttgtcccttgtccctgcatgttcagtgtcccctcatctcccctctcagcagagaagggggaggggccagtgactttctggtccaaaaactattaaagatggcagtggtcaggtatctcttattaattaatgtggtgatgcaaggccatcccacagatcctgaggacacagatcctgtctagcacagagctaaagccctgagtcctttgtcaatgttcataatatggataacattctgggagtttctcttcttttgtgagtaagcatcaaattgaaacaaaggatttatctcataacttaagtgtccctgggagattttttttatgtgttgtggaaaataaatgcttaatggtcacagtgtgtaatctgggaaagctaggaggggaggggcagggcagggcgtgaggggagggaaggggaggggtggggccctggctctggacgctctcactttaacttcttctgccatcgcccttacgtcttatttttaatctttgaaatgttaggtgtttattcacatacattaaataaatgtgactgtactatccttccagctaagcctaggtgcagtctagaacttgctgtcatattctatacaatatatttcttgatgtaaaaactgagagttattctaccttctcttgttttctgttaggattagttaaggatgactacaccaccaaacatgtgtagagaatctgttcatcgtttggcttgtccttcagatggcagggctcattgtttcaaaggctacatcccagaggattaagaataaaaagcttggatttcataaacatatttgaagactaagtcagactaaatctcaaccaaggcaaataatttatttagcaattcaaggatccttgacattggtttcaaaattaaacaaggataaatttcttatacaatttagctattatatatacccaaaacattaatcacttatctcataagttcttttaatatacagtagaactacatcttcatatattcccattgatagaatacagcataccactcaggcgttcactaagtgctaaactggatttttttttctttttattaattatgacttgacaggtagtatactgatcgatgtaataaatataccatagagtttttctgtatttttaaaaaactctttcataaatgagctgctttaagtgagaacataatatatagctccacgactttgcaaagaatttaacactccatctttgactaccctggccaactataatattgaccaggagaatcgctcagtgagaagaaatgtaaaagtggtgaacattattctctgcccttcttctctctctgctgggcctctattaaagaattccagtaagacaggtgtgcctgggacattagtcagtcaattaatagtgggactttcctggtacattctatattgaaaggcagtggacagtaacccaaacaaaaaaatcaaaactacccactagtatttattcagttaatatatgaacagcaaatctgcctctgacaatgtcagcaagtaaaaaagaacacagtgcttttatagccgattcagaattgtaagcagccacagaagactcttggtagatggaaaactaattttctaggaagactgagagtagctgacacatatatagaaacttttaaagggtgtgggtatgtgtgtgtgagaaagagaaagagacagagacagagacagagattacaggttcctcttctggtgatggccagagaggatatcaggtccccttgagttggaattataggcagttgtaaactacctaaaatgggtactgggaaccaaatgtcaattttcggaaagaagagcaaaaaatggctcgcaagtaaaggcacttcccaccgagcctgctgccggaagttcaatccccaggacccacaggtgaagcagagaaagaacccctcaagctgccctctgacctgtgcgtgctcactgtgtcacaaacacacaaggaagtgaacataacttttaaaaacctcttccaaacaatggaatttgaattccccaggggcagatgctctagtttctaatcattttcagccccttttcatccagtcttttatgataaggacttgggtaacttctcagagtgttataaccagctaagctatactcagatcagaggagaaccaggttcgggctactgacctataatcccagcttcaagaagctgaagcagggggatcacaacttcagcttcaaggatcataatgtactgacgctgtgtgtggacagacagcaatatttatgggtcctgtgtggcatctcctttcaacttgccttcagaaggagtccctgtctcaagacaaaacaagccaaacaaacaaaaatccccaaaagtagagtaagaagagaaaaccctggccgtcttaattggataggtgcaatggagtagggactgcttttgtttattctatcctggtattaaaatgtcaaatgatctgtgtgtctggaactcatacgtaatgaaccatacacatagaatattgtagaatcttccttcactctctactctgaaaaatacagaaatagtttcttagtctttcaaaagcttactagttatcttagctaaatggaaatgaagttaaagcaaacactttcacaccactgtcatagtgcaagcaaaagctggcccctgaaaccagtttgggaatctattacaacaaatcctcttacaaagaaacaactctcagctagaatgaaaattttcctcctgtcataatttatattccttaacatttataactgtagaactaggcctagttatacaaacattatcacagccacttctgaggctgaggcaggaggatcacaagttcaaagccaaagggcttgtttatcatagcaagaccccttcaaaaatttatattaaaaaattaagggcctagtccaatgattggatacctcaccaatatttatgatctctaagttcagttaccagcacatagacacactccaaagcatagaatggtgaaaacacatttggatggaaccttttggtcataacgaatatactctgaaaagttcattttgtgttttttcctatttaaactatatagatacacacatatatgaatatatgtgtgtgtgtatatatatgtgtgtgtttggtatgttatttttatatatgtatattttgtgtgtgtgtgtgtgtgtgtttatgtatgtatgtatacacacacacagcatgtttttccttgggcgtgaactcaagcggtataggcaataaggaagatgtgaaagtagaaggaagaacaagaaggttggaaaatcactattatgaaaatctattacatatatgcacaaaaatatcacaggcctcgtggcacaggagattgaaacagaaggatgattgcaagttcaaggccaacctggagcaacctaatgagacacagtctcaaaacagagtaaaggaagacctggggctgtaactcagtgccactggctaatgtgtagaaggccctagattcgattctcattactgtggtgggggcgggatattaaaaagtaaccccactgttctatatagataatattctacctataatatgaattagatagaaaaatgttcatttatttttgagacagggtcacactgctgcaaactcattttcttcattaggctgtctattgctgcaacaaaacaccatgaccaaaaaaagcgagttgggggaggaaaaggatttcttggcttacactttcacagtactgttggttgaaggcatttaggacaagaactccaacagggcagaattctgaaggcaggagctgatgcagaagcatcaagaggcactgcctaccttcctgtgctcccatggctcgtggatcaccagctgagtgatggcaccacccacgatgggttgggccctcttccaccaatcataaattgagaaaatgccctccagctacttcttatggaggcatcttctcaattaaagtttgctcccttcagataactctagcttgtgtactcaccatcctcttccctcagactcctgaatgctggtattagcggtagtaaaccagtatcccaacctcttttaatggttactcttcccagatgaaacacatcttttctgaggagttggggttgtttgtgaagaactatatgaatccttcactttctaaacatctgctttgactagaacaccttgtccttatttgattggttctgttgatctgcctctcatatatagaaaatgctgtcacagaactgttgccaccaacctgctgaccagagggtgtgggtgtgtgtgtgtgtgtgtgtgtgtgtgtaaattagaatgataccacacagattcacttttctgtaatttgtctatccaggccccactttagtttttatatgatcctaaacttgaggtaaagactgtaggattcataatgaagttggtgttactgttcaaatgaataccaggccttgtttctttctatttgaagatgatctagtcccttttacatgagatggtatagaggcatcgtggtaatagaaaatatcaggctagtgcatgcagcaggtacaagtttctggtgtgtatggtctgggaactctgtcaaggctcaacagctcccgtagctgttctagccgcatgctggaatgcaaaacttgggctgtgacctcactgccaatacctggctagagttttgtccccaaagctgtcacatgaaacatgtaacagaatccattggtcaatatactcccagagagaatcgtagaaacacagaaccaatgttacaagtgaggatttcggccttggctgtgagtcaggtacttggtgttatgcaaagatctactagtcactgtgtacagagaaagaatgtcagatagcctctgagaaatgaatgaaggagcctcagccaggatgagacagatttagtaatgagttctctcatcatccatctaagccaagaacaacacgcaccctctccagagactgaacttttcttctattctagaaggcagaagaccataggaagtatgttgcccaggctttcagatgagcagtgttctctggaagccttttgaaagctgctcataaagatgtgcacagagcacttgtagcatcactggaggctttggacatcaggaacatcatctctgtacaaacaagctagtctggactggcaaaatgacttagcaataaaggtatcaccaagtctgaagacctgagttcagtccccagaactcacatagtgaaaaaaataactggctcccacacatgccacggcaaacccacctgtattcaacataataaaatataattcgtaatttaaaggacacacaagtcctctttcagtctcctgcctcagtgcagagttctccatctggtattgatggactcagcgatagtcttccttccttccttcctggaaaacaacactgtgaaattgttgtgtctataattaggaagattgcagtattactgagagctttcgtcttggtttgggagccataaggaatatttgatttcagattaaccttgatttttccctttttctcacctcagatcatccagcccctcttagaacttgaccaaaatagaagcaagttaaagttgtatattggacacctgacagccctctgccatgaccgagaccccttaatcctccgtggactcactccaccagcttcttataatgcagatggtgagcaggcagcttgggagaatgagctgcagaagatgactcaggagcaggtaggtcttgttcaagacgtggcccaagcacacttccctatggatgggtagtgtttggggataaggacatggttccagtactgtgcgcgcaagcctgtgtgtgagtatgtgtctgtgtctgtgtctgtgtctgtgcctgtgcgtgtgcgtgtgcgtgtgcgtgtgcgtgtgcgtgcgtgcgtgcgtgcgtgcgtgcgtgtgtgtgtgtgtgtgtgtgtgtgcgcgtgcgcgcgcgcacacgtgcgcacgtgcacatggaccagagacatcattctcacgtgtcattcttcagagctttcggctttttttttcttgcagtgcctgttgctgcctggagctcacgagtttaggtagactgaccgtgagccttggggatcctccagcctcccctcccacccctccctccccagctctggaattataagcacacacaaccatacccagcttttcacattgtgctgggatcagatcctcagactggtacagcaatgctttaccaactgagctgtctctttaggccccaaataccatttttaattgatttataattttttatttattttcaaatcaacagaaaacatgcataacatcattttaaaaatatgtactgagttaaacatgtattattttttatttttatttttggggggctaaaagttgatttcatcaaagtagaattttggattaatgtagtaccctgagtgttctcttcctcctgctgtctgttttgcatactcctcagtgtggtaacagaggggtggtctttattgtaattacagcctggatatctacagctgaggggtataactaaagggtataattcttctttagcacacctgttaccctagaatctgtagattgttctagccctgtcaaagcagcagcttgaagataggactggagtgggcattgcaaggggaggttgggggtctgtagactctagggtagcaacagcaggtgagtagtaggtatgtggtagaccacatctataaaatgggcacctcagttctcacacaaccaggagaagggaggacagcactttaaggctcccagaatcttctgatcctcacacaaagcacatatttatggctgttatgcaaagctttctttttcttttttttttattagatattttctttatttacatttcaaatgttatcccctttcctagtttcccctccaaaaatcccctatccccccctccacccgctccccaacccaccactcccaattctggccttggcagtcccctatactggggcatagaaccttcacaggacctagggcctctactcccattgatgaccgactaggccatcctctgctgcatatgcagctagagccaccagtcccaccatgtgttttcttttctcggttctttgtgaatttcacatgatgcatcccagtcccactcatcttcccctcccttgtatctgccctccattcttgcaaagcttctttatctatcacccgcaaagtcagttgtatccctgttcatttctagacatactgtgtaaaagacagattttgaaaacaaatcagtacatacttcttcagctttggggagcatgttaagtattcaggccttagtttgagacacaatttcttcatgaaacccagagctggccttcatggctagtattactagcaggcttgcttaggggaccctacttactgagctggaagtgcaggtgggttgtcttggtactcagcacttatgtggagtctgagggtccaaactctagtcctcttgcttgaaggataagcacaataactgctcagccatctcccaggcccacatcacattacttttcatgaactatttcaagctccaaaaactgtagacgttgatataatgttctctgtggtgttttagcgaatgattcccacataggtttcaggtcttaaatatttggtcccctgtcagtgatgctttttgggaaggtttagcagatgcagccttactggaggaagtttgtcacagggaataggctttgaaagtttccgttcaacctcacctttctgcatcatgcttgtggctgagatacgagctctcagcgtcttgttcttctcccacaagtttcttttcattatcacagcaacagaaaagaaactaataaaagaccctgtctcaaaaatacaagaaaaggtcagggagatatcttcattgctaaagtactgagggtctaagtttgagcccacagcctgtgtataaggcagtgtaaggctgaggtggttcagaggataaggtacttgccgtacaagtgtaagggtcagcctttgcattcctagagcccacataagttagctgctatagcacatcccagtgctcctgggggatattgagaagcagagacaggaaagttccagacgcttaccagccatttagtccagcgtgagcagtggccaacaagagaccatgtctcaaacacagtgggaggtaaagatggatttctaagagtgttctttgactttgacattcacacaagcgcacacatgatagatagatagatagatagatagatagatagatagatagatagttgcatacatacttacatacatttgacaccccacattgggggccaaatgtaaaattatttttaatataaatgttattagtaaactaatccatcagctgtatttctttaccttattctagactcccaaaaccacacagagaaaccaggatttatttaaaactgcaccccaatagctgagcagttaaatgatctaccttaatctctatactaatatggctcccagccattaccccaatgtacttgcttattattattggtctggctctttggacataaggtgtgtttctatgatatctctccaggctccttcctcatggctccagttccaccttcctctggctggcggatgtcctgccctattctttcttctgcccagccactgagtgatcagtatttattgacaatgcagaagataagtgataagaactgtttacacaagctttggacaggagattcttggtataagcattacagtgccatatctggattaaaacaagataaaattgttttatcttgcacacatacacaattataaacttaaagacccgtgctttgggatgagtagagagatggggcagcaactaaggcattatgccctgacagccaccacattccagatctggggatctgatcccttctagcctccgttggcacttgcattcatgcatacatattttcacgccaacacacatgcatgcacataattaaatgtctttgctttttatcgtatgtcagtattttgttgtttaaaggtcacacctcacctctaacctccctttgaaatattaaagcagttcaactgataggttctgttaaaacactaaaatccactcacagtggagaacaaaaaggtttttccaccctaaacggtaacgtcccatcgggtggaagcacactggagtgactttgtaccaggcagctgctctgtgggtcactgagcttagattctaatccctgttcccagcactttgtcccattttcatttttcagaaaatattgttccaaaacttagctcaggccttgtctccttaggttgtctttccttttgttctctccaattgctgggtaacttgcacccatccctcttttgaaagaagtagattcaggaatgaccatgctggcgcaatactaaacacagagcctgaaagtcatttctgccactcagggctcatcagtcattggctatagacatgacattccattcttgcctcttggatggctttgcctggttgctgtaccacccaagtgagccaaagggatgcaggagctggtgggggcagagcctgagaaaccgcagagagagaaggagaaagaagaatggcccttggtgggtgacagactttgttctggttcccagtctctatttgtgatctgcttttcttctttttgtgatgtctgaacttgttttctcagctccagtgctgaagccttgtccaaagcattgagagcagcagcacgtaagacgctgcaaaaggcgagagcagccgtctagcagagaatagccaagccctgaagataaatgtgttttcctcagaactgagcacaggaatgtgtgcatgttgtttgtgtcttgacacatttatgaaaaatacacagtatggtagattcacttttcttctcagctctgctctcacacaatctggctttttcttcttccagagtatcttgctacttggatgctgaaatatctagcaatgaaaacttattttttaaaaaataaataaataaaaattggtattagggagctaactcagctagcaaaaatgcttgtgcaacaggcgtaaggatctgagtttgacccccataccagagcccacatttaaaagccaggcaaagtggcatacacctatgatctcagtgctgagggagacagaggaggtttgcctgggccttgctatgaagaggaggacgactctggcatagagctgagtagactgcacaggaggggttcaaagctgacagggcgctggctgcggacactagaacccaaacctcctgccctgcttctgcgaatgtttcccagcatgatgctcaggaaatgaagatgaaatgggagcttgctatggagaattagagtcaaaaatagcacttttgcatgcttgagattatgcaaacattaaatactattttccattcattcccagtgtaagaatagtatgttatgtttggtgtctacatggaaaaatatgcaaagatacaaaactacaggttcgtgctaaatgtagaataaccatatttgtgtcatcgtgagaagttacaaattaagggacctgtaaagtgtaagtgtgtgtgtgtgtgtaagtgtgtgtgtatctacacacacctatcacagataaggaagaaaatgtttccggctgaagctgtggaagctatacccacttggcgctggtcccagagtcctagaacctttggaaatgaaatttccagtccagtcatgctgttgggataagttaccactagttctctctcagagttttagatgttttaccaaaggcttgatggtcctgacctcactgtaactatctagaaattgaaatcacttaaaattctcaagatagtgtgtctactgtgatgcacgccacagcctcctgcctgagcacacaaaggtaacagtggctgtgtgggctggcaattctctgagaaaaaacttgtgtatactttaaatagaaatatgaataagagcatactcttctcccatggaacttgacttcccaagacaaaaccaaaagggatcctaatacacatacagtttcagtatacactcagatattgctgccatttcccactgcatacatgaccaccacccataatgcaaagcccacccaccaacaccaacagtaccctgtcagggaaaatactgacacagcctccctgcctggtccaaaaacttccaactattctgggttaccctccataccagccacttaccagacattctagctattgatgttaggaccactgccataaagtgctgaaagccttctgattctgagtcagaaaaatgggtccagatcacgtttactgtcctgacatgggaagttagaacaagatataaatggccagtgatccacggcattatataccaacagcaatctattagcatcttccagctaaaatacaccatgtaaaggactcacatagaaatttatcttctctcactctgaaggctggaaatctaagatcagggtgttggttctggaatcgttggccttctgattgtagacttctcactgtgtcctcaaatgatctagcctgagcatccatgatgtcttctcatccaaactactactgcttacatacagcaccagtcatacagggtagggcgtatgctaaaagcctgactttaatataatctccctttaaaggctccatctccaaataaagccatacccctaggttctggggattaaggcttcaacttgcaaattttagctggacaccgctccgtccataaaagcatcactggagctacttcagagcctaattgctgttgggccactgtttcagggttttgatttagctgattattataccagctttagaaactatagtctgcattccaaataagccttggagtttttgccctaaggtaaaaggtgctgcagaactttacacccttgagttacccagcactccctcaggggacgcaggctgctggttacttccacccagaaagtcaagtgaggtacattcacttaacagggcctttctgaaagagttgttatagtcacaaagccataacagcgtcatttctgaatacaatcaggaacattgtggggtggatacagtgatggttcttttacacacagcacaacaagtgtcctcctgctcttcctccctttagtgcaaaaggctactaggcacaaaagaaaatgctgaacatagcatatgttcactgtttagccctaaagatcaagttctagtgaataaaatttgtcatggggtccttatcagtgagaaataatggttttaatgttatcagactaagtcttgactttttaaatcaaactatgagactgtgaatctgagccagatttcagacagatcttatttccaacttggcagaaaagcatgtgatgtgatggtgactttaagctagtatgatggaccaggcatgttgcccactccagtgatcctagcaaaaaaggttagtcttgtcatcatagcacgcacagtgttaaagcatccttcgtctccagattctctgacttcatgctatttgatacatgtggagtctgtgggattatctctctacatctgcaaggctgaagcaaaaccaagtctgatcagcattcattcctaaggctagtgtttcacaaattaaatccaaaatgcagcaagcaggaggaggaaatcttggggagataacgtacggagtctgtggctcctgctgatgagacccagagtaggggcagtggagttctcatgagctgaaacttcctcagctaggaaaagcttgtggcttccagctgggtctcatcctttgactcatttgataaggcaaaccagcagtgggctttgcttagtcagatatcataaagtctagaaagaatttgaagagcacctgtctccagacagctgaaaccaaagaggtgaaatgcctcatccaggatgggaaagccaggtggcaaatgaggctcctggctcatgtattggccactactgctccttgcagcctaggaagtaaatcctcccagtgtgtcaactccagcagaaactggcactttgaaatgcagaacttcttgtcatgatgctgctggtgtagtcagtgccagctcaggctgagtgtgtctcagggtgctgcagttgagtgcaccacccaagcctgtgggtccttctagagacaaggggagagtggatgaataataaggagaattggagagtttatttaaccccttcacttgttccctatgggacagaaggaccctggtgttctgccgtaagtcctatgaagtgtcatgcagccataggcggtggtccacagacactggggataattgctcagggccacatgcagccttatctgggctctggtttgtttggactggcctactaaggttacatgcagaaggataattccagggtttcccagtctccccttgcctatgcagctgaatccctccctgcacttctcatgaaggccaagcacaccttctctgtgtctggctccctagaaggagactgtagaagaaaagctatgtctgttctcctacacatgcttgcattgtcttctcgggttaggccaaagctctgtgagtatgctggaggtctgaatgccgtggcttcatcatgtttctcagggaagtgtgctcatagcatggagagccttaagtattcattgagccagattagactggaactatccctggagtttctatcctatctttcttgacctgtgacaaaacttcaaaagtctgagatttaagagattataggaatatttttctttcagccccttaaggagctttcaaatcatatcccatactttcttcccttccacatgcaaaaattagtaacatgcaaccctacccacatctatctccgtgccagctgagtcagacacaggcattctctatcagtgtgtgatacttatgtctcaccactatacatgatcatccatgaatggccatgttcattcagggaccacttagaaaaccctcctgacaacaaaggttggtcattatagacacctcccatgattctgttttactggaccaggagtttgtaccccactaaaggatcatcatgtcactttctctaggagtagccattgggataatatatcaggcttgcactaaaattagagggaaactcagcagggtgaccacgggagccttttcagtctttgcctatcactgacactaacgtgggatcccacatgttgggaagcacagttctgggactaggtgtgttgtgcacatgccacagtggctgcaacactcccctctctcttcccttcacttggccagagacatcagctggacatggagtgggcctcatgggttctgcacttacagctcagctgcaacaaggccttattcttaccaccctggcagcttcagcattggatttcctaatccattgtttggtttggggggaggggcaggaggggaggcttcatcctttcccttttgacagtctttgtttctgtgagccaaattaaacacatggggctggccagccaccctgcctgggtctgtgctccccagaatattactattgttgtgatagatgtctttagcaggaggcaggtttccttacattttgaaaatggtgtgcaagtctcagttcatttcacttagcagatgattgaaagacaatctgaggtactgccaaacaagacttttagaattctagatagttggcagtgtttgtttaggccatgccactgcaagcccatataaaacagatgtcacgttttgcaacatgtccttgtgactgtctgccccttgcctcaggacgatgcttctgttcagtacgccaccagggccgactggcttgttgttcgaaggtgacagtatgccacagttccttgagtgttctagggacctacctttataggaagtgattcccattctcttggcccttcaaaatgagtgcataggacaccagccaagcagtgcgaatactctgtggagtttcttcttttcccagttttctctttcttagtcatgagtgttgctgtgctcctcctgtcgtctcggtctctacacacattcagaagagagcactctagcaagacagactcccatgagagagacggacctgggagttgttagtggcacagtatcacagaggggacacagattatctcacctagggacaaatgtcctagacaggaaagcattttagacgtgtctggctctaagtaggtcagagagtaagacatttagtatcttagcaacacttgcagatagagtgtgcatgcatctggaaactgtaggtctgacttctgacccaggctggcctctgggtgatgcatgctaagtttcctggagtgagtatgttcaccagcctagcacccttccaccataccgcttcaggcctttgtctcacctgtaaggtagagtctggaaccagggatcaccatgctccctctaggctgtaagttgagatttcagaatcactatgctttgactccaacatgtataagcctcttacttttgtgattagatgtttgcctggctccggtagggtgggaaggacaggaaagggacagagaccgggagatccagagtttgactcctcagtgtttgatttcactcatgactcagggctgctgtgttttcagtgctgtgacagaggagctctttatttggtcttaggtttgacttgggggaggatgaacctttaaatggaacccagggccttgggcatgctaggcaagtgccctggtccttaatttcttttcaacctttgaaaccaaattatacaaataatggcaatctaaccttgaaaagcattcatccagtacatgattaacaaatattgtgttctaagaataaaaatcctggggctggtgagatggctcagtgggttagagcacccgactgctcttccgaaggtccagagttcaaatcccagcaaccacatggtggctcacaaccatccgtaacaagatctgactccctcttctggagtgtctgaagacagctacagtgtacttacatataataaataaataaatctttaaaaaaaaaaaaagaataaaaatcctggagatgatcctggaattacatgattttcatgcttcacagcatgaagtacttgctgtttctgtatgaggaaggagaaggcagacattccttcatctcaatgcataactagtactttgcggggcagggaaagggtgtcatttttaacctgtgggtggggaagctgtaaaagtcttcgagattaatctgtagctttccttgccatcaatgctagtaaatcctacagtgtgaaaacagtgaccagattcctgtaggaaatggcttcctaattgagaaatcactgtgctctgaggtgcccccagtctggtaagctttatggtctgttcagaatagcaaagtagcaaaatacattgcagtttattccatatgtttgagaaattgaaactgggaagctcattttgtgtctccataattcctaaactgctgctggtttgggttatggagctagaaagtgtagccaagacagggcaatttctacttgacccaccacttccgggccaccaccctcattagttttacagctctgacttcaaagcctgtgtcctaggagttagctggtttgtttttttgttttgttttgttttaaaatactcaagttcttgtctgcttaaagcaaactaagcatttctgtgtaattttgtgcctaccactaaaccatctggaaaagggacttaactaagtcatgccagccatttacatagtttatcgagagacctctgtggccatgcctttcatacccatcagaggacctctctttgacctctcagcagtttatcttgaaatggagccaaatctacagaatactcaacttttttctcttagctgtctcttgtgaggctattccgggcctagcaaacacagaagtagatgctcacagtcagctattgcatggatcacagggcccccaatggaggagctagagaaagcacccaaggagctaaagggatctgcaaccctataggtggaacaacaatatgaactaaccagtagccccagagctcgtgtctctctagctgcacatgtatcagaagatggcctagtcgaccatcagtggaaagagaggcccattggtcttgaaaattttacatgcctcagtgtaggggaacgccagggccaagaagtgggagtgagtgggtaggggagtgggggggtggggagggtatgggggacttttgggatagcattggaaatgtaaatgaagaaaatacctaatttaaaaaaagaatctcttacatttgggtctctggtggctctcagttgtattgtgtcttgtctgtggcgagacatacaggtcctgttcttaagtcatagtgtacgctgagcagatgttctgggaagtgctcccaaggcagccagtttaccacagctgttctctcttgctccatccatcccacttatgtttcttatcattgcaccatccatgtcggctggcctctgagttactcagcacggaggctggccaactctatagccaacccttcccaacagtacctatatttgatggaaacttgtagaaccccatctctgctccttttatttgctgagcctcccatctgtgacagcagctctgtgctagagaccaaggcacctctttcactgtacttcacatggcagactgtgtgcgtcaccgtgagtgtgcgcatccccataactgtgcgcatctccatgactgtgcgcatcaccatgagaatgtatatcagtgtgatggtgtgcatcaccatgagtgttccacatggaatcactgctgcatttgagactctgctcaggcccctttaatcacattattacttcaagagtgtccaagctagacagttgttgccagcagccacttttatgtcctgtacttgcccctgcactccatcttttgggaattctgagcagaatggatgctgtcaacacaggcaggcctgtctcaccaggaggttcatatgattttgatttctttgttgtgtttctctggagctggaacacaggcccttccatgaaacaagcaccgagttaccaacccgcaccctacctgagcaagccgatctttataggctcctcagaggtgcagctaggtagcagagcacttagccgtgtgcacttgggcttgcactcagcccagcagcagagacaaaacagaaaatgtcttcagaaaaattagtatctattcctgcagtttgactcactggccattcttagattgtctgctctttgcaggcattttgctggacagcttcatgtataaaacagaaattcctccaggagtttaccaaagaattgaggagtcagcatagagcatccttaaaacaagacagaacaaatcttgcagcagtgtcccctctgagtggggaacactttagaagaaagggatgagctaagccatgagggatgagagagttagagagcatgagcagaaggaagagtattcacatgtgggtaagaacaacacaggcaagcaaggggtgggacgtgtgcgcagaacaggctgcaggagcagtggctgccataccgtgtcagctatgagaggggggtggaaaaggagaaggctgcccattccagcctgctctcagaggatcttctcaggagtcacagaccacagccattagctctgctggtaaatggaagagctgcctctcagacatctgccatgttggaaggtcaaggtggttggttcatggctgtgatttgctttcctgactgtgagaacagggaaatgggctcttagttgtttttttgttggctgaaatctgtagttaatctcaaatgcttcggccacacatcacaaacttctttgtgtaactgcatccatgttcccaaaataatgactctgagattaattaattatgaataactgcctaggccataagctttttcttgttcccagactagcacctaacttatatattgtgtttattctaagtcctgccaggtggttcgttgcctctcctcagtttcatgcaacccatatccatcagcattgggagcaaatcttgtgcatccctcatcccagagttctctttccttgctggaataccaacctcctacttcctgccaatagcttctttattgacagaacacaggagattatctctatatctttgacctgggcttttaagaaaacagccataggtgtggatgggactatggacaggagtgacaacagatgaacattgacaacagtgaaaattgagaagcaacaatacaattataataccaggcgtttgttcagctatgctcagaagtaatgaaaagaaaaagtgtgttgaatatattaatgcactaaatcacttagaataatttttacccaacatggatgcaaaagttagttcctgctgttaacccttttatactttcaaaatttttgacacagggtctcaaacttacagtccccacaagtgctggggtgcaagtgtaccctaccacactcattttgactttttaaaagttaaacgtaaacaggattgcttaagagagggtataagatgaaggaagaacaagggcggggaggggagtgtagtgctagatcactttctgggcttgcaagggccaggagggcagcacagcagtaccctggcagggacagtagcgtggagtggatcacttgtctggtgcacgagggccgggagggcagcacagtgctaggccattgcctagcacataccaaagcccgggctctgtctccagcatcacaagcagcacatggcagaggagggaaacgtggtgcaggagagaaaccagaggctatggcctgttgaatttgagggccagggcttctgaaggagaggtcagcagcgtcgggtagagtgtctcaggagagttctagccgtggcagttttcgcctagcgtgcacagaaaacctaagtccacagctgagtgagtatgaacagaccctccgatgactgtcccaggaaggaagtaccatagcaacacctcagcagtgttttgtcacacctcgaccctgtccttagtaagtcacctggcaaatcaatttactttcttttttttttttcttcctttgtcgttgagcacttccaatatcaactgtgtgctggagttaggctatgtctggacttgtgttcccttgtcactaagtgatacagtgtaacaactgcggcatacatagcatttacagtggcattaggcagtatgagtaatctagaggtaacaatgaggttacatgcaagtacatcatcttatttcattatttttatagaaatgataaccgtggatttgcttgtccataaggtgtgcaggtgtctgcaggaatttccggaatgacaactgaagtcttttataaagtactattgtagtttcttggccctttgtgtttgttgttctgatgttgttactgatttataggtgttcttttttttggggggggggttcgagacaaggtttctctgtgtagccctggctgtcctggaactcactgtgtagaccaggctggcctcgaactcagaaatacgcctgcctctgcctcccgagtgctaggaataaaggcgtacgccaccatgcccagcttaaaggtgttctttatgtattatactattagtctgtgtcccatgcatacattgcaaacatctcccacccatcagctgcttttctttcctaataatgtcttctaagagaaagtccttagttttgttttgggtagctttctttggttttgtttcatttgagttttcttgtttgcttgttcatttgctttgttttagtttttgtttttctttttctttttttttagtttgggacataagaccttacacaggcaggctgactttgatcatattagctgatggtgactttgaactcttgaccttcctgccttctgagtgctagaattgcaggcctggatccacacacatctggcctttagttttaatataaattaactgtttttctttttttcatggtgagtgttcttttgtgttctatttaaggaatctatgcatgataactttggcattgtatatattgacgttggaagggtacagagaagaccagcatgactgattgtatttgcaaagtgtcctgttttaaccttcacattcagtaaagatgtcatgctgtttttttgtgtttggttgctgtttggttgggttttctgagacaggtttctcactatgtagcccaggctgtcttcaaactttcaatcctcctgcctcagcctgaatgctaaatttatacgcatgtggcattgtggctagctctcctgttttcttttaaatatcttcatggttttttattcagacatacgtttactatccatccggaactgattttgtgtatgattgcaatatggataaaagttttctttcacatagccccatgtatcagaatatccagcctttcccctccacacaggaaatgcctttgtcataaagcaagtggtcatgtttgtatagggttttccctgaacttttttatagacacagctgcctaagatttggggggagggcagagtgggggaattgcactgactctctgagttagtttgagcagaattaatacagtatcaagtctctagtttttggacatgttatatccttccatttaagacatgttttgcttctgtaaatatacttaatagtttttaggtagaggtttcactaaccttccaagaaagcaagttaggtgacgaccatttgtgccattccccataccagctgagagtgcgcatttgaagagtttgatgacgaaaagctgcagtcagctttaaaagatgtggtttcaggggttcttttcacgatggaggaaagggacctgagggggtggcccagagggtacagaaagaaggaacaaagggtacactggggtcattttgaggaagggtattttgtttgtgacgtcacctggtagcagaactacactgtcataggcactatgcccttgcctctaggcagtgtggaatggttgcggtccagcttgctgctctcctgtactccagtctgcattgggaaatcttggtttgttttagcagagtacacttcgctgttttctctgctggagataatgtctctatatccattcttcagtttcagtctccccttccgtttctgagttaggttagggtttaatagaaagcagctctcctacacacacacgcacacattctacaacagacttgacttctagttatcctttgtcttagtcagggtctgactaatacaacctccgacatcccaagtagctggaaccccaggtgtgtcccaccataccagttcttccatggaatcttacagtatccacacaactgaaaggacattttttgaatggatatttaagaacttcaagcttaagttacagaaaggtctgactgattcatgggaacaaacttagttttgcaggttagtaaaactgtcctgttcagaaatgtttgtggtgtctttgcatgaaaagattttaacacatacaaagaaaattatgtgtagagaggaagttacaagctacctacaaattatgatgaactacagaaaccgaacaaacggccacaaaagccctagtatttttcactataatatttacagtaagggagttggtttgccattccataaaatagaggatgtgtgtcagctccctctctgtaacaagcctgtcgtctcacagagaaaggaggcgtgctggtctccgcttcagagattgcactcacgagcagttgccatattgctgttgaacctgtagcagggcagctagtgctcatgttgtggctggagtacacacacacacaaagaaagatcagcccaaagtcccacagtcccctgcaaaggcacagctcctcctaggaacctaaaactttggaccccttaaaggttcagccttctcagtaatgctaccatctggtgccaagcccttagcacctgactatagatcaagccctataaaaccatgagctgaaataagtcactcctcctttaaagtggtttgtgtcaggtattttgtcctgggcggggagggtggggggaactaatacaaagtccagtggatactatgatactaatatagtgccctctagctagtgtgttttatagtgtttttactttcttctttaacatatccttgtggatgctggattctcagctcagccgtagtgtttgcccagcatgcacagggccctagagcccattcccaaggtcagttatgtgccagctttggagatttgatttggaagcacagtatattgttaggtgaaaatggattagtttaactcctgtcttgaatcttttaaagatgcactaaggcttaacgtggtctaaatatggttcttgagcctccagatcagggtcaacagtcaacagaaagaagattgccagtctccctctgatggctgcacttgagaagtaccaagctcattcatggctcagaatgtccagtcaacaaacagtggggtcctgaaaacttggttctctttgccacttaatctactttttctgggtcatcttctccgcttgataacagtaattacagtagttaaccttttttcaagaattttcagtgcagtgggcattaccctgcctttcgtatgagattgtcgttaaatcctctaataaaactgccctgtgaaaatattactggtctatcctactgaaggggagggaggtcagggtcacatcagccaataaatggcagagctgacactgagatccaggctgtgttctaaactgggacctgaactgtacacttgacactcagtttccagtttccctcctccctcccctggaaccctgccttctacaaaatagaagcagctcttctacaaaatattttagaatttgagagccatgttacccactcattccgcgctagcccatcacaggtggtttctgttctcatgggtgcctcttctgtcccctgtgtgagtctgccttgtgcccctgggtgttgcctgctgcccctgggtgttgcctgctgcccactgatctgctttttcctaaccttccaagtcaccaagaagacgagagcagggccagtgtgtcgtttaaaagcacatgatttccttgtagtttgtaccagttggggtttgcgctctagcttctcttggagtctggcccttgcctatctcttcaactcccatacccccacccccacccccacccccacctcactgtaggatccagcttacccgaggttcctttgatctgcctctgatctcccaagtgacccagatcctcaccacctttagtggcttctcatacggcccagagtgaagtaaccatgtgtcttctctcccagtatgtcctcaagcctctgtgtgcactggactgggttgtgacttacatgttgatgttcttgtcctgctgtcagcctacaaggagtttcagcacagggactcgctcctcggcctttcagacctcacacagggcactggtgatgctagttagaggaggacagtccggggcgactgagaacagcacatcgggggtgtgtctctcctcagcagtgggctaggatatctatcagaataaccaagctgcctgaggcccctacagaaacacagctgtttgtagcaaagggaaatctttgtggaagagcttcacacaaagttgagatcctcaatcacccaggcctgtgagtctggactcctgggcacagccatccacatgaagtcagcactggacgttacagtgtgcagccttggactcagcactgactcctctgggccttactttcatgaagagagtctaggaatgtgtgtgttttgaccattccttttgatacagggacatcaactctgcttgtcatttctttcccgatgaattcccactaggtacaaataacctgaactccacctgaaccctgcctcttttccctttcagcttcagaacgagttggagaaagttgaaggggacaacgccgagctgcaggagtttgccaacaccattctccagcagatagccgatcactgccctgacatcctcgaacaagtggtcaatgccctggaagagtcctcctgatgtgctcctgacaaggagggtgaccaaggagccagagagggaacctgaggaacaggtgtctgagccgccaccacaccagactctgccagctggatgtgccagtccggccgtcggtgtctgtcatcgtactctgccttctgctttgaatgttgcctgctcaagtctccctggtctccatgaagaactgcccttggcatcagcagtggagtgctgcgagctgcactctgcccttccagaaacaggaagccagaagccactcagctcatctggagcccactcagattccgtgctctgggagcttggagctgaagctttagcacgagtgctttctcctcagagggttacagaaggagggaggaggtgaccagggacaaagagaagaacgaatactcctctctgcgcccgcgctgccctcctgtttaccatcatgagccccaggtacaggccagcttcatgcagcttagctctcagcctgttgcctgtctcacctgcactgcttttagttgacaggagaaggatgttcacagtggtcaccctgctcgctcttctttaagtcctttgaccttcccatgctacattggtaggctaaatgtctgactgaagagaagagggcttaatttgtagggccctcttgtcactgcctgcagttttgttcctcagaagctgtcctggagggccaggctgattcctcctgagcatcacccacagtgctctctgctcccaacaccttgccccaagctgctgttgaccaggggttgctagagtatgtgatccactgcccaccttctcagctttactctcaagatacaaccacagagccacagccttgtacctgcctagaaacttcttttggcacaactgagtttgtcttaatgcacacacattccctcctccaattcattcactcaaaaaatagtatgaaatgcctactgtgtgcacatccatgtgcacagtgtcatccttggaaaagcctcggatagggatggtgtggaagccctgtgagatgtgctcagttgaatcatggcagtgaacgcataccttctcccttccttcttcacagaccagcattctttgttctccaccctcatggcatctatgggcttgggtgagccacctctctgcctggaaggtcccgtgtggtaggtcaggatctttgctgtcagtgttactaccctgaaacatgttcgtttgtgtcagctgcctgcttaacacagccatgcacacctcatgggcttggccatgctgcaatcagatgcagatccccccaaccccatccccagctgtagaggacagctatcagatggagtcgggccctaagagagtgcagctcatgtctcattcttcatccctgaagcagactcctgacactgctgtcttctggtgagaggctaaggcctctcagcctgcatctccccttctgcccagttaacactctcaaaggaatttaatgttgcccacaaatctctctcaccctcaacctaggacatcatgcggccactactgtcacagtcacagccctagctccccttcttccctgacatgaagtgttcccttgtatgggatgctggagagaattcctcgtgagggttgggtggcctctgccatgaacctctcatggaggtgcttttggaggtcccagcctggccaccaggaatatggaaattaggctaaaagatgataatcattgctgctcagttctctcaattttttttaattgtcctatccataaatcctttagaaaatcccggtatttcaggataggaaggttaggatcttatttattctcataaggaaccactacctagtaacagcttcacaggctacagtggaaatcagaaaacttagaagagtccaggcccacaggagtagcctagcactgccactggccagctgctgctccagctgttctgtgagggatcaccacagacaggcctccttacatgtacccattttggtgtttattagcagaagtaccatctgccacccttactaactgcacatatgaacccctccaccccttccttctccatcaggtccctccagagaggttgcaggagccctgcaggacatgtgcttaattgagaaggcaagtttgtaaggcagactgtgtctgatctctgcactatagcaaaggcttctcctcctcagggagtgatccagcagctcaagtggctctggagactgtggagctaaagttgaaccataaatgtagtgtttgtggtctttgtgttaggcaaagttaatagggtatctggcattgggatcctactgactgccattcagtaagccaatagttactaaatgcgtaactgccattgcactgtacatgtcattccatgactgtctgcatgcacatgatccttaaggtagctggccctgagagctcactgcaggttggctgagatcagccctgtctcttcattccatcgtcaagcctcatagccttcgcacctaaggtaaaggtggcctccccccaggccttccttattggcctcctccaggccttcctcattggcctccctccaggtctttgaagaagggtcaaagcaagaatatgtcgctatgtagggtatgatacccacaggcctaagtaccagcagaccctgtgtcagcagtgtctaccccaagtgacatcataaagatgatagtaggaaaagagggctagaagccaacctggggctcccagctctgcatgccttagtagactctgtcccaggccctcattgagtgactgggattagcaagtacttatggacatttaagatgaagaagtcagagtggggtttagcaactcagcaatgcggaggggctcctgcaattcctgccagcctttattctcccacttgagaaggcctgagtgtacctcttcctcaccagtgggctgtagaagagcactggaacaagaccaccagtggtgttggaggtcacgctgtggctggccatgtcctgtcccatccgtttggcctcctgggaagaatgtgttggctcaatttctttctcaggagagatgaagtcagtccagatggttctcacgtgctactgtccttccctctgctattaacactgggactggcttggcaccacaccctcctatgtgactgaagcacagactcattggcctccctccaggtctttgaagaagggtcaaagcaaggatatgtcactccgtaggatgtgatacccacaggcctaagtcccaccagaccctatgtcagcagtattgataacaactctcgagtctgcctcacctcctgcctgcagagtccagagtcatgggaaaggagccagagggatgaggccgcaccacaggcctgttgggcacccgccgtcactgccagtctcagagattctgactgttcaaagacatgttcttcctgtgaaccaagaggacgttcagggaaaaagaaaacatgttttacctagggatccttctgaacaaaatggctgtctgtactctttttaaccagaaactttccaaactttttagtgtcaaaattgtaaccaagtgtctcctgattcttcccgatgtgcttggcaagtgctgtgaccctgttgtaggtatttctcctcctgcctcttctgagggagaagtgattttaggggttgattggagggagccggtgtnnnnnnnnnnnnnnnnnnnnnnnnnnnnnnnnnnnnnnnnnnnnnnnnnnnnnnnnnnnnnnnnnnnnnnnnnnnnnnnnnnnnnnnnnnnnnnnnnnnnnnnnnnnnnnnnnnnnnnnnnnnnnnnnnnnnnnnnnnnnnnnnnnnnnnnnnnnnnnnnnnnnnnnnnnnnnnnnnnnnnnnnnnnnnnnnnnnnnnnnnnnnnnnnnnnnnnnnnnnnnnnnnnnnnnnnnnnnnnnnnnactctccacacctgagttaggtagctgcctgggaacaagaatctggggctcagagactctcagttgtgtcagggttttctctacatcctcaggacctctgggtaggggtttcaaagttggtgaccccagaaccaccctcaccctcacattggatcaagccttgtgtgcctagtgctatattgtaacctgggcttgggcctggagcccctgcttgcaaggccacaggacctcttcctgcccacttggtgctatctcatcatgaccatctatcagggcagcctgggctcctggagcctgtgggccaggtgccgtgggtggccctcaagagcttagctctctctggctcctgatcctagatttttttttcctttgaagctttctcttggctccagagatgtcagagttagggaaggaaatgagccaggctgaggcgaggagatccacccctatgccacagtgagcacaccagcccagcccctttcccgccacaccagtattacacccatcctttaaagcatctagtcccacctgaggcacatgccattcagtggcccagctgcccagtgcagactagaaacctaggccggggatggggacgtttctctgcacccctacttcagaagaggcatgttgcactttagtggggaacccagaacgttgggcactggcttcctgtagcttgagtccctgtagatagccatggtggcagcctgatggcttgtgtgaagcagctgcagctgctgccagctgtgcacatgtgtgcagctcctagagtcaaattgccggcctgatgatgacatcacaaagacgtgttctgttcaactttgccttggtaattattgtaaacactttgttcaatttttttttctttttttattcacaaactaaatccatcaggaaattataaacttatttaaaaactgtgtgctgcagccttcttgagtctatcctagtctggtcacatccctgtgatgagactggttatgatccagaaaagcaggagaagaccagcagtccccagcaggccatctccagcggcagcctagaatcagagcactctgtgagacttggccagctagtgtctctgtcgcacctggggggctggtctcagcagaagtgcaccctttgattcccactccaactctgactagctttcaaagtcaggtttcaacttccttcttctttttcaccctattcccaagcaggttgtccacatcagatctgactacattataaaagcatccatcacccagaaggaattgacaccaagatggcagcggaacaggtgtggccagaacttggctcccacttcagggatgtgttctgatggtcacctcagatgtggtctctgtctgcattatgaataccaacagtaaaagtcaggagacccgtgcataatcgtggacaccattgtctgctctgggacttctgagaccttgtggccataagtaatgttctggggcatttactgtagggtgctcacattctggttaactttttatccatactgttgtaggaagcaagaagaaaatcatgctgagcacagcacagtggctcatgcctgtgccccagtactcaggactctgaggtgggaagattcagagctggagagcagcctgggccacatagtgagacctgtctcaccaaggtctctctcttctatagaaatcatggcatctgactgttagtctgtagaaattgcgaagtgagagaatcaagcattttcaggtccttttcctggcagagcaactgtttagacatactgccaggcaaaggagtacctggcctattttaccagcctgaggagcaatgctgcccctggttgcatcatgggaaatagtgatgtgactagcagaatgaatactgtgctgcacagcttaaagccacaagcccagcagaccacactactcagcagtttccagggcttcccattcttttttttttttaaaactaatatattcactcagttgttgaccagtacttagctgcaaaggaatggacatcgatcacaggcttgcatatggtacacataaatccatgtggtacacacagtcccttttttaagtgataatacaagtggacatgagcataatacataattatgtttaccattttgaaaactcccaaagtacatggttacttttttgcatatcttggagctgctttaaaatgatccagctgtgtgtgtatgggagagatcaaggagtaggacatagctacagaagattggccagggagtggatgggtgcttgaagctgagtatcaggctctcaaggtctaccagtaagccatgctccctcttgggaggtctgtgtgagatttccctgatcagcatcaagaatcacatctatctgctgtgctttcccagtcagttcacatgagcctcttccccaggaccatgcatcccataattcctgttggaaacatctagatacaaagactagtactgtcagctcgtttgctgtctgctaggctccgatgatggcttgtctcatctcatctctacagtagttgggacaccctgttattcatctctcagatgagacacaggactaggatcttaggccagccagccaaggcatgacaagggctctccagttgcttttccccacaactgagactgctgctggactagggggaggagactaatcccaatgccagctactggggagacctggggagagcagcactttgcaaatcctcaggttagtcactgcaagatgaatttgatccctaggagtgtcaaatgattgcctctgagatcacatgggcaaaaacaatgcagaatgtgcatgggtatccaggctagccagtggcctgtgtgagcctaggaagcactgcttgggcgaagagcaatacccagacatgatggctacagtgtggcttagatggtggcatatgcctgtgtactaaaagaccactactgtcctgaatgtgtggccagctggggagaacaacatctcgcatcaccagttgtccaccctgtgcaaattcgtaaaatagcagtcccccagctctgcaggactgataagaaactaaacgagaagaggggaaaagagtgcctagcatggcagccctggaaaatcagtgccttgctctctcttggtgcctggaagggaaagctgctaagagcagtccacagcatccctgcactgagcagtgactgtcagcacagggtccattgcctgccaggtatgcaaggatacatttctggtagagaagctaaaatgcaagctaaatagcccagagctatacagtcaaccagtgacagccctgggtcactcccctgtcaatggatttctaggttggtctggctcctcacagagcctgtgtttctatcagagggtcagggtcagggaatggaacagttgcaccagagtcctgccagcctcagaagggggaaggcattggggccaaatgctggctggcagtccagaggaaacagaaatgatggttaacctactcactatcaggatgaatatagtcacatggtctcctgctctgttaggctttggacaccattaatttcctggaaaaccagcagttaattacttaatgtcctagccaccttaggttaaactttactgggaaggaatgataggagctggtagcaccttgtcagtgttatttggtacatagatcacccctttactgtgtcaatgtgggagtagacaattgaccccacagcacacagtggttcatggggtaccttggcaggtttgtgtgcccccaaagttcatgtgttggaaacttccaaatttgtgttgatggtgttagaggtaaggcttttggaagacaattcagtgagttcatgaagttggcatcccatcatggggaaaaaagccctagctgtcacagtaaccatcaccaatgtggtgtcttctgctgtgttagcatgtacaaagaccctaccagatacaagaggatggcagccccatctgttcccaaccaagccaatctttcttcctaaagaactgcacttcgacagcatgttacagcatcagcgagtggactaagacacaggcacacagaacacccacagccatgagcaggcccactgtcgaatgttattctctccaggctggttctacagcagctggctgaccctcccacaaggccctgcctgctaggaggagctgtcctgaagtgaggcagacagaagactggccctactcagacaaagaaccagcacaaaccttgaccatgaaggcaggtgcacatggagctcagatttagaacaggtttccagctaggctttgctgccatcaaagtgtgtggcctcatccctggttatgtcacttaagcctttgacctccagccttcacatgtctgtaacatgcaaacaaaaggatgtaccacctaaatgtctcagaggtccagcacttgcctagtgtgtgctatctgtgggttccactcccacaacatcagcaggagaggatgcacaagaaagcatcaagcccgggtcaataaaagggtgtgcttgacacttaacagtcatttgttatagtaaatcacttcaaagccaaagcttgctttggaaacccacggcaacccatggagatgctgacaatgtgcattgcccttcaggaaggacgctgctctctgggcagacctgcttcctccttccagggccacctcgtgccatctgaaatcccccaaatagagaaatcagccaaggatgagaatgctagagcctaaaacatgaagtttcccagagaagggaagggggcaccaccatcttccctcttatatgtcccagtctgcctcctggtgactgtggcctgctttcctgcaattccctgagtgtaggccagagttcctcccccaagggagttacatgccaacaatcatattgtttctgctttaggaagcaggaatcccagatgccaatgggcatgcctgagcatcggggcctcactgcccccatttacaaggatgggaacccaaggatgcctcctctggctttccattgctgtgacaaatgagacagagggaccctggaacccaatgtgagattatctggcctggccaggccatcccatcgtggagttctagccacagcaatgctgacagcccattgcaacgtttccaagctccctgtgcagactccaatgtgcaaggatgcttaagagtattcacccttaggcaaacatagctgttcacccttcagccacagagtaaggcgccttgatctccgcctctctccttccaagacaagtagcctgctttccttctcccatctcctcgttgaccacacacccttgtaaacaaggactgttctttctcctgggtcctccacaggcctatgcacagatctgagcttaccaagcaaataaaaggacttgcttacctggaaacttcccagtagtttcttatcccaacgtgttcattccccgcagttggctcagctttcactccggcttcctgacgtcaggtgggagatgttgtccgccccccatccccatccccagcccatggagctcctagtaatgctgctgtggtggtgagccacaggtggagcctgtctgtcctgataagcagctgggaggaagacagctgggctctgaccctggtgctcatggtcctgggtgaggctctcaccatctggggcctcttctcctcccctgttccaattccctgagcctcccagccagcccccaggaattcccacagaggtttctaagaagctgaacctgccttgaggagagggaacaacatcgtggaatccagtgtgcaggtaacgttggtcttcaggcggttttggatgtcctggaaacttgccagggattgcagtagaaccagcgtcctcctgagcacgggtgcgcgcagcgtggcacccagcgtatgtgcacagctgtgccgatgcatgcacaagaggtgtcggccaagcgagggtctccatattaaggaggaaatgaataaacaaggtcaacatttttgtttccctccgaggcttgcaaagaaggtgttaagagcacaagatttaaatcataaacttggttaaaaggcagacggcctaatgtgtgactcttgccaacttggacgtgctccttggggtaatgctacactgagctaatgcaggaggaatcgtgggaggaaaaggcaggctgggagcaagccgcagcgtcaaccaagggcagaccagctggagcccgaggtcctcagtgcctcttcctagttcccctcctacagttcccttgactgatagagtttctgttgggcataaaggacttagagcaaggtaagggagacacagaacaggcccaaatcacccatggaacaattgcctaaggagcaggaaagacagtcagcaggcctgccagctcgggacacgtcacctctgtaggctcccattctgtctctattcacctcaaaagacaaggtgcctcttccacgggtgtgggagctgtgctcagcattgcacaaggtgcatgggtgaaggtgagttccctgcttggatggaaactgaaacgaagacatagtcctacagtgactatactatttgggacagggt

SEQ ID NO: 883 - DNA, 3567 bp, Mus musculus
ctttagctggcccatgagcttctgggaattttcccttctccgcctcccatctcaccataggagcactgggatttcagatgcatgctatcgccttcagttctacctcatttctggggaagtgaccaagtgttctcatccttgcatgatatggcataagatatttcttcaagattggacagctgctggcctgctacttctgttagctgtaagctgactttatagccatagagaaacctcacagaatcacattgttgtttttttcttcataccatttctggcacctaagttcaccctgcaaccatgtatggaagtgctcgatcagtagggaaggtggaaccaagcagccagagtcctgggcgatcacctcggcttcctcggtcccctcgcttaggtcatcggcgaacaaatagtacaggagggagttctggaaacagtgttggaggtggcagtgggaaaaccctttcaatggagaatatacagtccttaaatgctgcctatgctacatctggccctatgtacctaagtgaccatgaaaacgtgggtgcagaaacacctaaaagcaccatgacacttggccgttctgggggacgcttgccttacggtgttaggatgactgctatgggcagtagccccaacatagcaagcagtggggttgctagtgataccatagcatttggagaacatcacctccctcctgttagtatggcatctactgtacctcactctcttcgtcaggcaagagataacaccatcatggatctgcagacacagctgaaggaagtattaagagaaaacgatcttttgaggaaagatgtggaagtaaaggagagcaaattaagttcatcaatgaatagtatcaagaccttctggagcccagagttaaagaaagagcgggccttgagaaaagatgaagcttccaaaatcaccatttggaaggagcagtaccgagttgtacaggaggaaaaccagcacatgcagatgacaatccaggctctccaggatgagctgcggatccagagggacttgaatcagctgtttcagcaagatagcagcagtaggactggggagccttgcgtggcagagctcacagaggagaacttccagaggctgcatgctgagcacgagaggcaagccaaagagctgtttcttctgcggaagaccctggaggaaatggagctgaggattgagactcagaagcagaccctaaatgctcgggatgagtccatcaagaagcttctggagatgctccagagcaaaggactttctgccaaagctacagaggaagaccatgagagaacgcgacggctcgcagaggcggagatgcacgtccaccacctcgagagtcttttggagcagaaggaaaaagagaataatatgttgagagaggagatgcaccggagatttgaaaatgcccctgattctgccaagacaaaagccttgcaaactgttattgaaatgaaggattcaaaaatttcttccatggagcgtgggctccgagacctggaagaggaaattcagatgctgaagtcaaatggggctttgagtagtgaggagcgggaggaagagatgaagcaaatggaggtgtacaggagccactcaaagtttatgaaaaataagattggccaggtgaaacaggaactgtccagaaaggacacagaattactagccttacaaacaaagctagaaactctcacgaaccaattctcagacagtaagcaacatattgaggtgctgaaagagtccctcactgctaaggagcaaagggctgccatcctacagactgaggtggatgctcttcgattgcgtttggaagaaaaagagactatgctgaataaaaaaaccaagcaaatccaagatatggctgaggagaagggcacccaggctggagagatccatgacctcaaggacatgctggacgtgaaggagcggaaggtcaatgtcctccagaagaagatagaaaatcttcaggaacaactaagagataaagaaaagcagatgagcagcttgaaagagcgagtcaagtctctgcaggcggacaccactaacacagacacagctctgacaactttggaggaggctcttgcagataaagaacggacgattgaacgcttaaaggagcagcgggacagggatgagcgggagaagcaggaggagattgatacctacaaaaaagacctcaaagacctgagagagaaagtcagcctgctacaaggagacctctcagaaaaggaggcttctctcttggatatcaaagagcatgcttcttccctggcttcctcaggactcaaaaaggactcgcggctcaagaccctagaaattgctcttgagcagaagaaggaagagtgcctaaaaatggagtcacagttgaaaaaggcgcatgaagcaacattggaagccagagccagtccagagatgagtgaccgaatacagcaattggagagagagatttccaggtacaaagatgaatccagcaaggcccaaacagaagttgaccgtctcttggaaatcttgaaagaagtggaaaatgagaagaatgacaaagataagaagatagctgagttggaaaggcaagtgaaagatcagaataagaaggtagcaaatctgaaacacaaggaacaggtggagaagaagaagagtgcccagatgctggaggaggcccgcagaagggaggacagtctcagcgacagctctcagcaactgcaggacagtctccgtaagaaggatgacaggattgaagagctggaagaagcactgagagaaagtgtacagataactgcagagcgtgaaatggtgctggcacaagaggaatcagccaggaccaatgctgagaaacaggtggaagagctgttgatggctatggagaaggtgaagcaggaactggagtccatgaaagctaagctgtcctccacccagcagtctctggccgagaaggagacgcacctaaccaatctccgggcagagaggaggaaacacttggaggaagttctggaaatgaagcaagaagctcttctggctgctataagtgaaaaggatgctaacatagctcttctagagctttcctcctcaaagaaaaagacccaagaagaagtggctgcactgaaacgggaaaaggaccgcctggtgcagcagctcaaacagcagacacaaaatcgaatgaaattaatggctgacaactatgaggatgaccacttcagatcctcccgttccaatcagacgaaccataaaccctccccagaccagatcatccagcccctcttagaacttgaccaaaatagaagcaagttaaagttgtatattggacacctgacagccctctgccatgaccgagaccccttaatcctccgtggactcactccaccagcttcttataatgcagatggtgagcaggcagcttgggagaatgagctgcagaagatgactcaggagcagcttcagaacgagttggagaaagttgaaggggacaacgccgagctgcaggagtttgccaacaccattctccagcagatagccgatcactgccctgacatcctcgaacaagtggtcaatgccctggaagagtcctcctga

SEQ ID NO: 884 - protein, 1082 aa, Mus musculus
MYGSARSVGKVEPSSQSPGRSPRLPRSPRLGHRRTNSTGGSSGNSVGGGSGKTLSMENIQSLNAAYATSGPMYLSDHENVGAETPKSTMTLGRSGGRLPYGVRMTAMGSSPNIASSGVASDTIAFGEHHLPPVSMASTVPHSLRQARDNTIMDLQTQLKEVLRENDLLRKDVEVKESKLSSSMNSIKTFWSPELKKERALRKDEASKITIWKEQYRVVQEENQHMQMTIQALQDELRIQRDLNQLFQQDSSSRTGEPCVAELTEENFQRLHAEHERQAKELFLLRKTLEEMELRIETQKQTLNARDESIKKLLEMLQSKGLSAKATEEDHERTRRLAEAEMHVHHLESLLEQKEKENNMLREEMHRRFENAPDSAKTKALQTVIEMKDSKISSMERGLRDLEEEIQMLKSNGALSSEEREEEMKQMEVYRSHSKFMKNKIGQVKQELSRKDTELLALQTKLETLTNQFSDSKQHIEVLKESLTAKEQRAAILQTEVDALRLRLEEKETMLNKKTKQIQDMAEEKGTQAGEIHDLKDMLDVKERKVNVLQKKIENLQEQLRDKEKQMSSLKERVKSLQADTTNTDTALTTLEEADKERTIERLKEQRDRDEREKQEEIDTYKKDLKDLREKVSLLQGDLSEKEASLLDIKEHASSLASSGLKKDSRLKTLEIALEQKKEECLKMESQLKKAHEATLEARDEMSDRIQQLEREISRYKDESSKAQTEVDRLLEILKEVENEKNDKDKKIAELERQVKDQNKKVANLKHKEQVEKKKSAQMLEEARRREDSLSDSSQQLQDSLRKKDDRIEELEEALRESVQITAEREMVLAQEESARTNAEKQVEELLMAMEKVKQELESMKAKLSSTQQSLAEKETHLTNLRAERRKHLEEVLEMKQEALLAAISEKDANIALLELSSSKKKTQEEVAALKREKDRLVQQLKQQTQNRMKLMADNYEDDHFRSSRSNQTNHKPSPDQIIQPLLELDQNRSKLKLYIGHLTALCHDRDPLILRGLTPPASYNADGEQAAWENELQKMTQEQLQNELEKVEGDNAELQEFANTILQQIADHCPDIQVVNALEESS

SEQ ID NO: 885 - DNA, 3966 bp, Mus musculus
ctttagctggcccatgagcttctgggaattttcccttctccgcctcccatctcaccataggagcactgggatttcagatgcatgctatcgccttcagttctacctcatttctggggaagtgaccaagtgttctcatccttgcatgatatggcataagatatttcttcaagattggacagctgctggcctgctacttctgttagctgtaagctgactttatagccatagagaaacctcacagaatcacattgttgtttttttcttcataccatttctggcacctaagttcaccctgcaaccatgtatggaagtgctcgatcagtagggaaggtggaaccaagcagccagagtcctgggcgatcacctcggcttcctcggtcccctcgcttaggtcatcggcgaacaaatagtacaggagggagttctggaaacagtgttggaggtggcagtgggaaaaccctttcaatggagaatatacagtccttaaatgctgcctatgctacatctggccctatgtacctaagtgaccatgaaaacgtgggtgcagaaacacctaaaagcaccatgacacttggccgttctgggggacgcttgccttacggtgttaggatgactgctatgggcagtagccccaacatagcaagcagtggggttgctagtgataccatagcatttggagaacatcacctccctcctgttagtatggcatctactgtacctcactctcttcgtcaggcaagagataacaccatcatggatctgcagacacagctgaaggaagtattaagagaaaacgatcttttgaggaaagatgtggaagtaaaggagagcaaattaagttcatcaatgaatagtatcaagaccttctggagcccagagttaaagaaagagcgggccttgagaaaagatgaagcttccaaaatcaccatttggaaggagcagtaccgagttgtacaggaggaaaaccagcacatgcagatgacaatccaggctctccaggatgagctgcggatccagagggacttgaatcagctgtttcagcaagatagcagcagtaggactggggagccttgcgtggcagagctcacagaggagaacttccagaggctgcatgctgagcacgagaggcaagccaaagagctgtttcttctgcggaagaccctggaggaaatggagctgaggattgagactcagaagcagaccctaaatgctcgggatgagtccatcaagaagcttctggagatgctccagagcaaaggactttctgccaaagctacagaggaagaccatgagagaacgcgacggctcgcagaggcggagatgcacgtccaccacctcgagagtcttttggagcagaaggaaaaagagaataatatgttgagagaggagatgcaccggagatttgaaaatgcccctgattctgccaagacaaaagccttgcaaactgttattgaaatgaaggattcaaaaatttcttccatggagcgtgggctccgagacctggaagaggaaattcagatgctgaagtcaaatggggctttgagtagtgaggagcgggaggaagagatgaagcaaatggaggtgtacaggagccactcaaagtttatgaaaaataaggtagagcaactgaaggaggagctaagttcgaaagatgctcaaggggaggagctgaaaaagagagcggctggtcttcagtctgagattggccaggtgaaacaggaactgtccagaaaggacacagaattactagccttacaaacaaagctagaaactctcacgaaccaattctcagacagtaagcaacatattgaggtgctgaaagagtccctcactgctaaggagcaaagggctgccatcctacagactgaggtggatgctcttcgattgcgtttggaagaaaaagagactatgctgaataaaaaaaccaagcaaatccaagatatggctgaggagaagggcacccaggctggagagatccatgacctcaaggacatgctggacgtgaaggagcggaaggtcaatgtcctccagaagaagatagaaaatcttcaggaacaactaagagataaagaaaagcagatgagcagcttgaaagagcgagtcaagtctctgcaggcggacaccactaacacagacacagctctgacaactttggaggaggctcttgcagataaagaacggacgattgaacgcttaaaggagcagcgggacagggatgagcgggagaagcaggaggagattgatacctacaaaaaagacctcaaagacctgagagagaaagtcagcctgctacaaggagacctctcagaaaaggaggcttctctcttggatatcaaagagcatgcttcttccctggcttcctcaggactcaaaaaggactcgcggctcaagaccctagaaattgctcttgagcagaagaaggaagagtgcctaaaaatggagtcacagttgaaaaaggcgcatgaagcaacattggaagccagagccagtccagagatgagtgaccgaatacagcaattggagagagagatttccaggtacaaagatgaatccagcaaggcccaaacagaagttgaccgtctcttggaaatcttgaaagaagtggaaaatgagaagaatgacaaagataagaagatagctgagttggaaaggcaagtgaaagatcagaataagaaggtagcaaatctgaaacacaaggaacaggtggagaagaagaagagtgcccagatgctggaggaggcccgcagaagggaggacagtctcagcgacagctctcagcaactgcaggtggaagagctgttgatggctatggagaaggtgaagcaggaactggagtccatgaaagctaagctgtcctccacccagcagtctctggccgagaaggagacgcacctaaccaatctccgggcagagaggaggaaacacttggaggaagttctggaaatgaagcaagaagctcttctggctgctataagtgaaaaggatgctaacatagctcttctagagctttcctcctcaaagaaaaagacccaagaagaagtggctgcactgaaacgggaaaaggaccgcctggtgcagcagctcaaacagcagacacaaaatcgaatgaaattaatggctgacaactatgaggatgaccacttcagatcctcccgttccaatcagacgaaccataaaccctccccagaccaggatgaggaggagggtatatgggcatagccaatcagatgctcttagttcagccattttgttcagaacgatcatccagcccctcttagaacttgaccaaaatagaagcaagttaaagttgtatattggacacctgacagccctctgccatgaccgagaccccttaatcctccgtggactcactccaccagcttcttataatgcagatggtgagcaggcagcttgggagaatgagctgcagaagatgactcaggagcagcttcagaacgagttggagaaagttgaaggggacaacgccgagctgcaggagtttgccaacaccattctccagcagatagccgatcactgccctgacatcctcgaacaagtggtcaatgccctggaagagtcctcctgatgtgctcctgacaaggagggtgaccaaggagccagagagggaacctgaggaacaggtgtctgagccgccaccacaccagactctgccagctggatgtgccagtccggccgtcggtgtctgtcatcgtactctgccttctgctttgaatgttgcctgctcaagtctccctggtctccatgaagaactgcccttggcatcagcagtggagtgctgcgagctgcactctgcccttccagaaacaggaagccagaagccactcagctcatctggagcccactcagattccgtgctctgggagcttggagctgaagctttagcacgagtgctttctcctcagagggttacagaaggagggaggaggtgaccagggacaaagagaa

SEQ ID NO: 886 - protein, 968 aa, Mus musculus
MYGSARSVGKVEPSSQSPGRSPRLPRSPRLGHRRTNSTGGSSGNSVGGGSGKTLSMENIQSLNAAYATSGPMYLSDHENVGAETPKSTMTLGRSGGRLPYGVRMTAMGSSPNIASSGVASDTIAFGEHHLPPVSMASTVPHSLRQARDNTIMDLQTQLKEVLRENDLLRKDVEVKESKLSSSMNSIKTFWSPELKKERALRKDEASKITIWKEQYRVVQEENQHMQMTIQALQDELRIQRDLNQLFQQDSSSRTGEPCVAELTEENFQRLHAEHERQAKELFLLRKTLEEMELRIETQKQTLNARDESIKKLLEMLQSKGLSAKATEEDHERTRRLAEAEMHVHHLESLLEQKEKENNMLREEMHRRFENAPDSAKTKALQTVIEMKDSKISSMERGLRDLEEEIQMLKSNGALSSEEREEEMKQMEVYRSHSKFMKNKVEQLKEELSSKDAQGEELKKRAAGLQSEIGQVKQELSRKDTELLALQTKLETLTNQFSDSKQHIEVLKESLTAKEQRAAILQTEVDALRLRLEEKETMLNKKTKQIQDMAEEKGTQAGEIHDLKDMLDVKERKVNVLQKKIENLQEQLRDKEKQMSSLKERVKSLQADTTNTDTALTTLEEADKERTIERLKEQRDRDEREKQEEIDTYKKDLKDLREKVSLLQGDLSEKEASLLDIKEHASSLASSGLKKDSRLKTLEIALEQKKEECLKMESQLKKAHEATLEARDEMSDRIQQLEREISRYKDESSKAQTEVDRLLEILKEVENEKNDKDKKIAELERQVKDQNKKVANLKHKEQVEKKKSAQMLEEARRREDSLSDSSQQLQVEELLMAMEKVKQELESMKAKLSSTQQSLAEKETHLTNLRAERRKHLEEVLEMKQEALLAAISEKDANIALLELSSSKKKTQEEVAALKREKDRLVQQLKQQTQNRMKLMADNYEDDHFRSSRSNQTNHKPSPDQDEEEGIWA

SEQ ID NO: 887 - DNA, 522166 bp, Homo sapiens
  misc_feature (1)...(522166): n = A,T,C or G
gaggcggaggttctagtgagccaagattgtgccactgcactccagcctgggtgacagagtgcaaccctatctcaaaacaacaacaaccacaaccaccaccacaacaataataaaaacccaaaataaatattatccaaatcaggtgtgggtgatacttgagatatgagtcattctgcggcaaagttcctttctgactgtgaatgtatgaaaccaggccagttatgtacttcctgagtataatagtgggacaagcatagaacagacattcccattccaaaggcaaaaaatggaaagaagacagggacatggggacatgggtcccaagcaaattcaaaacctagtaagactttagccaggcgtggtggtgcgcgcctgtaatcccagctactcaggaggctgaggcaggataatcgctcgagcccaggaggtgaaggttgaagtgagctgaaactgagccactgcactctagcctgggcgacagaatgagtgagactctgtctcaataaataaataaataaaataaaataaaataaaataaaataaaataaaataaaataaaataaaatcctagcaaggcaaattctgttgaactttaaggctgaagaataattgtctttggcttgacgctctgccctcctggcccagtggattagcaggcttgccttctagggccacgggggaggcagcatcaccacgttggccctattggtcctgggtagcagccatgcctctgaggcactggatggcagcagcttgactttctggaactgaggagacatcttagctccccagacctgtatcttctgggcctgcagttcgaatggcagccttgttgctaactgaatctcctttgggatcagtcttcccttttcttaaagggtaacatgtgttcacagccagataactctgttgcctcatcctttaggatcccagaattacgacagccttctttccttctgtcctgttcccctttagtccaagatgacagtgtttatgctggtataatctcatctctcttcctggcttgcgctgagaaagctgaataaatttgtaaattgcacctataatctctatgaaatactgagaatttttcaaatcttcaagttttgtttttgcttaataattccctcagtttatctttcttcccacattttactaaagcaaccaaaagaagctaggccataccttcaacagtttggttagaaatctcctcagctaaataaccaaatttatcactttgaacctgcactttccacaaaacactagaacaccatttggccaaattctttgtggaagaaaggatggcctttcccgcactttccgataatatgttcctaatttccgtctgagacctccccagaatcacctttattccttactcctaccaacaatctcttcaagacaatctagactttttttttttttttttttttggcgggggggacagggtcttgttctgtcacataggctggagcgcagtggtgggatcacggctcattgcagcctcgacctcccaggctcaagtgatcttcccacctcagccccacacccccgcccgcccctgccctgagtagctaggactacaggtgcgcaccacgatgcctgctaatttttgttctgttttgagacagagtctcactccgtcaagcaggctggagtgcagtagcatgatcttggctcactgcaacctccacctcccgggttcaagcgattctcttgcctcagcctccccagtagttggggttacaggcgtgtgccaccaggcctggctaatttttgtatttttagtgaagacaaggtttcaccacgttggccaggctggtctcgaactcttgatctcaagtgatccgcccgcctcagcctcccgaagtgctgagattacaggtgtgagcagctgcacacggctcaatcaggctttttccagcacgcacctcaaaactctttcactctctacccattatccagttcctgagttacttccacatttataaagtatttattacagcagcactccacttcttggcataaaagtctacattattctgctagggataccataataaaataatacagtttgggtggtttaagcaacagaaatttatttgccataattttggaatctggaagtccaagatcaaggtgtcagcaggttgttttttcctgaagatttttttttttttttttgagacggagcatcccttgttgcccagactggagagcaatggcgtgatctcagctcactgcaacctctgcctcccagattcaagtgatgattctcctgccccagcctctcaagtagctaggattacaggtgcccgccaccatgcccagctaatttttgtatttttagtagagacagggtttctccatgttggccaggctggtctccaactcctgacctcaggtggtccacctgccttggcctcccaaagtgctgggattacaggcatgagccaccgcacgcggccggctgcatcttcttggatctgcacaggaccttttctctgatgtttgtcactggtatctcttcctcttcttataaggacaccagtcctactgggttagataccattcttatgacttatttaaccttcattatctcttcagggcctcatctccaaatatagtcacactgggagttagggcttcaacatatgaattttggaggaatatacttcagtctttaacagtgtaatggatgcacataagttttaaaatatttatttattgtggtaaaatgtaagtaacataacactttactattttaactatttttcagtgtatagttctgtggcattaagtacattcacaatgatctgcagacatcacccttatcttctccagaaatgtttcttcttcccaaacggaaactctatacccattaaacactccctcttccccctccctctgtcctctggcagccaccattacgctttctgtctctatgaatttttttctttttgagacagagtttcgcccttttgcccaggctggagtgaagtcatgcaatctcggctcactgcaacctccgcctcccgggttcaagcgattttcctgcctcatcctcccgaatagctgggattctaggtgcctgccaccacacccagctaatttttttgtattgttagtagagatgggatttcgccatattggccaggttggtctcgaactcctgacctcaggtgatccacctgcctcaggctcccaaagtgctaggattatatgcatgtgagccaccgtgcctggccctgtctctataaatttgactactttaggtacctcatatgaatgtaatcatataagatctatacttttatgattggcttattttacttagtgtaaggtctttaaggttcatccacagtgtagcatatgtcagaatttccttcctttttaaggctgaataatacaaaagacttttttttttttttgagatggagtcttgctctgtcgcccaggctggagtgcagtggcgcgatctcggctcactgcaagctccgcctcccggcttcacgccattctcctgcctcagcctcccaagtagctaggactacaggcgcccgccaccatgcccggctaattttttgtattcttcagtagagatggagtttcaccgtgttagccaggatggtctcaatctcctgaccttgtgatctgcccgcctcagtctcccaaagtgctgggattataggcgtgagccaccgcgcctgtccacaccaggctaattttttgtatttttagtacagacagggtttcacagtattagccaggatggtctcgatctcctgacctcgtgatccgcctgcctcggccccccaaagtgctgggattacaggcgtgagccaccatgcctggccaatacaaaagttttatattttgatgaagtccaattaattttatttttttggagacaggatattggtctgtcacctaggctaaagtacagtggcacaatcatggttcaccacagccttgatctcctgggttcgaggaatccttctgtctcagcctcacaagtagctgggactatgggtgcatgccaacacacccagctaatctttcaaattttttgcagacatgggggtctctttatgttgcccaggctggtcttgaactccttggctcaagtgaccctcctgccttggccccaccaaagtgctgagattacaggcataaagccactgcacctggtctcaatttttttcttttgttacttgtcctttggtctcacagctaagaaactattgcctaatccaaagccatgaagatttatacctatattttcttctatgagtattttagcttaagctttacacttaggtctttgattcattttgaactaattttcatatatgtgaggtatgggttcaacttcattcttttgcatgtgatattcaattgttcaagcaccactttttttaaaaaacatttatttatttatttattttgagacggagtcttgctcattgcaacctccggctcccaggttcaagcgattctcctgcctcagcctcccgagtagttgggattacaggcgcccaccaccacgcccaactaatttttgtaatttttgtattttagtattccaccatcttgcgcaggctggtctcgaactcctaacctggtgatccacccgccttggcctcccaaagtgctggattataggtatgagctaacgcacctggcctttttttttttttgagacagagtttcactcttgttgcccaggatggagtgcaatggcgcaatctcagctcactgcaacctctgcctcccaggttcaagtgattctcctgcctcagcctcctgagtagctggaattacaggcatgtgccaccatgtctggctaattttgtatttttagtagagatggggtttttccatgttggtcaggctggtcttgaactcccgacctcaggtgatccacctgcctcggcctcccaaagtgctgggattacaggtgtgagccgccgcacctggccttgtttttaaaatagagacagggtctcgttatgttgcccaggttggctttgaactcctgggctgaagcaatccttctgcctcagtttcccaaagtgctgggattacaggagtgaactaccacatccagcctgcttttgtttttatttttgagacagggtctcaccctgttgcccaggctggagagtggtaccattatagtgcactgcagccttgaactcctgggctcaagggatcctcctgccttagcctcccaagtagctaagaactgcaggtgtgtgccaccattcccggctaatttttaaaatttttttgtagagacagggtctcgctgtgttgtctggggtggtctctgactcctgtcctcaagcgatcttcttgtctcagcctccagaagtgctgggattacagatgtgacctactgagcctaaactgttttaacgatagcaagactatgcttcattaataggttgggtgtaaaagttgaaacccctaaaagcagcatcttctaagctttttttttttttttttatcatagtaactgattattctgtttaattctctcttttccgggcgttttctctcccagaactcctacccttctgttccaatctaactaagttcctgggacttccctttactgttttcctgaattggatctagtgattactggatgttgtcagataccctgatttctccctcattttgcttgagcacacatttaagtaactcttttttaaaatttatttttattttttgagatggagttttgctcactgcccaggctggagcgcaatggcacaatctcggctgactgcaacctctgcctcccggattcaagcaattctcctgcctcggcctcctgagtagttgggattacaggtgcccgccatcatgcctggctaatttttgtatttttagtagagacgaggtttcaccatgttggccaggctggtctcaaactcctgacatcgtgatccacccgcctcagcctctcaaagtgctgggattacaggtgtgagccaccgtgcccagcccgccagtttgatttttgtccttttatgggctcctttttttcctctttggaaacttagaatcttctttatatttagagttcaaacatttcacatggttgaattttttttttcttttggttctgcactagtggattctttcagttctaggaaattgtcttgcattattttttcaataattttctgtccttcattaactttgttttctctttttcacataatattagtcctgttgaactaattctttatcttattttctctcacaatttccacccctttgtatatttattgttttcttttttttttttttcctgagacaggatctggctctgttgcccaggctggagtgcagtggtgttatttcagttcactgcaacctctgcctcctgggcttaagctatcctcccacctcagccacctgagtagctgggattacaggcatatgccaccatacttgacttatttttgtatttttttgtagaaaaagggttttgccatgttgcccaggctggtcttaaactcctgggctcaaacgatctgcctgccttggcctcctaaagtgttgggattataggcgcaagccactgcacccggccctattttcttttttcttttttgaaataaggtctcttgctctgtcacccagactggggtgcagcttcctaaagtgttgggattacaggcgcgagccactgcacccagccctattttcttttcttttttgaagtaaggtatcttgctctgtcacccaggctggggtgcagcaccaccatcctggctcactgctcccttgacctcccaggatgaggtaatacttacacctcagcctcctgaatagctaggaacacaggtgcgcatcaccatacctggctaagttttaaaacatttttaaagagatggggtctcattatgttgcccaggcttcttctattttctttaaaagttcagtgactttatctttcaatattttaattgaatttataatttggcaatttattttaaatttcaagatctatttttaaaccttggattgttacttcatctgagtatcctagtatactaattaggttttcctttctaaattctctgaagtttctgtttatctgcccccacagtccatgttggagacttttcttaaatacctaataacacttagttgtctgttcatacgtatgaggcagttggaatgctgatggggagtcttgtgaacttgggaggtgtcttagtctattttatgttgctataaaggcatgcctgcagctgggtaatttataaagaaaacgggtttgtttagctcacaattctgcaggctgtacaggaagcaaggcactagcatctgctcagttctggtgagggtttttgtgctgcatcaagacatggcggagaaggtcaaggaaaagtgtctgtgcacatgcaaagagaaatcaaacccgaggtgagtcctggctttacaacaaaccactctccaaggaacaaatccattctcctgataaccaacatagtttcgcaagtgtgagaactcactactgtaagaatgacaccacgtccttcatgaagaatctgcccccatgacccaaacacctcccatcaggacccacctcccaatactatcacactgggaatcaaatttcaacatgagatttggtagagacaaaaaaaccatatccaaaccatagcaggaagttcctgccaacttgcccaactacactttaaagtgggtgggtaggaaaccagctattgtgctagaataaagaatactttactcttaggcccttcaatactcagttaacccaaatctccccagattatcagagtgcttaattttagcctggataaatgcctagatattgtatctgagatatagggagggttctgctcttccttatatagacctttatttagtctccctggtctcaactctgcttctcactcttgctctgtctggtagttatctccaaatctccgtctccctaaagcacttctgggctgacaggtccccttcctttctacagcaccctctacacccattctacattatgcttttctccattttattttgtcagaccacacttactttttgcatgtcaaataaaaaaaaattatcttccgatgtcccccttctcattttctattttgtatcacttttatttatcatcattttatggggtctcaggaagaagaggcagtaaatacatgtgctcggttagctagctttaatcaaaaatcctaaacgtaggttttaaaaaagataactggagcagggcaggaaataatattttttgccagtgtggtggcaaaaaataaaaaacaaaaatctgaatctgtgttaggacagtatttccgtgtataacatagcgcttagcaacttaattctccagatccacatattttaaggacatgatgtatctcagacacctacttcaaacctcactttacagttaagtaagaccacaagtagaatgaattgcctgaggccacacaagtagacagtgggagaatgagaacagaaatatctattgactcctagttgaattttctcttaccttaccacactgctagggagtaacaagatgggcagatcacgagtcagatgagaaaggtcatgaaaaatagtcaaaggatgacttttcctgggtaaatagccggatgtccaagaaatgaaaggctggtctggcagcagcacatcgtctaacagttggtagtcatatgtgggaagtactgaagggggagatgacagcaggcccagaaactgcaatgatccaagtgcatgtcgatcctgggagggaacagttaagagtccgggcaggatgaaacagtagaaactggtgagtgaatgaatgtgaaggctgaggagcgactgcaatttgttaatgggattatgaggcagtataaagtggttaattacggtggcggaggtaagcaggagtaaaatgatggcttttaactcctctcaaggacaccgaaaattattttaataaacactggaaggctgggaataaatataattcacaccattcttactttcttggtttagagatagcttatctacatccttaaattaatggctgtagctaccctctgcatggctccaaaaaaaaaacaaaaaacaaaaaacaaaaccaaagccggctgcgagtctgcacgagaaaatcgggttgcaccaggccccagccgcccgccgattcgcttagctgtcggaggctaaataaacagctcccgaagcagcgtttggcacagcgcagggtcggaacgtggacactaatttccgcccacgctccccgcgtcctggcgggatcaccacagacacgacgtccattgctggggtcctcggcgatgcccgtgtgcgcagccccgcgagtctcaggtcagaagaccactaatttcgcggccgcgttccacgaagctaaggggcaaaaaaccagctttcttgggacaaagcgtccccccagcagccagggtcgatcccggcgctgctcccgcggcgcttggctgccccgggcgtaacgggccacgagaagtagggggtggggcgccgcttaggtttgggaagacacgaagcggctcctcgggcttccagcgtccacttcctacggcaagcaggaggagacaagcgccaccctgcgctcgcggagccgaccccggctctcccctcccgtggccgcaggggtcgtgtgtgtgtgtgtgtgagtgtgtgtgtgtgtgtgcagggacgctccgcgcccatcactctgtttcggtgctaatcgaccgccgtggcgccgatttcccccgcttcccagttcctcacccgcgtgccccggaaggcgcccggaggcccccgggccgccgcgtcacgctcccgggaggctgagggaaagggaggcagccgagccgggagcccggggaggcgcgctgcgccccgcggcggggctgggggcggggctaggtgtctcgcgcagggggcggggcgcggtgacgtcgcgggcgcctgggccgtgctgtggcggcggcggcggcggtagtggcggcggcggcggtgcctgggcggcagcagcagcagtagcggcagccctgaggacggtgagacggccgcggcggcggcgacagcgcggaagtcgcgcgggacccagagcttcccccctgtcgctagtgctgaggctttcgcctttcctacccagcttcttgctcacggcccgggctgggctgggcagggcaacgcgcccccgggcaggggcggagctgtaggtgaggcttcgcgaccccctccccctcctcggcagcccggggggtggggaggggcgggccccacccagaccaccggcgcccacccgcgggctccacccagccgggctccgggatcgggcgggagccgaggcggtagatgtggggatcctggggcgggaggtgggggagtggggactggggctctgggcacttggggagcggagggggggaggcttaggactagtgaagccgcggacgaggtagtggggagacggagaaattggggagccatgaggttggggtgcggtcagggtggatctttgggttaggtgagtgatgtaaaatgctgaagatgattcttttcttttcgatgaaatggtgagataaaagatgaagtgtatttcaaaaggacgatgagctgtgcatgttgcctttgaggcagttgcagaacctattttattgcactagatctcacgtttctactttagggttcgattctttttcttctggcggggtgggtggggggtcggagagggaagagaatccccttactttggctcaggtaaattgtgagcgtggatgtatctgaaagttttacaccgaagaagagggagatcttcggtttagacaacttcgttccggcagccaccatttgggtcgcattacgcttagctccttcaaggtggtgtcttccagttttttttccccccaatgcctaaaagatctctttataccacccttttacaggctttatcctggccccttgagagaaggccccaaactcaggtggttgctttggaaggcacattgctgaataatagttgcaggtggttgtggttgactgctttgggtggataaagtgaacaattggaatagttctgttggagctaattatatgaaaaatgcttaaatgttttaaagtacaaccgtcttttatagcgtgttgcttgctcagtacaccttgacttttagacattttgtgttcagtgctaaattgttgaaattttatttctcatttgcagttatgtttcttgcagtctttattaaaacactttaaaatgaaatggaactctttttttttggtaggctcctcaatttctgagaaatgttcttggagtcaagtgctttaaaaacattttgggggcaggtgtgtcactttgtatggaaatattagagtaagcagtgttcaatgttcttcacatcactctttcacaacttagcactgtaaatcagaatcttcttttctggattcttgctccctgttagattacagtattctctggccctacttatcagttagtgtcatttaagctatttcttgttcagaaaacaggtcccatgatggacatgtattatgtaatggatggaagtagacatggctctcaataattcatttatggaggaagagaagctgtcagaaagtgggatttaagcagtgactttcccaaggcttgcctagtttatttgggaaaatagccagagaagtgctttcttgtaacccaaaagagaaatatacagataagaatttcagtagttgcagatcgttgctttttctaagtgcctacttaatgagcagattattgtcttccagcaaatacttctactttatagagaggtatgggaaacaggacataataggtattaagtgagaaagtgtgtgttccaatttttaattataaataaaagatttaattaactgtattcagttaattcatttggtaaagtgaacagttttgactttggattagttagaaggaaaacaaaattgacatatctagttttcgcttttaaattatacatagacttaattaattgggacaaatgtgaactaagatactgggtaaaacttgtgtgtactcctaaaatgacatttgcatggctggtagtaagctgtgattcttgtccttgtaggaatgaaatcacataatttggggaaagtcttaaggtaaaagtaagctatttcgtttagcatttcttgtgcctgaaattatgcctacattttatttttcaaaaaatgttgcttgctagtcattacttgtgatatccttgttgagtctactgaggtgttttttttccttcattacctgtgtcatagataagtatgccagtctgttaattcaacattaatactgcaaacttaaaagtgaaggttcttggccgggcgccgtggctcatgcctgtaatcccagcactttgggaggccgaggcaggcggatcatgaggtcaggagttcgagactagcctggccaacatggtgaaaccctgtctctactaaaaatataagaattagctgggcgtggtggcacatgcctgtaatcccagctactcaggaggctgaggcagaagaattgcttgagcctgggaggcagaggctgcagtgagccgagatcatgccactgcactccagtctgggctacagagcgagattccatctcaaaaaataaaaataaaaattggctgggtgtggtggtgcacacctgtaaccccagctactcaggaagctgaggcaggagaattgcttgaacctgggaggtggagcttgcagtgagccgagattgcaccactgcactccagcctgagtcacggcaaaactccgtctcaaaaaaaaaaaaaaaaaaaaaaaaaaaagtgaaggttttcatagcaacagctgctcggttttacactatgtttacatttagaagtatgagagttgttaaatgtgtattttacacatatttcatcagaaacattaatggaaaaagatcaagaaatgaagtattttggtttaagaatcagtagtacattgattatcagttttcagagacatatagtaaaataaacttagcatacagattatgtggaatataatttgtttttttttcttatttattttttgtgtgtggaatgtaattgaaatctgttgctcaccaagtctttcagtgtactagagtttgggttctggggtcagagtgcctgagttcaaatcctggctttgccatggtatgatgtagggcaaactgcttaatgttgtttatttcctaaccttaacctgtaccttaatttcttcatctgcaaaatagaaataataacagtagtacctaacctcttaagctggtcaaatgaattaattcatgtatttagaacagtttgggcacataattagctggttcactaacatcatttgaagtttaactgtgtatactatttttacttaataagtatatattaaatacatattatgtaccacatattctagatgctggtatcatagtagtgaacagttctcccagcactttgggaggccgaggtgggaggatggctgggcaacatagcgagaccatgtctctacaaaaataaaaaaattaggccgggtgcggtggctcacgcctgtaatcccagcactttgggaggccaaggcgggcggatcatgaggtcaggggttcgagaccagcctggccagcatggtgaaaccccgtctctactgaaaatacaaacaattagctgggggtggtggcgcgtgcctggaatcctggctactcgcaaggctaaggcaggaaaatctcttgaacccaggaggcggaggttgcagtgagtggagatcgtgctattgcactccagcctgggtgacagagcaagactctgtctcaaaaaaaaaaaaaaaaattagcatggcagtatgtgcctatagtctcagctactcaggagactgaggcaggaggatcacttgaacctaggggttcgaggttgcagtgagctgtcattccgtcgttgcactccagcctgggcgacagagtgagggaaggctatctcaaataaataataaataaataaaagtacgggcagtagtcaggagcttatgctgtattgttccaggtgagggtatctctgaccaaggtgaaatggggaggaggggttggattttgtatgtattttgagggtagacctatagaatttgttggtggttgtttgcgggatgtgggccaaacagaagaataaagaataaggtttttggcctgaataactggaagaataaagttgccagtaactgaattggagatggtaattcatggagcatgtttgtggagaaaccagaagttcagggtgatgtccaggaagagtgagaaatgtggctgttttcagcttctttgtagtatttatgattatgagataggtgagatcatcaggggagtgaattttggtggagaagagatccaaacatctgagcctaggggactgattcattcacttattcattcataagttacttagtgagtatggttcttctaggtacctttttaggcattggggatataaacctgacaaaagttttcaccttcatggaacttaccttctagatacgtgaggggaaatcaagaggaaccagtaaaggagagtgataagaaatcattgagttaggagggaaaccaggggagtatgatattctagaagtgaaggaaaggaagctttcaagaaggagggaacggtcagcggtgtcattgtttaaagttgtgtcagaatgttgagtaagagagaattctgcttgattatgatgtctaataacagggaaatgactaaataagttttagtgtgagatagatgagacaaatgtaagagtcttttagttttttacttctctgttttttttgtttttttttttgagatggagtctctctttgttgcccaggctggagtgcagtggcgcaatctcggctcactgcaatctccgcctcctgggttcacaccattctgcctcagcctccggagtagctgggactacaggtgcccgccaccatgcctggcttttttttttttttttttttttttttgtatttttagtagagacagtgtttcactgtgttagccaggatggtcttgatctcctgacctcatgatccgcgcgccttggcctctcagagtgctgggattacaggcataagcgaccacacctggcctcattctccgggtagatttttaagaaatatttcagccaggcacagtgtcacatgcctgtagttccagctgctctggaggctgaggcaggaggattgcttgagtccaggagatcaaggctgtagtgtgctatgattgcatatgtgtatagccactgcactccagcctgggctacatagtgagaccccatctgtaaattaaaaaaaatcattcttttcagaacaaaataggcaacctgggagtgctaaggaaaggcacatgacttcttattgttgttgttaattttatgtacacttattttaagaaataggtaatatatgtactaaattagaaggtataagagaatacacagttaaaagtctctcctatcccatctagttctttctgaaggcaatcactgtttgcagtttcttgttttttctttttagccagtgaaattttgtgtaataggacattacctattctaaaattgcatacatataagaaacattttatcttccactctgacactgaacactggcaatattttatactttttgagaagggtcttggtctgttactcagtctgaaatgcgatggtgcggttatagcttactgcaaccttgaattcctgggctcaagcgatcttcccacctcagcctccagagtagctgggactgtagccatgtgccaccatgcctggctaattaaaaaaaatttgtagagagacaaggcgtcattatgttgcccaggcactattttagaatagcttatttaaaagatagttttagaagcctgtcaagggaaatagtgactgctaggatcaaacatggattcactaagtcacatcagacagtagttgcctagaattgacttggttacttgactgataaataaaggaaatgcagtagttggaatttatgtatacgtcagctaggctttttcatgtcgtctttgtggaaagtacgaacatatgtgtcctagatttcttgaggacaggaactatctattagatacttattaaatacttgatgaatgaatggatgctagcataataatgtgaattcacaagttgaatacccaggaaataaagaggtgcttgttgaggatcttgggtttgaggaacttggtgttagactcatccatacatttattgaaatgacacaggatggtagcaagactggtggcatagaggataatggcagctgtgaactagttgccagcatatccttactgagtatgggggatgtccaggtggtcattagctgatagtgaagaggtagaggttgaagactgtgctgctgaatagcatgagaattagactaagattttacgtaagggtttgggaatagtggtctggaactggcactggcaggaaggaaggtaccagcctcatttcccagtattgggtgtggagtggaagagactgagtagctttcacttaaaaggactatatgagaagaggtgtcctgattggaaagtcagctttcagttaaggcagagaggtagcaagaacatttcccaaggaagttgaagacttttagaggagtttcttgataaaagaatgaagttccatgagagtgtatttttccaccctattggcttgttatcatcatttaaactttaaaatgtctcttcatcttaataaaaaactccagatttatactttattgctctaagttgctctctgctttacacacttaagagttttctgcatttgctgtgtatctccatttcttcacctgtgacttctcaacctatttctgtcttgtttctatcgccattatttcagtgaaactgaaaatagctagtgaaaatatgtatgaaaatagccaatgtctattttactatcctgttcttatttaacctcttagcagctgtgctagtttctattggctatataacaaattaccccctaacttaagaaacatttattgtttcacagattttgtagatcaggaatgtgggtgcagttggcacctatgattcagggtctctcacaaggctgcagtcatctcaaagcgctacttggggaggctgtttccaagctcactcatgcggcaattggcaggcctgaggtccttgttggctgcttgctggagaggtgagtcccttgccatttgggtttctgcgtacgactacttaaaatatgatatctcagtgcttctgtcttcaaaagaggacagatattagccagaatctttttgtaaccttatcttggaagtgatgtggtatcacttttgttgtattctgttatcagccagtcactaggtccagtgcactcaaggcaggatttcacaattgcatgaatgctgggaggcagagatcactcatagccatttcaggactgtctaccacagcagcatttgacagagcggatacccctccttcctttgtaaagctctctcttctcttgaggtcttcagagcacttttctgtttttcttgctggttctctgggctctttctctgtcacttttttttttttttttttttttttgaggcagagtcttgctctatcgcccaggctggggtgcagtggcacaatcttggctcactgcaacctccgcctcctgggttcaagtgattctcctgccttagcctcttgagtagctgggattacaggtgtgcaccaccacacccagctaatttttgtatttttagtagagatggggtttcaccatgttggccaggctggtctcgaactcctggcctcaggtgatctgtctgccttggcctcccaaagtgttgggattataggcgtgagccaccgtgcctggcctctcagtcaccttttgagtctttctgtgctcatttattaaatgtttgaatttctttgggctttctcatcgctttctatttcatttttcatctgtgtgctgagtattcatttttatgtcttcagtttttacctctctcctgagtctgaggaccactctatcgaattgctactgaatgtttccatttggatgccccttaaaccgaacacatccagaacggaatgtatgattcctacacttcctctggtgtttcttaatttgttaaatgacaccactgggtgcttaagccggaaatgtgtgtggtgttcttgatttctccctctcctccaccttccattttactattgctttttatttttctagagccatggctgttcagtgatggtgtgaatgtttctatgaggtagtgcatcctctgccaggttgcaagcattgaacctggtgctaggtgatttttttttttttttttttttttgagatggagtttcactctgtcgccaggctggagtgcaatggtgcaacctccgcctcccgggttcaaacgattcccctgcctcagcctcccgagtagatgggattataggcgtgcaccaccacggccagctaattttgtatttttagtagagacgggatttctccatgttggtcaggctggtctcaaactcctgacctcaggtgatccgcctgtcttggcctcccagagtgctgggattacaggcgtgagccactgtgcccagcccgctaggtgatttttaagattccttccaatcttgagatactgcgtgtgtagctattgaagatttctgagtaggagatgcatgatcagggctgtgcttcagaaaggtggcaactcttgaacagtcatttttagttgttcaccaaagaatgaaactaaacacctgtattctttttaactttattatggtgtgctaagtgatgaatagataatttttatgtgacagcccttttgtatatattagtttcattttttctcattgttaatgcatttatgtttggaagcccttttgcatggaaataagataatcaggccaggcacagtggctcacgcctgtaatcctagcactttggcagactgaggtgggtggatcacttgaggccaggagttcaagaccagcctgagcaacgtggcgaaaccccatctctactaaaaaataaaaaaattagctgggtgtggtggtgcacgcctgtaatcacagccactctggaggctgaggcatgagaattccttgaaccctggaggcggaggttgcagtgaactgggattacaccactgcactccagtctggatgacagagcgagaccctgtctcagaaaaaaaaaaaaaaataacccaatgggatgaaaattttgggatgaaaatttgtgtgaacttaaattaagtgtctctgccatcctggccaacatggtgaaaccccgtctctactaaaaatacaaaaattagctgggtgtggtggtgtgtgcctgtagtcctagctatttgggaagctgaggtgagagaatcgcttgaacctgggacgcacaggttgcagtgagccaaaatcacgccattgcacccagcctggtgacagagcaagattctgtcttaaaacaaaaaaaattaagtgtctgaaattgtaaaaacttctcaagaaataaaattcagaccttaaacataattttactgtaggaatataacttaccttttgaaggaattctttcttgaagccattatttgtgtatttatttatttttaattaacttttttgtttgtttgtttttttgagatggagttttgcccagactggagtgcagtgatgcgatctcgtctcacggcacctcccaggttcaagcgattctcctgcctcagcctcccaagtagctgagattacaggtatgggcaaccacgcctggctaatttttgtttttagtagagatggagtttcaccatgttggctaggctggtctcaaactcctgacctcaggtgatctgctcacctcggcctcccaaagtgctgggattacaggcgtgagccacactgccggtgcttgccaccttgcctggctaattttaaaacttatttttgtggatattgagttttggttttttgtctaggctggcatcgaattcatagcttcaaatgatcctcctgtcttggcctcccaaaatgctgggattacaggcatgagccactgtgtccggccttgaagcccgtcttgaatgtaacacatatgtagaaaagtatgtaaaacaaaagtaaagctttacaatttatgaatcagacacttgtataaccatgatgtaggtcaagcactaggaccttactgacattccacaagctttccttgaagcttcccaatcacaacccagtccttctctcataaaggtaatctctgtcctgattgtaggagaatcaccttctttttttgtgtgtgtagacctttttagttttggcttagttttgattgttttgcatctttatatgcatggaatcatattgtatgtattcatgtctggctttgactcaacattttgtttgtaagatttagatttgtatgtagctgttcgttcattttcattgctaaatagtattccattgtataaatatactacagtttattgtattattgatggatatttaggttgtttctagttttgggctattatggattatgccactatgactattcttgtaaagtcttttttttttttttttttttttcctgagacggagtctcgctctgttgcccaggctggagtgcagtggcgcaatctctgcttactgcaaccaccgtctcctgggttcaagtgattctcctgccccagcctcccgagtagctgggattacaggtgcccaccatcacacccagctgtttttttgtattttaagtagagatgggtgtttgccatgttgaccaggctggtctggaactcctggcttcaaatgatccacctgcctcagcctctcaaagtgctgggattacaggtgtgagccaccatgcccggcttttttttttttttttttttttttttttttgagacagtttcactctgtcgcccagactggagtgaagtgttgtgatcatggctcactgcagccttgaccttctgggctcaagtgatcctcccacctcggcctcccaagtaactgggactacaggtgcataccaccatgcttggctaattttttttttttttttggtacttttttgtagagatggagttttactatgctgctcaggctggtcttgaactcctgagctcaagtaatctgcctgccttggtctcccaaagtgctgggactacaggtgtgagccactgcaccttgccttgtgcaagtcttttagtgcatatgtgtatgtaattcttttgtgtatttggccaggagtgaaagtcctgggtcataggatatgcatatgtagaattttagataattgccaaacagtattccttctttgtggttctacaaattacatgccccaaagagtgtttgagagttcattttgttccatatctttgccaatacttagtattgtcactattattaactttagccgttctggtggatttgtagtagtatctcttggttttaatctgcatttcacttattactaatgaggttgaataattttatgttggttacttaggaaaccttttgtgaaatgcttattcacatgtcttgcccaattttatcttttttttcttattataggagttccttatatattttggatatgaccccttctttggttatttgtgttgcaaatatttccaccttactctgtggcttgccatttaagacttcttaaggaggccaggcaccgtggctcatgcctgtaatcccaacactttgggatgctgaggagggtggattgcttgagtccaggagttcgagaccagcctgggcaacatagtgaaaccctatctctatgaaaaatgcaaaaaaaaaaaaaaaaaaagactcaaaaaaaaaaagagaaaagaaatgtgttaggaccctaattggactttaattggatttgtagattaatttgggtagaattacttttttgtaatgaggaatctttgactaattcaatatgatatccctgttatttatgttgtatttcatatatctcagtaatgttttatagttttctgtgcagtattacacatcttttgttaaatttagtcctagtatctgatggtattataaatagaattctaagatcaatgttattttccattacttgttggtatattgaaataaaactgaattttgagtgctgactctgtattttgctaatcaagccttataataattttatctgtagattcttttggctttccaacttacataaccatatcatttgtgaataattactgttttctgtttttcttcgcaattcttacacctttttcttttcttcactggctgggatttctggcatgttgttgaatagagataggagacgtcattgtcttttcccatctcaaagggaaatctttcaacttttcattgttaggcatgatgttgtcaagcacacttacacaagacaaggcaaggctaagaccttgcctgtctgatttgactggcaaagacacagagagcctctttagactcagacagtttatctgttacatagtcggcagaaagaagaataagccaaaggttcctgctccctgtgatctttgtcccacataccaaaaaggataacaccacaacaaaaggggctgatgcctgcagtgtgagctgggggatactctgttgatgaggagcctattctaggctgctgctaagtggttttgtattctacagcgctgttctaagttaggcagggctgaaggttcaatgccttgtcagaacccaggatgccatgagaaactgtctcatggcagcttctaaggaagatagggaagaggtgacctgggagagctccatataggccttccaccatctcctgttatgggaggatcacagggcattcctccaagactcagataagctgcaggtcaccagaacaccatggtggaactgtttccctacagatgtttgttatagttgcttttgcacatgtcctttattagattaagaaagtttcctcctatacctagatttttattcattagtaaatgttaaaatgtgtccagtgtgtttcgtatctattggatgcttccccccctttcaacccattattatggccagttacatggatttaaaaattcatttctgctggttaataaatttctttctttttttctttctctttttttttttttttttttttttgagacggagtcttgccctctcgcccaggctggagtgcagtgacgtgatctcggctcactgcaacctccgcctcctgggttcagacaattctcctgcctcagcctcccaagtagctgggattacaggtgcccaccaccacacccagctgatttttgtatttttagcagagatggggtttcaccgtgttggccaggctggtctcaaactcctgaccttgtgatccaaccgccttggccccccaaagtgctgggattacaggtgtgagccaccatgctcagctggttaacacatttctaagcatttttttcctttgaaagattttacttacttgaaaaaaaattgctgttgatgactttcttttctctggctgcctgcctttttctgtgtgtgtgtgtgtgtgtgtgtgtgtgtgtataaattttttttttctcattgttcatatagaattcaggtatagaattcaggttgctgaacttttcaaggaagaaagaccgtatttaacttctgattcatcattaagaagttattaatggtccgagagactcataggggtttcttctgaagtaagaagaagccatgttttacatcttcagatgccacgtaggtgacttttctaccttcatggtagtattcactttactttcattaaaggcaagtaattttgagtacttcaaattagttcccatcccttttctaaactttaaacatttttaaagaaatctttatttattttcacctggggtctcactctgtcacccaggctggagtgcggcagtgctatcatggcttactacagcctcgacctcccaggctcaagcgatcctcttgcatcagccttcgagtagctgggactgcaggagtgcaccaccacacccagctaattttttgtagagatggggttttgccatgttgcccaggctggtctcaaattcctgagcttaagtcatctacccaccttggcctccgagtgttgggattacaggcatgagacaccatacctggccccttttctaaacttttatatgaaatttaggctgaacctttgcttgacgttattctcccttgcatttagatataaagttattaaacagaaaaagttactgaaggtagataattattggctatttcatgtgatttttctggtggttactgtagtcaattttatagtattgccaagtttctgaatccattctgaataatgtgattgtttattcttatgctttgggcctgataatttttgtagagcagcagttcttatctggtttcctgttatttttaaaataaattaattgaaaatgggcataaattatttgttaagtttgaacttgacaaatgcaggtaaagtataatgatattatatttcttctgtacagcaagtatatacatgtatattttaaatcatcaatcaggatttccttccaaagttcagaattaggttttgattcttaacagtttatattaaaattcttattattattactttttttttgagattcttaacagtttatattaaaattcttattacttttttttttttttgagacagagtctcgctctatcgcccaggctggagtgcagtggcatgatcttggctcactgcaacctctgcttcccgggttcaagcaattctctgcctcagcctcccaagtagctgggaatacaggcgcctgccaccacacctggctcatttttgtatttttagtagagacggggtttcaccatcttggccaggctggtcttgaactcctgacctcgtgattcacccaccttggcctcccaaagtgctgggattacaggcatgaaccactgcacctggccagtattattactattttttgagacagatttttctcgctcaggctggagctcattgcagcctcgaattcttaggcttaatcaatccttctgcttcaaccttccaagtagctgggactgtaggcatgcgccagcatgcctggcaaatttttttttgtttttgagacagagtgttactctgtcacctaggcgcaatttcagctcactgtagtcttgaccttccactcctaagtgatctacccaccttgcctcctgcatagctgggactacaggggcgtgccaccatgcccagctcatttttgtaattttttttgttttgtttttaagagatggggttttgccgtgttgcccaagttggtctcaaaaccctgggctcaagtgatcccctcaccttggcctcccaaagtgttggtattgcaggcatgtatcactgtatctggccttttctttttttattagagacagggtcttgcagtccaggctggtcttgaactctttggcctcaagtgatcttctgtcttggcctccgaaagccctaggaaacaattcttgtaaatagtatagcaaaaatgtctgctttataaatttttcatttttatagttgttcaagagtacatatgtatttccttttttctttttctcgttcctcattcaaaaaatatggaaaatctaatatacaatatatatgtgtatatagtatatataatatagtatatatatggtgtatagtatatagtgtatatatagtatagtgtgtatatatatgactctgtattgtgttccatcttggcagtacagtgtttgaggcactgtctccgccctcaggatgctggtgaccagggagggagacagtaaacaggcaattacagtagagtgtgataagtgttattgatacgtgcaagaactagaaggtttaaggagtggccaaagaggcttgaaattgggtttggatcatgaagggctttgtaaaccctgttaaaatctgacttttaccttggagcaatggcaagactttggagacttttgagtaaaggaaataacaggagtatatttgtattttacaacaaatggttaagaggaggctatgtgaggaagccaactaggaggctgtggacctgttcccactaaagcctaaaaactaaagtagtgacagtggggatagagacgcgtacagagttaaaagctttaacaggactgggtaattcattctctctctctctctctctctctctctctctttctctctctctcactgggtaattctctctctctctctctctctctctgtgtgtgtgtgtgtgtgtgtgtgtgtgtacacactttgtggggaaaggacagttagttgatggggaggaagaagactaaagtgactcccagactttcagatggaacccctaggctaggaacagtgctattgggtacagtagccactagccatgtatggccattaaggtatgtctaaactaatttaaataaaataagatttaaaatgcagttattcagttgcactagccacacaaatatagaattacagactcttaaattctgtaaatttcatccagagtactatgaagttataaattcaagagtatgcacagagattcaagcagaaaataatatctggctacatgtgtttaacagcagtatgggactggtggcctctgtattggacagtgcagatatagaacatttctgttacagaaggttcagtgggacagcagtggtctgcagtttttggtttctactttcttttccccgccagaggagagtcagaataacaggtggttttctctcgtctcctaagaactttggttccacagtattctgttgtgtgatattgttacccagggattctgctagataccgttcactactgtcaaccaccatcacccagtcatcaggtataggacgtttctgtaatcagagaaggttcttttggacggcactgagctagagagatggtgatgtcattcatcgagctattgatggttgtggtgggacaacagtagctgccagaaagcgctgtttattagaaatatgagccacatatgtaattaaaaaatttttagtagccacattaaagagtaaaaagaaacaattggattttataacttatttaacacagtatgtccaaaatatgatttacaacacattaaaacatttaaaaattattgatctatttacataattttttttaatttttttgagacaggctcttgctatgttgcccaggctggtctcgaactcctgggctcaagtgatccatccgcttcagcctcccaaagtgctgggattacaggtgtgagccaccatgcccggccacattattttttaatactagctctttgaaatcaattgtatactttcatagtatatcttaattgaaatactaatttttttgttctttcgttattttcaaatgcttagttttatcagaaatatttcatctgtatttatatctgtaaatcataaaatttacagttgaaaaagtagatttatatgcccaggttattccaaacatgcttaaaacttttccagtaatggaattaagtatcggtttttaaagtttcaattcccgtgaaataagaataaaaattcagttcctcggtctcactagccacctttcaagtgctcagcactcagcagctgcatatggctagtggctaccatattggacaacacagctctggaataactgctcactggatggttggaaattcaggtctggagtttaggaaagaggtagcaagacagaagttagaagggaggagctgtgaggaacatggggatttaaaaaaaaaagtttgtgactttgagcaaactaattttaaccttggtgctccatttaaaacaaaatcgataaaagcatcttggtgagagtataatagtagatgaatatgcagtatcttgtggtggtaaagatttttttttttttttgagacagagtctctctctgtcgcccaggctggagtgcagcggcactatctcggctcactgcaagctccgcctcccgggttcacgccattctcctgcctcagcctcccgagtagctgggactacaggtgcccgccaccacgcccggctaattttttgtatttttagtagagacagggtttcaccgtgttagccaggatggtcttgatctcctgacctcgtgatccgcccacctcggcctcccaaagtgctgggattacaggcgtgagccaccgcgcccagccaagattttgactttagagtttgatagagctgtgtgatcttgggcaacttactgggcctaatacaatctttctccttgaaaggggtttgctgttgggattaaatgaaatattgtgacaagtgttcactgcatataataccgtatttctttacttttaagttgccatttctttttggtgaggtgtactatcaacttaataattcattctttttagaaaaaaagaaacataatttagttatacatgttaattataagctgcatcccaattcagaaactttaaaatatgaaaaactgtttatcttaaaatattaatattgatgagtgttcattataaactagatactgtgttaaatgctttatatggtgatgtaaaaggtttgatttttataaatatgcaatgtaatatgatatttttgttataaagtttcatttaagtagattctgcaatacaaatctcttctggaaactttaaaatgcatgatggtataactccttttttcagttatttcaggaaccactgaattctgcttgaatctctttggatacttctaaatttatgatttctccaggctaaatctgcagaatttgagtctgtaattctaccttagtgagtacacatataaagaattactatttaaaaaactgccttggtagagtttattcagagaagcgtggtaaccgaggggaggaaaatggacttttccaggtcgaagagaaaggaaatattggctgggtgccatggctcatgcctgtaatcccagcaatttgggaggctgaggtgggcagatcacttgaggtcaggagttcgagaccagcctggccaacatggtaaagactcatctctactaaaaatacaaaaattagctgggcgtggtggcgggtgcctgtaatcccagctatttgggaagctgaggcaggagaatcgcttgaacccgggaggagaggttgcagtgagctgagaccacacgcactgcagggcagccttgnnnnnnnnnnnnnnnnnnnnctgcatatggctagtggctaccatattggacaacacagctctggaataactgctcactggatggttggaaattcaggtctggagtttaggaaagaggtagcaagacagaagttagaagggaggagctgtgaggaacatggggatttaaaaaaagaagtttgtgactttgagcaaactaattttaaccttggtgctccatttaaaacaaaatcgataaaagcatcttggtgagagtataatagtagatgaatatgcagtatcttgtggtggtaaagatttttttttttttttgagacagagtctctctctgtcgcccaggctggagtgcaatggcactatctcggctcactgcaacctccacctcccaggttcaagtgattctcctgcctcagcctcctgagtagctggcattacaggtgtgtaccagcacacctggctaatttttttttattattattagaaatgggtttttaccatgttggccaggctggccttgaactcctgacctcaggtgatccgtccttcttggcctccgaaagtgctgggattaccgaacccggctggctatatgatttttgatgctctgcaaattcttttctgaggtctttttcttaagtctcatcttctggcagtgtgccattccacccgtttcttggagaagaccagaaacatgtttataatgcgtacccatgcgttatatacacagtgtgtactaggaaaccttactgccttatttgtggtagtttcagtagacccactcaggtctgaaataatattaggcattttacatccgtattattggaaataatgaaaaattttatatgtgccaactgcatttggtgatagcaactgcaagtgctgtgttgaaaatgactttgagactaggtacaaaaggatgaagtgttcaccctggaattacagtggctctccttttgtttctgtttaagtcttcttaacatttttcctttttttgttttttgagacaaggtctcactccgtcacccaggctggagtgcagtgttgccatcaccgctcactctcacagcagccttgaccttttgggctcaagctatcctcctacctcagctcccaagtagctgggactacaggcatgcaccaccatgcccggctaattaaaaaaatttttttgtagagacagggtctctccgtattgcccagattggtctcaaactcctaggctcaagcgatctgtctaccttggcctcccaaagtgccaggattacaggtgtgagccaccttgtttggccaacattttcctttttaaataagtagtgtttacctgtttggaaaattttgacaactattaggaaaaaactaggtttcagctcatcttttggctgtgcttatatttgcaaaattgagagtatactgtagattaaaatatattcttgaaggctgggcacagtggctcatgcctgtaatcctagcagtttggaaggtcaagttgggcggatcacctgaggtcagtagttcaagaccagcctggctggttagcctagctaacatggtgaaaccctgtctcccctaaaaatgcaaaaattaactggatatggttgcaaatgcctgtagtcccagctgcttgggaggctgaggcatgagaattgcttgaacccaagaggcagaggttgcaatgagcggagatcaccccactgcactccagcatgggtgacagagtgagactctgaaaaaaaaaaaagcatatcctttttcattattgtgttataaacgttttttaaatggcagacattggtttgtaaatggtttttgtaggcttcatgttaagtcataaagatttcacttaaacatttctcaatgaagtgagtactaataaagctggtgtatctttataaacttttctctacattttggatcatttgagtagattggtttttcctgttcatagaattactggatcaaaagatatgtttttaagacccttactgtaaccattttcaaacttgctgcttctcagatacttttattatttttgggaagaaacaaatacttactgggttcctataatttttcacttaaacccttttaaacttatgatatgcttcagacatgcaaaaagatacagagaatgatgtaattaatatctgtgtatctaccacctagcttaagaaataaacagtcacagacttaaaattcctgtgcagctcttcctgattataaatgtctgtatttaccaacagtgatgtggatatttaatctttttttttttttttttttgagacagagtcttgctctgtcaacaggctggagtgttgtggcgtgatcttggctccctgcaacctccacctcctgggttcaagctattcttctgcctcagcctcccaagtagctgggactacaggcccagctaattgtatttttagtagagacggggtttcaccatgttggcaaggatggtctcgatctcctgacctcgtggtctgcctgccttggcctcctgaagtgttgggattacaggcgtgagccactgctcccggctgatatttaatcttaaccattaattcaggtctgcgtccaagatcttttggaccagaattcagaatttttttcagatttttagagagatgacatgcatatattatatataagctaacttttcaagtatgttttgggaatggtccctaatttcttcattaaacactttgggattactgacccagtccaggtctggttttactatcatattagttataaatttttggatttttagacatttttgttattcagtcttgtgaatagacgtttgtgaacaggtacatctgttttactttgttcagcttaatcactggtagaatttgttgaactttgtgttgagctgatcacgatgtagtatgagatgtataaaatgcaaggtaacataattttatgtccaaacaatttaatattttaggattttatgaaatcaggttatcagtgagcactagagtcgttggggaaggctacacaacctagaacttgacttgtttcaactaagtggcgcagattgctgttacaactggagaacaactatgattaacaaccttgtgtttatttctaagtatctagcttgacaaaatatttgtcatgatgagaactttgagagaacttataattaacttgattaattgataagaattattaaaaactgcagttaacttgattgtaaactgagttacccttccattaaaaaaaggcgaaatagtaactgacaagtgttaagattgctcgtttacaattgatgtgtcattgctgctccaagcagaggtggcctttcagataggtatgctctgaaacagtgctgctttagccacactgtcgtgtagttttagtctctagtcagtattggagaatcagattaaggttatacaactagatgcgtagtgttagcagacttaatacattttagttacatgctgagtgtagaggcagagaaatctgtgccttcattaacttgtagatttattttctttctgtctttctgtctgtctgtctttgggtctgtctgtcttcctttgtcacccaggctggagtatagtgatgtgatcataggtcgctgcagccttgaactcctgggctcaagctgtcttactgctacagcctcccaagtagctagggctaaagatgtgtgccaccacacctggctaattaaaaaaaaagttttttgtggagacgaggtcttgccgtgttgcccaggctgatctgaagtgatcctttcgccttggcttcccgaagtgttgggattataggcataagccatgtgcctggtgattttttttttttttaaacttcctgctacttacagagatattagcaatctgtctatgcctagcccattaattgctgtgtaaattagtgccgaatggttgtggaggtctttatttaaacctgtagtttataatgagacttaaaaaaatgtaagtttttttttttgtttgtttttgagacagggtttcactctgtttcccatgctgggatgcagtggtgtgttcttggctcactgtagcctctgcctctggagttcaagcaattcttatgactcagcctcctgagtagctgagatcataggcgtgtgccatcatgcctggctaatgttggtatttttggtagagacggggtttcaccatgttgcccaggctggtctcgaactcctgagctcaggagatccacccatcttggcctctcaaagtgttgggattacaggcctgagccaccacaccaggccaaaaaaagtaaagtaatacacactcactataaaaagaaaatggaacagagaagaaaagtatgtaagtaaggaaaaaggtgattccatctggtctttcagaaataggcttttaccgtacaaatcatttctgtgtatatacaaacatacgtgtatatatcctttgtacacaaatgagattgcctcgtaagcattcttctgtaacctggtttttttcccacttcacaatatgtttttgcatgtcagatctatatcttagatatagatatttacttaatttttttttgtttttgtttctttttcctttttttgaaatgaaatctcactgtcacccaggctggagtgcagtggtgcaatctcagctcactgcaacctccgtctcccaggttgaagtgattctcctgcctcagcctcccaagtagctgggatcacaggtgtgcgccaccatgcctggctaatttttgtatttttagtagagatggggtttcaccatgttggctaggctggtcccgaactcctgatctcaagtgatctgccctccttggcctcccaaagtgttgggattacaggcatgacctactgtgccctgcctctttttctttctttttttttttttgagacagtcttgctctgttgcccaggctggagtgcagtggcatgatcttggctcactgcaacctctgcctccggagttcaggcaatcctctcacctgagtaactggtactacaggcacacaccaccttgcccaggtaagttttgtattttggtagagacaggaattcaccatgttgtccaggctggtcttgaactcctgacctcaagtgatctgcccacctcagccttttaaagtgctgggattacaagtatgagccaccatgcctggccattgtttttcttttcttttttttaaattaggattgcctgaaagaaattttttttaaacagcagcattgtcttttgtagttgagagatacataaatttattcaactaatctctttggaaatttaagcggtctccttgctggtacaaacaatgcaataattgaatatcattgcacattatgtccttgaacctgtgaaaatatattttatggagaatattttttaaagtgaaacttctagttcaacaatgtgcacattttaaattttgatagattgtgccaaattgtacctcagtgggattttaaatttttggtttattgttcatcttttcacagggagcctaggatagcagcatatttctcgtccctagtaatatttataaccctttaagaaaatgaacaggatctttaaacatgttgaaatacagtattaaaaatatttgactcgttgatgagcataaccccattacatcaggttgtactagtaattttgagatttatgtgagaatttcacatataattatttaaatagctaatgggtggtatattacatcaggttacatcaggttggactagtaattttgagatttatgtcagaatttcacatataatatttaaatagctaatgggtggtatattacatcaggttggactagtaattttgagatttatgtcagaatttcacatataattatttaaatagctaatgggtggtatattacatcaggttggactagtaattttgagatttatgtcagaatttcacatataattatttaaatagctaatgggtggtatattacatcaggttggactagtgattttgagatttatgtcagaatttcacatataattatttaaatagctaatgggtggtatattacattttctggttcaacttacaaatatagcacatctgtgttagcctagtccattatagttagtttgaagtaaactgctgtgttgctattaaagaatttttttgctttcatttgtcttaatgatatttggtgttcctttggagactcagttcataaagagctattattatttttctaatctatgaggagagtgagagattgctgtctgcagttgcatgttatgctcgtagctatttgtgggaagagtgagaattaaaggctaacatataatcattgtgggtagaagtatttttatttttagacttctgagtataatggatttctgtggggtgaggcgagactggggctgtttttctctcacagtatgtatataaccattgggatcagtgcttttcttttctttttttttttttttttgatttttttggatacactgtttcactctgtcacccaggctggagtgcagtggtgcgatctcgatctcggctcactgcaacctccgcctcctgggttcaggcaattctcctgcctcagcctcccaagtagctgggtttacaggcgtgtaccaccatgcctggctaagttttgtattattagtagagatggggcttcaccatgttagccaggctggtctcaaactcctgacctcaagtgatctgcctgccttggcctcccaaattattgggattataggcgtgagccaccgtgcccggcttcagtgcttttcttagggaaaaatgattctggaatttttgaatatttttatttattatttttttgagatggaatcttgctctgtcacccaggctggagtgcagtggcatgatctcggctcactgcagcctccacatcctgggttcaagtgattctcctgcctcagcctcctgagtagctggggttacaggtatgtgccaccacgcccagctaatttttgtatttttagtagagacggggtttcaccatgctggtcaggctgatctcaaactcctgacctcaggtgatccacccgcctcagcctcccaaagtgctgggattacaggcatgacccaccatgctcgtcctgaatattctttgtgtttttttctgacaggctttgtgatgtgaatagtagtgaattgatagtgaaactgtattgttaataaacacataatttaagataagccagatttctggtaatattcttctcagaattagattttaggaaatttctctaaatgtaaatcctggaaagcttgcagagatttaaatgttgttctggtattttttttttttttttttttgagacggtgtcttgctctgtcacctaggcttggagtacagtggcacagtatctgctcactgcaacctccacctcccgggttcaagcgattctcatgcctcagcctcccaagtagctgggactagaggcgtgcgctatcacaccccgctaatttttgtatttttcgtagagatggagtttcaccatattggccaggctggcctcgagctcctggtctcaggtgatctgcccgcctcagcctcccaaagtgctaggattacaggcgtgagccaccatgcccagcccatctggtatttttaaaaaactcaaaatatagggtacaaaattcatcttaagtgcttggtacatctttagcttggtaggtctctgacatagagtttaatagagatttttttagtattgagaacccatttgtccccacagacatattttctgcgtgtgattgctctgtgtgtatgtgaatttttaatttctttcttagatgagaggcattagtctgtttttgagcttatgccatcttcttggaattaagatttagctacagaagtttgtattcttattaatgcaggaagaacagttttttaaaaaattgaaatcttgcccatttagttaattattttcaggggatagatgacaaaagtaaattgcaagacatgtacagaaggaggttgtcagttcatggaatttgttttatttatttatttttattcagagtctcactctgttgcccaggctggagtgcagtggcatggtctcagctcactgcaacttccacctcccggcttcaagcgattctccaagttgattctcctccctcagcctgtggagctgctgggagtacaggtgtgcgccaccatgcctggctaatttttgtatttttagtagagacggggtttcgccatgttggccaggctggtctcgaactcctgacctcaagtgatccgcctgcctcggcctcccaaagtgctggggttacaggcgtgagccaccacacccagcctaattcataaaatttggatactgtttaaagatagagaaaactttcttaacttgaggaaaatgttaaaaattgctttcattatatttgttttagattacatttagttgcaggttccataaactacattcaagattagtactgctttttaaatgtatatgaactatctaatggtttttacgtggatttaggttaattgtggcgttggcaaacacttactgcctgcttgatttgtattagacactgtgctaggttttggagatggagtaagacattcctttacttttaaggaggtgattaactaaaacaataattacattattttaaaagcccctggttacctcagaggagcacctaaattagactgaggggcatgaaggtttgtgtaggattgtgactgttgaacttagtttggaaaaatgagcagtagttagccagttgatggggcagaagaaggtcatggaaaccagagacagcttggtatttcagggaattgcatagacctgattatggttgtcacgtggagaaggacagtggataagtagtagtttcagagagataggcagggccaaatgatgaaaaatctcatatgcactaccaaggaattcagattaaaaaaaaatattttttgagacaacgtctggctctgtctcccaggctggagtgcagtggcatgatctctgctcactgcaacctccgcctcttgggctgaagttaccttcccacctcagcctcccaagtagttgggattacaggtgtataccacctggcccagctaattttttgtatttttagtagaaacgggattttgccatgttgcccaggccagtcttgaactccttagctcaagtgatcatcctgcctcgggttcccgaagtgctggggttataggtatgagccaccgtgcccagccaagacatttttaaaatgtgagaatacacaagcacacattccattagctgtcagtgggatattatcacatgtcatgtagctctggaaaacactatcatgcacttgtgagagaatcacggtgaaaaaggccaatgacatcatccttttatggaaatagttttgccctcatggacctcctgcaagggggtcttgagcacccctggaatcccttacccatctggagaatcatattagaagatcattatggcactggtgttgagaattgtttagaacctataaaaagaatcacatttatttttgcttttttgagacagggtcttgccatgtcatccacgctgtagtgcagtggaactatcgtggctcgctgtagtgcagtggcactatcatggctcactgtagccatgaactcttgggttcaagcaatcttcctgcctcagcttcctgagtagctgggactgcaggcatgagccactatgctgggctatttttttttttatttttaaattttttttgcagagataggatcttgccgtgttgtccaggctggtcttgaactcctagactcaagcaattctcctgccttgtctcccaaagtgctaggattacaggcatgggccactgtgtcaggccaagaaggacatttcatattgtgatccaatatgcgcactttaaacatcgcagaaaacaagactgtattatctcttgctgctttacaaattacttcaaaacttactggatttaaagaacatctggctggacacagtggctcatgcttgtaaccccagcactttgagagaccaaggcagatggatcgcctgatatcaggagtttgagaccagcctggccaatatggcgaaaccccatctctactaaaaatacagaaattagcagggcctggtggcacatgcctgtaatcccagctacttgggaggctgaggcaggagaatcgcttgaacctgggagacggaggttgcagtgagccaagattgtgctactgcactccagcttgggcaacagagtgagactccttctcaacaaaacaaaacaaaaagaaacaaacatctcagattttatgaagagtatgtattgggtgattctgactcagggtatctagtgaggttgcagtcaagatgttgactgctgagtttacactcatttcaattcttgactgggattggaggatctttgaagctatctcacgtggctgttggcaggagacctcagtttctgaatatgtgactctcttcacagggtagtttgaagtttgagtatcctcacgacatggcagctggattcctgagagagagtgatttgagagagtgacgaagacagaagccccagtgtcttttaagagttagtcatgaaagtacatcattggaagcaagtcattaagtccagtccacactcaaggagaggaaatttagtctccctcttgaagggaggagcattaaataatttatgaacatactttaaaactaccacaaataattgtcaggagaatgaatcttccatgagcttcttatttcttttgtttgagatggagtcctgctctttcacccaggcaggagtgcagtggcgcagtctgggctcactgcagcctccacctcccgggttcaagcgattcttctgcctcagcctcctgagtagctgggattacaggcacatggccaccatgcctggctaatttttgtatttttagtagagacggggtttcaccatgttggccaaactggtctcaaactcctgacctcaagtgatctgcctgtctcagcctcccaaagtgctggggttacaggcatgagccactgcatccagccgagactcttatttcatatacaccctgttgagtgtgccaggaatgcaagcaaggccttgactgttcctaggccaggccatttttcaggattgtgtttgcagcgggccactttgcgggaggaggtaatgtcttccattgggacaaagagcaggcctacttactacttactataaaagtggtggattccggccgggcgcggtggctcatgcctgtaatcccagcactttgggaggccgaggtgggcggtcaggagatcgagaccatcctggctaacatggtgaaaccccgtatctactaaaaatacaaaaaattagccgggcgtggtggcacgcacctgtagtcccagctactcgggaggctgaggcagaagaatggcatgaacccgggaggcggagcttgcagtgagcccagatcgcaccactgcactccagcctgggcgacagaacaagactccgtctcaaaaaaaaaaaaaaaaagtggtggattccctaagcccaatgttccttagctgtgatgcaaacccactgcctgtgtagcatccatctgagcccctccatgtcaccttatgggacttggggataacagggagacagtgcaaacatgttcatgcttgctgcgctgtgagtaataaaagttctttgtgtttgacccaggagactcatgtattctgtcagtatccatgaaatggtcataggctaatgtattaacctgtaagtagggttaaataaaatcctagttccttcacagttctcaacattacttatgtttactttagtgtgatacactgtgaaaataagctatacattttattttctgttctatttatctgtttattttagagatcctatctctattctcctatagataggatcttgctatgttgtccaggctggtcttgaattcctggactcaagcaatcctacttccttggtctcccaaagtgctgggattacaggcacaggctattgtgcctggccaagaagtacattttatattgtgatccagtatgcacatgtgcatgcatatgcacacctgaaacattgcagaaaacaatactgttatctcttgttgcattacaattacttcagaacttactggatttgaaaaacaaacatctcagatttcatgaagagtgtgttgggtgattctggctcagggtatgtagtgattttatttcatttaaaacaaacaagaaaacaagcttggttgcagcttatcaagctgatttcacaacctactattgggtcataattctaagtttgaaaaacactgactggggactgttaccgtttggctgtgtccccagcaatctcatcttgaattgtagttcccataatccctacatgttgtggagggacctggtggtagctgaatcgtggggtcggttaccccatgctgttctgatagtgagtgctcacgagatcgattttattttttcttttttgagacagagtcttgctctgtcacccaggcttgagtgcagtggcataatcttgggtcactgaaacctttgcctcctgggttcaagtgagcacgtctgggtaatatttgtatttttagtagagatagggtttcaccatgttggccaggctggtcttgaactcctgacctcaagtgatccactgaccttggcctcccaaagtgttgggattacaggcgttagccaccgcgcccagcctagatctgatggttttgtaaggggctcttccccctttgcttggcacttcttcctgccgccatgtgaagaaggatgtgtttgcttccccttctgccatgattgtaagcttcttgaggcctccccagccctgcagaactgtgagtcaattaaacctctttcttttataaattacccagtcttatgggtagttctacatagagcttgagaatggactaatacaggactctgaggctagaggcaggcagtcaggttagaaagttgttttaattcaggtaggataggatggcataaaccaaggtaataattgtgggaatggaggaagaggatcaatttaagaggtacctagaaatcaaagcaacaggaattgtattgttttgataatatgtgtgtatatggagtatgaagattttgggaggactctcaggctctggcttgagcagctgatgttattcatgtgaatagatgttgtccactaccatgttctttttttgattttttttttttcccctgcagcagcaggtttggttttggaatggggagaccttgatacggagttcagtttgggggcatggtgtatttgaggtgcatgtgaggagtataagtgaagatgtccagaagtgggatacatagttttgattctcaaaggagaagtaaaaaagtactggagaagtagtgaatttggagtctttgttgtacatatgttattttaagctggtggaggcagggagaaaggatttcttaaggatgatattgtagtgtgagaataacatagggatgaagatcagaaacatttaagggaggaacgaacaaagaaggaggagggttagaagaaaagagcatatgatataaagaaaccaagagaggagagtgtcaaaaaattgggagtgcttaagaaacaagatgtattatagacagaagttaaaaaggcattagagaggaaaagtgttcattaactaaggtttctctggagaagccagagggaatggggactaaagtaccctgtggaaggattagctgtagcccacttccatcagaatagaggaagttaaggatggttgttgctgtcaatgaacatgtggagagagaaagttgagatagttcctgtttgatttctttgtttctctcttatgtaggagatgagatacgtaaatttgatagggctgctgtaagaaagtaccatcagctgggcacggtggctcacgcctgtaatcccagtactttgggaggctgaggcaggcgaatccgttgggcccaggagttcgagaccagactgggcaacatggtgaaaccccacctctaccaaaaatacaaaaattagctgggtgtgctgatgctcgcctgtagtctcagctactcgggtggctgaggtgggagaagtgcttgagcctgggaggttgaggccacggtgagctgtgattgtaccactgcactccagcctgggtgacagaggagaccttgtctcaacaaacaaaaacacaaaacatctcccgcctctccaccccgctccccccacaggtttgaaaccacctgcctgttatttcaaaccacctgtgtgttcacatttttgaggacttttaacctgtttgaccagaatagatactgtctttagaatctcatttttgacaatatgatttacttggtactgttttcaatgaagaaacacttataagaatcaatttacataacaatggattttgggaaaatattgtttaatatgctgaagcctgttgttacttgacctaagccaatgctttgaaatgatgctaggaaatcagagagatctagtttagatctatattgtctttgaaagaagtctataaagttgatagctatagtttagtgggttctgcatccacagctcaaaccacctgtggaccaaaaatatttgggaaagaatcttaaagtcaccttgaaaaaaaaagtggaaaaaaaaaaaaaaagaaaatacttgggaaaaaataatacaacatggaaaaataatacaaataaaaaacacaataagtataacaacgatttacatagcatctacattttattaagtattataagtaatttagagatgatttaaagtatgctggaggatatccataggttttatgcaattactgtgtcattttgaatcagggacttgagcatcctgggatttttgttgtctggggcagtcttggatatctggatacgttctactggagccagtccccagcagataccaagggacaactgcctgtggttttaaaatttgttttagttatacttgtagagtatgaacatgttttcttttttgaaaaaaaaattcaggtgctttatggtagtttgagtgtaaagctttctaagttgagctaaagcctccacaaacatttttcccctttataacacaagtttccttccctctaattatcgctgtttcaaaattggcatttcccgtgtaggaattctttacatactctgtttacagatcattatacttatgttcactgtatttttcacctagcttttggtttatcttttaattttatttacagcattttttggtataatactttgtcattttgacataattaagtgtgttggttgtttttctttatggtttttgcttctggttttttatttaagaagccttttcctaactcaagttcacaaggatattcttcaaaattttcttctagtacttttaatggcttaaaaaatttatatctttaatgtatatggaatttattttggtgtactatgtgaagacgagtatacgttatgtttctcaaagagcaacaagtatttaaacttcatttattgagtgatttttcatttcctcactgtattagtctgttctcatgttgctaatacagacatacccgagactaggtaatttaaaaaggaaagtttttttttttttttttttttgagacggagtctcgctcttgtcacccaggctggagtgcagtggcgcgatctcggctcactgcaatgtctgccgcctgggttcaagcttcttatgcctcagcctcctgagtggctgggattacaggcacctgccaccatgcttggttaatttttgtacttttagtgagattgggttttgccgtgttggtcaggctggtctcgaactcttgatgtcaggtgatccacccgccttggtctcccaaattgctggaattacagatgtaagccactgcaccctgccaggaaagaggtttaatggactctcagttccacatggctggggagacctcacaatcatggcagaaggcgaatgaggagcaaaattatgtcttacatggcgacaggcaagagaacttgtgcaggggaactccaatttataaaactatcagatcccatgagacgcactcactaccaccagaacagtagaggggaaactgcgcccatgattcagttaagtacacctggccccacccttgatacatgaagatgattgcaattcaaggtgagatttgagtggggacacagccaaaccatatcactcactgtttggaaacgttacttttaacatatattaaattcccatatataatttagaccctgttcttgggctagtactatacagttttcgttattatagttttacaaggctacaatactttgtaagaaaccttgcaggtcagatgtggttttgttgtcaggaattttttccagtaatacttagtggacattatgtagtatccagtaatcacacacattgttttcttaatgaaatatatgaagtcacactatgtgggatacatataaacagtaagtaagctcagatcaggtcaaggtttgctgctagatgagttaaaaggaaaatcttattttcagaggtttttggatttttgcagtacaaatgaagaattatggatttgtaatttatgttgctgttgagggctgtcttccttccttgttcatctattttaaattgtttggttactcttgtatctttactctccatttgaattttagagtcagcttgttgagttacttgaaaaatccttcaacacctgtgaaaggaagggatctatagctggttagcaaaatcctgtagagatttttcactgggattgtgctaagtagttggggaagaactaaatcttagcagtgtttgtcttctcatccatgaacacagataactttgtttaggtgttctttcatgtctttcagtaaaatgttatagtttttttcccccaaaattcttgcacatttctgttgatttacatcaaagtacttttatggttttgttgctgttgtgaatgggatttaaaatttcctttaaattaaaaactgcattttctagttgttactactgatgtatacattgatacttatatattgatattgagtttgaccagtttgttgagttctgttattctaataacttgtcagttgattatcttgggttttcagttagcaagtcagatattcagacattgagtttaatcttttccttgtcaatctttatacttcttgtttttttttctttttcttttttgtagacagggtcttgctatgtatcccaggttggtcttgaactcctggcctcaagcgatcttcctaccttggcctcccagagcgctgggattataggcatgagccattgcacttggcactttttttgtttgttttccagttgcatggtatgttttcagcgttcagttttgagacatctaaaatatctctaaaatattgtttactatgagtacattatgctgtaatcacattctgaatgcgtgagtacatacatggtagaagggctagatcttctttaagtgggggtaatggaaagtctctgagaagggaaatatttattattggaggatttaatgtgtgatcttttcattacagatatggtgtaagatacttcttcaagattggacagctggggaccttcttctgattaaccttaaaccaacttgtagccatagagacacctcacaaggttcccatttttgttgttgttgttgttgattttctgctcacacctttcctgaccttgcaaccatgtatggaagtgcccgctctgttgggaaggtggagccgagcagccagagccctgggcgttcacccaggcttccacgttcccctcgcttgggtcaccgtcgaaccaacagtacgggagggagttcgggaagcagtgttggaggtggcagtgggaaaaccctttcaatggaaaatatacaatctttaaatgctgcctatgccacctctggccctatgtatctaagtgaccatgaaaatgtgggttcagaaacacctaaaagcaccatgacacttggccgttctgggggacgtctgccttacggtgttcggatgactgctatgggtagtagccccaatatagctagcagtggggttgctagtgacaccatagcatttggagagcatcacctccctcctgtgagtatggcatccactgtacctcactcccttcgtcaggcgagagataacacaatcatggatctgcagacacagctgaaggaagtattaagagaaaatgatctcttgcggaaggatgtggaagtaaaggagagcaaattgagttcttcaatgaatagcatcaagaccttctggagcccagagctgaagaaggaacgagccctgagaaaagatgaagcttccaaaatcaccatttggaaggaacagtacagagttgtacaggaggaaaaccaggtaagttctacgtgtgtttacctttattggctgaattcatgtatataaatgaaatagcctttttttcccctttcctagatttttcccttcgtagtatatgtatcttcctttttcctattgattttactgttttgtgtcctccatttctcagccctttccaaatttggtcctgtaccctgttttcttctagctgcccatgtctccttgctcccattcttgcttggttcttttctctggtttctctttctcttcgtgtctttcctttcagcatatgttatctttttttttttttttcaattcttctgagagtataattttgccacactctctaatatctattaccaaatgtattttagagtaggtaacttaaatgtaaggtataccattaagatttgtcataatgtcaaaaagtcattcttaaaaacaaaacaaaatgactatcacaggataaatcagtgttgtcagctgagaacagaaattacttttaaaaagttaatgttggccgggtgcaatggctcacacctgtaatcccagcacttgggaggccgaggtgggcggatcattgaggtcaggagttcgagaccagcctggcgacgtggtgaaaccctgactctactaaaaatacaaaaattagccaggtgtgatggcgtgtgcctgtaatcccagcttctaaggaggctgaggcaggagaatcacgtaaacctgggaggcggaggttgcagtgagctgagatcccgccactgcactccagtctggagtgagactctgtctcaaaaaagaaaaaaaagttaatgttgatgatgtatttattaagtacaaacaataagtacctgttctttttgttgccattcatggaagtttaacttcaggatgcttttgtagcttttcgttctgtaattctttacatttaaggtggaggaaaggcaacttggtgtgattgtttacttgtagaaaataaatgagatgactgggcattataattatgggctttgcaatttgagagctaagtgctgtcacattagctacaggaaatattcacttatttttctgtgctcctccaggttatagttgatgtttgatgatagccatgccacattcagtgaggaagctgatgactccaaagatgtgaacaaatcatattcaggctctactagttaaaatgttaaacatactttttttttttttttttttttgagacggagtcttgctctgtctcccaggctgaagtacagtgacgcaatctcagttcgctgcaacctccacctcccaggttcaagtgattctcctgtctcagcctcctgagtagctgggattacaggtgcccgccaccacgcctggctaatatttgtatttttagtagagacggggtttcaccgtgttggccaggctggtctcaaactcctgacctcaggtggtccacctgccttggcctcccgaagtgctgggattataggcgcgagccaccgccaggcccatactttttgtttaaaagacttttagaatttttctcttttcacatttttttcccccatggcccaagttgtctgtacttttagaagttttcttaaacttgcaagcttgagtttttttcctccttaaaaaagctgtcttatactcttaaaggagaatatgtaattagctacctcattgttggtattacactttatttttggattaggttaataaaaattataaagaaagcaactgatatcaatttctgcagtgttcttaaatgatactaagaagtaaagaagcaatcagaaatgatctgtgtctctgatgaagaagtcatctgccacacaaagatgtttaggtcaatgatggacctcatgtatcactgtggtcccataagattacaatatagtgttagccaggtgtggtagctcgcacctgtactcccagcactttgtgaggctgagagggtgcggattggttaaggccaggagtttgagactagcctgggcaaaatggtgaaaccctgtctttgcaaaaaaatagaaaaaaaattagcagggttttgtgatggacgcctgtactacttgggagactgaggcaggaggatcacctgagcctgggaggtcgaggccacagtcagccgagattgggccactgtactccagcctgggtgagagtgagaccctgtctctaaaaacaaaacaaaaaacaaagattataatacagtgttttcactgtatcttttctatgcttagatgtgtttagatacacagatatttaccattgtgttacagttgcctacagtattcaatacagtaacatgctgtacaggtttgtagcctagaagcagtaggctatatcctatatcctaggtgtgtggtaggccgtaccaggtggatttgtataagtccacttgatgatctttgcacagtgatgaaatcgcctttctcagaacatatctctgtcattaagcaacatatgactgtaaatctaatttaagatttcggttgattgtcttaccattcttactattatgcagtccagatattcagatctactgttttggctacttgaagatctctagttacattacattttgtatgttaaagctccagacacattttcagctataaaaatagctcaatttttctgttcataaatataaaacagaaaagcatagatatgaaagcaaaatatattccagatcctcccatctactgacaactttgctattccactgttaacattttgacatttctctttactgaaatatctctatgcatatacacgtaacggatttacctgaatggaatactgttggtattatgctgtgaccttcttttagctaacaacatttctactgtatattagaggcctctaatatatatctaaatcgttatttttaatgcctcctaccattctattgtatctattctagttaatatcacagggccaaaattcttcagatttacttggtagtacaacgcaaattaaaaaccttgaattcatttgaatcagatttctaagtaattagaaattatgataattttattctttctcagatacattataacttcaaactactttgcttttactttttaatcaattattaagttgtcactactcaaaatttgaatgttttaatatacttaaatctctttcttagagacttagcttctttaaagaagagaaattgtcctttaaaaaatattccttagaaagttctttgagtttgagtcattaagactttaagaatgtgtaaagaaagaaaaaaagctaaaatagaccccactgatggggtctaaaattaaggacagggttcttaaatgctggctcagaaacatcagcatcaacaggcatatttggttaaaacatagattgccaggcctcccttcataccagctaagtacaatctctggagatggggtccaggaacttatgtttcgaacaagcttctctggtggttctgatgagaaaccactcttgggatctttagaatttagtaaatctaatctaattcttttttttttttttttgagatggagtctcgctctgtagcccaggctggagtgcagcgatgcgatcttggctcactgcaacctctgcctcctgggtcctggttcaagcagttctcctgcctcagcctccttagtagctgggattacaggtgccccccaccacacctggctaatttttgtattttagtaaagatgaggtttcaccatgttggccaggctggtcttgaactcctgacctcgtgatccgcctgccttggcctcccaaagtgctgggattataggcaggagccactgcgccgggtgtaaatctaagtcttaaacttgtctgttgcctgtttgtcaatttgtgatggttctgttgtggcacttttgagctcaaccatgaaaggaaaagaaacaagggaccatttgctcagtgtgtctcatcctttattctaccactttatatctcagggatgtgacctactcttgttcgtaatgatcattaactgtgacagggaccctcagtggatggggcatgtgtaggggaaaagggtgtttaaaattttagatatgtttagttacaaagagccctccaggtgattttgatgtctcttcaccttgtgaatcattgatgcaccagataaatgttcaaatgatatatgacagcagagcagagaagtacattttcttcagttgacatttttgagttgtcagtacaatactgactttagtttttaatttgcattgcactaccaagtaaattagttgaatttgtcagttgaagtacaacaccaaaaagaataattcctaaatataaaatgatagtacattctcaggtttttttttttaattgttgttgttttgagacagagcctctctatgtcacccaggctggagtgcagtggcgtaaccttggctcactgcaacctccatctccagggttcaagtgactctcctgtctcagcctctggagtagctgggattacaggtgtgtgccaccatgcctggctaattttttttttttttgaaacaagagtctcgctctgttgctcaggctggagtgtggtggcgtgatctcggctcactgcaagctccacctcccgggttaatgccattctcctgcctcagcctcctgagtagctgggactacaggcgcctgccaccacgcccagctaattttttgtattttcagtagagatggagtttcactgtgttagccaggatggtctcaatttcctgacctcatgatccgcccacctcagcctcccaaagtgctgggattataggtatgagccaccgtgcctggccaattttttgtatttttagtagagacgagtttcaccacattgaccagactggtcttgaactctcaacctcaggtaatccacctgccttggcctcccaaagtgttgggatcacaggcatgagccaccgcacccagcctttttttttttttgagctggagtctcagtgttgcccaggctggagcgcaatggcacaatctcggcttactggaagctctgcctcccgggttcaagcgattcttctgcctcaccctcccgagtggccaggattacaggcgtgtgccaccatgcccggctaatttttgtatttttttttttgagacggagtcttgctctgtcgccagctggagtgcagtgacacgatctcagctcactgcaacctccgcctcctgagttcaagcgattcccctgcctcagcctcccaagtagctgggatttcaggcatgtgccaccacgcctggctaattttttgtattttagtagagacgggattttgccattttggccaggctggtctcgaactcctgacctcaggtgatctgcccgcctcaacctcccaaagtgttgggattacaggcatgagtcaccatgcccagcttaaattctgtttttatagtttggtattgaattgtaaatatcaggagaaaaaaatgagtttgctttctttagttttgtggttaagtatcaatataacctaggtcttggaaactgtatctgtatttttaggggttgtattgggttctttttctttttcttggtaaaaatgagattggtaaatttggagtatgtaatggtgtatactagtgcccaaatatgagattctttatatgtatttagataattatcatagtgtatcatatttgaatattatacaatttcaaatgtattgttaataaaaaatcacagtttgatttaattgaaaagtggctgagacataattttttattataagaaatattgtgagctgggtatggtaatatatgcatgtagtcttagctactcaggaggctgaggcaggagaatccctcgagtccaggagtttgagtccagcctgggcaacatagtgagaccttgtctcttaaaaataaataaaaaaataaataaaaatttaaaataattaagaaatattgtggaaaaattgcatgtgaataaacacttctttttaaaggctctacttttcaagaatggattgacagtatatgtgtgtgtcagattatacgtgtgtgtgtgtatcaaatttagagtagatttgaagttactggatttatcaccattatacctggaattagctagtcaccgttataccttgttgatgatgctgaaactatgcccctcactaagatagtttttattatgaagtgactcagaaatgtcaattttaatgaaaaaagttattggcgtacttgttcattttggaataattgaagcaattgtttatgcctgtacttcagaagctgtgtggaaaatacgtaatatcctttctaagtatcagtctgcattcaaagacaaaatatttgaatcttctgaatacttcagttccagtgaaacagtccacaggattttcatgccaaaaaacccatatgtgctgaagaatggtgaacaccgccttatctagattccaccccttgccctaattaaacaccagtgctggcagcgatgcattctccgtatacccactgtaattactacacaatcctaaaattgtataactttggtccaaaaaacgaagggtgcaattttaaagtaaagtgaaacactgcaatgagatacagagacagagaatgctaattaatagattatagtcagccagcagtggggcctaattaaactctgcattcattataccctccatagccctcagaggtcaggcatcttccacttgataaagaagattggtttaataggatttacagtaattaaatggtttccccatttcagtttgagactggggatttaggtccattctaaatattggatctgattggaccatagagatcttgttctaggatcctattagatgtaaagacgcatttgcttagaattacttgatatgtgtggttctttattatggagttcttttagaagatgtttctgatataaatactcagcaatttttatgtctcatccttttgttactgaactttcaaatactgctggttggagagttagaatagtatgtaacagggaaggctttttctttttcttttttaaaattgggagtcaggaaggtttttggtgtatgtttgacaaagaatgaaaatctagctgtgagcttggtggaactgcagagctactaagactttggatggggccgggctcagtggctcatgcctataatcccagcactttgggaggctgaggtgggcggatcacgaggtcaggagatcgagaccatcctggctaacacggtgaaaccccgtctctactaaaaatacaaaaaattagctgagtgtggtggcgggcacctgtagtcccagctactcgggaggctgaggcaggagaatggcgtgaacccgagaggcggagcttgcagtgagctgagatcgcaccactgcactccagcctgggagacagagcatgactccgtctcagaaaaaaaaaaatactttggatgattttttttttaaattctaaacagcatttaaccagattatcatcatactttttaaattatgccttgaaataattctgtatgttaaatttagttggaagcttattttaaaaatgtttatttaaagcactgtcattgaaatatttcatgaacaaaatactgtttaatattataggacggcaggtgaatttaatgttttttgccttgtgtgttgtgtttcttctctttttggagtctgatttttatgttgctcatttacttaggaatcgagaatttctagttcagaactgcaaaaagataaccttgtgtaattctttgtcatttttttttctcattatttggagacttttgactattaacatttatataattttaggttgtatcttgatttgccgcatgataaaagccattattatttgccattaaataaactttttttttttttttttgagacagagttttgctcttgttgcccagcctggagtgcaatggtgcgatctcggctcagtgcagcctccacctcccaggttcaagtgattctcctgcctcagcctcctgagtagctggaactgcaggtgcacgccaccacgcccggctaattttttgtatttttagtagagatggtgtttcgccatgttgggcaggctggtctcaaactcctggcctcaggtgatctgtcaacctcggcctcccaaagtgttgggattacaggtgtgagccactgctcctggccttaaataaactttgtcatgaggttgctagttgtttcactgtcatttaaagtctgatcttaaaatttgggatctatgtcttagattattgttttaattttctttttgataattctgttttaacaaggagatgtagataaattggtatccttgtttattgcccagataagtttaatcttttttgttgtttcagaaggggaatgtgttaaaggcactatgcagagtgccatgagaaaatgaaatcaaatgtaaaatggataatgttccttttggggagttaacaatcatttcgagaagcaaaatttgtacatgtatggcttacagaaatttgaactatgcatttatcaggtcttgatcataggtgaaggtatttaaatcagtgtgggaaatttgcttcttttacagttggtaagtttgcttatctggaatgtagtgaagtatgaaaaataattaagcagagctaataaaaatgttgcacaaatatgagatagggcttatatgaagaaataagggcagagtttgccagataattgcagtttctctctcactttttattttcctctgtctttttggatctcatagtgcagtgtagtgtgtgatctcatctcagtgaaataaaattgtttttagagatttgctaatttacagcaaatttgcagatagcatcttaaatataatttgggggtcctctttattgtgcaaaagaaatcagaaaatgggtttagtttttagttacattaatgttaatcagtggaggtcatagtttcattttttaacatttaaaaccgtaccaccctctggaacttgccatctgttatgagtgcactgttatgcccagaagagtataggaggtgcttagaaaccatactttataagaaatggctgaaggaactcaagaagagaagacttgcaacattttaattatactcttaagtatttggtggacagccatgttgaaggagatttttccttttttctttctttgttagtattgtttttggagaacaaacactggaaaaatgagcacaaatattaaggttttaaattttggctgcaaggaggaatggatttttgaaaaaagctatatccggccgggcgcagtggctcacgtttgtaagcccagcactttgggaggccgaggcgggcagatcatgaggtcaggagatccagagcatcctggctaacatggtgaaaccctgtctctactaaaaatgcaaaaaattagctgggcttggtggcgggcacctatagtcccagctactcgggaggctgaggcaggagaatagcgtgaacccgggaggcggctcttgcagtgagcccgagattgcgccactgcactccagcctgggcgacagagcaagactccgtctcaaaaaaaaaaaaagaaaaagaaaaaaactatttccatttgatgaaagaacagtttcacaaagtaatgcttcatcatcactagaagtggtcactgggaggtcagattgccttctgacagctgcgtgggtgccctaagtcattgaactcttcacaacgcccaagggggtatggcatcaagtggtactttgtggagaaacatttagggagtttaccccatcctcccaggtccttttgtcctttttctccctccccatctcctttccttcttttatgacaattttgttgagatataattgaattcaccctttaaagtatagttttttctttttttttttgagacggagtctcgctctgttgcccaggctggagtgcagtggtgggatctcggctcactgcaacctccgcctcccaggttcaagcagttctctgcctcagcctcccaagcagctgggattacaggcacacgccaccatgccctgctaatttttgtatttttagtagagacagggtttcaccatcttggccagactggtcttgaattcctgacctggtgatctacctgcttcggcctcccaaagtgctaagattacaggcgtgagccactgtgcccagccttttctttcttaatctgatttactcaatgaagattttgaagaaagtaatagtaagttgccctagggagttcttgaacgagggcataaatgatgtaataaaaaatactgttcaggagcagcttttactgctgtcagcagagtggattgaagaaaaggtggggaaaggaaatgagtttcttgtagaagacctggattaaacagggtaataggaatggagaagaaggtgcacatccatgagattttcaaagaaatatttggatataggcagggaacgatggctcgtgcctgtagtcccagcactttgggaggccaaggtgggcaggttacttgagcccaggagttcaagaccagcctcggcaaaatagtgagaccccatctcttaaaaaacaaaattagggccaggcacggtggctcacgcctgtaatcccagcactttgggaggccgaggctggcggatcacgaggtcaggagatcgagaccatcctggctaacatggtgaaaccctgtctctactaaaaatacaaaaaaattagctgggcgtggtggtgggcgcctgtagtcccagctactcgggaggctgaggcaggagaatggcgtgaacccgggaggcggagtttgcagtcagccgaaatcgcaccactgcactccagccctgggtgacagagcgagacgttgtctcaaaaaaaaaaaaaaataaaaataaataaataaataaataaaaaattagctggcatggtggtatgtgcctgtagccccagctacttgggaggctagggcaggaggatagtttgaccgcaggaggtggaagctgcagtgagctgtgagtgcactactgcacttccacctgggtgacagagcaagagtctgtcaaaaaaaaaaagaaagaaaagaaatatttggatatagacggcaagagagaagaatacagtgaaccatggtattgagattggggaactcttttccctacgattaacaacggaaatggattagaaagtggaactaaatttagagtaaggaatgatgaatttggttttaattatttgaataaaagtttttcataagaatttggagataagagactaatgactgtgacctcaggtacatgcatatagatgttataaaggtgtgcttgttaatgttggggaactcacttttctagttaattcagtatcagctacatgcctctgcttatgggagtaagaagtggagagggagaagccattagaagatacagttttatatatatgttctcatccagctcgatttgtgttttggttctctgtctttattgtggtatttttgtttgacagcagataccttgagtgattctctcaattcctgaaagttattatttattaaagttaatactgatttatgatttttttacaaacttctactattagatgtcccttattttgttttagttaacaacaagtttattggagatcatgtacctacctctgttgtgataaattaggagtgactttgggaaaaagagaaatattacaaaaaatgtgctttcagtgaggaaatgataaattttgtttttgaaaatgttcttttcttcccttatggacaagattagaaatgcttttatgaactgtttttgtgctaccatacacatttctaaaaatactcatttttctttttctttttttcttttttctttttttttttttttgagacggagtctcgctctgtcaaccaggctggagtgcagtggcgcaatactccgcctcccgagttcatgtcattctcctgcctcagcctcccgagtagctgagactacaggcacccaccaccatgcccggctaattttttgtatttttagtggagacgggatttcaccgtgttagccgggatggtctccatctcctgacctcgtgatccgcccacctaggcctcccaaagtgctgggtttacaggcgtgagccaccgtgcccggcctaaaaatactcatttttctttccagatttggaaagttagtctttaacgtagatcttttcctttgatttttccatatattaacaatacttactgaaccctttccccctttattttgccagtcttttctacgtaataggctttccttcctaatactggattgcagtgacacttgcttaatttcatatgtggtgactgtataggccgagaaagtgagatagttcagccttaatgtacacagtgtaccatctcttaccggtggctggtagcttatgtactttcagagaatgtggtatgcaaagatctgtgtagctttgaagtcatcctgagataactgctctgatcttaaatgatcctcagatacttgaagagtcctctgtagcagtaattcttaaacttgttggccacaggacctctgtatattgtaaaaattattaaggaccccaagcagcttttgtttatgtaggttatatctaccaatatttgtcatattagatactaaaataaaaaaataatatttattagtacatttagaaacaataaacctaataaatgttatcataagtaacgttttaaaatgaaaaacagttttgcaagtctctctttctttttttttttttttgagacagagcctttgcactgtttcctagactggagtgcagtggcatgatcttggctcactgcagcctccgcctcccgggttcaagtgattctcctgcctcagcctcccaagtaggtgggactacaggcatctgccaccatgcctggctacttttgtatttttagtagagacagggttttgccatgttggccaggctggtctggaactcctgacctcaggtgatccacctgcctcagcctcccaaagtgctgggattacaggcgtgagccaccgtacccagcctagttttgcatgtctctctaaggaaaggaggactacaaatctaaaggccttatgtgggtcttctgcctcttgtaagaggctgccactagagtgctcactaggtcactctttagctgagatctctgttacttgttcagtattgtaataaaatattatgacctgtgacatcaacatggattaacaagtatctggcttcttggtcaagggttaggaagttacactgttctttagtaacagtgagcaatgggaaaatgctgtgagtaatggtgaggaatggtaactttgttgatttgttgttgatagcatgtatttcttgacccttagagaggttctttgggtgggctgtcttaaggaagcccttatattgtagttggctaaccaacaggcccgcgccatcacacccagctaatttttgtatttttagtagagacggggtgttgccatggtggccaggctggtctcaatctccagacctcagatgatccacccgccttggcctcccaaagtgctggcattacaggtgtgagccactgcatctggcctaccagtactagagtctggctctgttgcccaggctggagtgtgcagtggtgtgatctccgctcattgcacgctccgcttcccaggttcacgccattctcctgcctcagcctcccgagtagctgggactacaggcacctaccaccgcgcccagctatttttttgtatttttagtagagacggggtttcaccgtgttagctaggatggtcttaacctccagacctggtgatctgcccgcctcagcttcccgaagtgctgggattacagatgtgagccattgcgcccggcctgttttttttttttttttttctttttttgaaatggagtttagctctgttgcccagatggagtgcagtgacacgatcttggctcactgtaacctccacctcccgggttcaaccggttctcttgcttcagcctccagagtagctgggattacaggcacctgccactatgctcacctaattttggaatttttagtagagacagggtttcactatgccaggtctcaaactcctgaacccaagtgatccacccaccttggcctcccaaagtgctgggattacaggtgtgagccaccgcactcggcctagtatttttaatttttttttttttaaacccagttgcattgtatttatgtgataaacctacagcatttgttgtatttcaaagaagcatttttgggaactaagtttgttttataggacttaaaatttgaaaaattgggagaatacattcaaaaaatgttcttttgattatctttcatggatttgatagcctgcataataagtaatttcttcttttcacatgactcctcttcctgggcataggaacttaaagtaggtactacattcttaggagagaagcatattgtaatgagtgtttccagtctttcctgtcttgtaattttacgagggtctatttcttatttttctatgaaaacatgttatctatggtacagagtatcttctttttctttctttttcttttcttttcttttcttttttttttttttagacagagccttgctctctcgcccaggctggagtgcagtggcgcgatcttggctgattgcaacctttgcctcccgggtctaagcgattctcctacctcagtctcccaagtagcagggactacagacgcctgctaccacgcctggctaatttttgtattttttagtagagacagggtttcaccatattggtcaggctggtctcgaactcctgaccttgtgatctgcctgccttggcctcccaaagtgctgagattacaggcatgagccactgcgcccggcctgtacagagtattttcaagagatgaagcaggtaaaaggttatttacttaaatggtagcagataaatttttggatttctcttggtatttctgatgaaagatacttattttaaagggatagtgtattgggtctcaattgttggaaagttgtgggaacactggctgttagaataactgggggcagaaggtgtttctaggatttagggtggagaggtcttaaagttaccacattcccctcactgcttaggacaggtctgcatactgaaaagctttccctcataccatatgattttcatatgtcttgctaggaatttgataggtgaaaaaaatctgcttatagtcatttgagccaagatcctataactaaataaatgtgtgtaagtgcattagcattgtttgactgaggacgaagttgatagaagattatacttcgttttgtttgtaactttacctagaacttttgccattttggaaaagcacttcaacagcaacattgcattgttgctaatgctactgtctctttagcttctgtttgcatagtcttttggtgtagttgtgccctggcatttacatgttaacatacatactattttattataaattctttcttttcatttttccttcatacagcattatataatttttttttgaaaccgtatgtgggagtgggcttattatctgtgcatttcaggatagtgaagggcatatttacaaaatgtttgttataaaatgggagagtattaagtctgataagcctgaaattcactggtgtcatagatggaacactgaatcaggagagctgcattctagttctgatcctggctttgccaggtgtgtagccatggcagtatttaagcgttttgaatgccagtttcctcatctttaaaacccatagagttggactaggtgatctttagagtctttcttctgaaattacttgattttgtttttgtcagttatcctagtggaattctctaagagtctgttcactttgatcataatgcccaaattcaaaactgattcatatgaccaagttgagtgcttctgggaaggagaaatacatgactaatgaagttcttttcaaggtaggtgggagaaaatcagtgtttacatctaaagggcaaagagccttcatgtgaatttcatcagttgacaaatggggatcataatacttgtattgttgttggaatatttaagtgagattaaagaagataatatttataaattatggacaagactacctgacataataggtatgcagataaaagttgaattaaaattaagtcaaacatttcttaaatacaaatacattttataatatattttgaagtatgaaatatacctttcatgatctgctaccagaggcaaacagtagcatgggacctataaaatttttttagaaagtgggtcacagtggataataagtttcatttggataactaatcactaccagcccagccttaatattcctgtaggagttatcaggaactttgagtagagtaattagctctcaggattttcagttacagtcatattcattatttaacatttttatttccacaatgactcatccatgaattatggagtgctttcccaaaaggaatgtagtattgctggaaatgaattttttattgctctattttctttctttggtaaggggttccttgttggttagttgggcccaaaactctccacaaataatttaaaatacgtgcttttgtatgaagatgacttaacaaggcagtggagatttctcttgaatgggcaacatagaatgcttaaattttcttattctgcttattttaaattattaatttttgtactgtggtcctgtactgtgctttttaaattcttacatgataagtgtatgtcactaaaaggtatactttgctcacaatttccctattatttactccactgacattaaaattgtagcattacatctgaggttccctttggtttttatgtatcatttgctgttgtatcctttaaaaaatagtgtaatagatttgtcagtgaaaatgatgtcttactgtgatgctgttatcaaaggcatctctgagtacctatgatagagaactagtgaaggggttaatatctattgtagatatagatgctaatatatctagactcttatagatgctagtaattattatagaacatttatagataccatcctagatgctttcatatacattgcttctaatccttactaacagttctgtaggtaagcaatgttgtcctcatttataggtgaggaaattgaaaattaagagaggaatttgttcaggtttcacatctagcaagtgacagatattggtccgtctggctacaaagccaaatgtcattgtgtttttgactaaggacaaatgaatgaagtgtacatactagtttaaaatatttattgaaaaattaatattcagtcatttattaaatgtaaaagatggcattaaaattcctctgtgttttgttggaggaggaaatacaagaataggtgtatcataggatccaaaggctcctgagaaggggttaacattgagagaaggggtagagaaaagagataataggtgatcagttgagaagatgataaatataatttgattactttaaataatcagtcaacatcagcaggtgtaaatgacatacatcagtacttttcttgttttgattaggcaggaagcagtagagtaatgattcccagacttgcattttgcacactagcaaaataaaatataaataacagaaaaaaagtgggggagactggcataggattgtcaaataaaaacaattaaaaagtgatacatgactacatagtattactgttgttttataaggggaaggtcaatctaacaccaaaggaattgtgcatcattccacaataagagacagttctttcaagaaaatacagattttaactttgtagtgacagttttattaaggcaacttggtcatggactggctttgagaaacattagtttataatagggaacaccacattatagccaaatccttcctacaggagttgtacatcctataagcaaagaatggcttttacatttttaaatgattaaaaaattaatatattgtgatatgtgaaaattatatgaaattcaaaattcagtgtgcataaataaagttttattgggacacagctatgtttatttttgtattatatatggctgctttcacaccagtggtagatagagtagttgtgatagagtctatatgacttactagacctgaaatacagtgtctactctctggccttttacaaagtttttcaatactttgtttggataacagagtaaataataatagctaacacttgtgtagtgtttactaagaaacaggccctgttttatgtgctctatgttattaaccatcataacaattttatgaggtaggtactgtttattgaagtggaaactgaggctgagagtaagttgcccaaggtcacatggctgttaggtggcagaggcagccttctgcctagatggtgccactccacggtacatgcttcatcactgcacttggctagcagagaaggaaatcagagacttcaggatgtgacgcacccttcacatttgccgtagttgttttaggaaaagaggaaagtagccttattctatagttgcctgaagtgttatcactgagtagttgaatgaagaattcagcattaattacttcatgatgcatgaacatttggtgtatttttatgtgacccagtggattttccccagaggtctgttgattgaaatgtcctacttattgatgtcctacttattgaacttttgaacaaataaatctgttatttctgaactattgagttcatttttggtataattagaataataaattacactattaacttggtggagggtaactgtttctctatcataaatatttatcgtgttgttcttaaggagcataaggcataagccccccgtcattgatttaatttaaaaataaaacatttattgacacatacagaaatattttaattaaaaattgttaaatggcttttttaatgtctatatatattctaccccccaccccccaaaaaaagccattgtatgccaaagcccgaaagaagaattacattaccagtagttggatttttggctgaatctattcaaggggaaatcactattttcgttttagagatggctttgggtggaggaggtaaggtttcaagaactggttgaatgaaagaatattgacaagtaagtgaataaactagaattagtgtgaccacttctgatttctcaaataatgtgtttacaaacagtgttcctacattgtaatggcagtataaaatgctgatttaaataaatagaagtttagtggctacactttttcttagttaaacctcactatattctggatttaaaaatgacagtaactaatgttagttttgtgctcctctgaaggttagaaacctgttatatgtgtctaaaacgggttttaatgggtttaagaccacagagaagataggactgacactttagtaagattctttttttcaatctatttaattgttctatgattttaccttattcaaggtgatggagggtgaattagggtgggtaaagggtagggggaattgagacagtggttaaggttgatttttgacttgtagttcgctttcatctttaaattgtggaagtcgccttcctttgttcattttgaagttttgggcaaaatgttctcaggctagatgcaggtaatgcaggtaacagcggccagcacttcccatactagagggcgttgactttctcaaagtgttgactcgtttgtgatgtttttgcatttgtttggtttctgtttgctgctatgttgttgctcttcccagtatgggatagggttatggtattagtagaattacagtgttagtggtttttcttcctcttcccattccatccataaccttgacactcataattttgaaacctatcgttcattacaagggttaaaatctaaaatgtgactgtgcaggttgagatggcatgttacagctcctgccacctctttttcttgtgacagatggcttcccctcctggttgtaatccactgctgatttttttcaaagagcgaataccatgtgttccccattttggctctggttgtgttctgcccactcattggcttcagaggatcttgaaacaggaggtacttgctgctggcatttatggcaggaagtggatacaattgcgatactttgtgccaagtgttcatttattagaaaaattgtgcttcctaaaattaaacattatttctctgtcacatcaagagtaaagctaaattttattactttttagaatatgcttttcccttaatgttgtattataaaaattttttggtggcaaatttattacaaaatagatttttaaatctgaatttcacatactcaaagatttatagtctgtgcaagacattgaatgagtagctctaattgcactagtataatataattacgaaagggatctgtatcacagagacttctgatcacagaaacagttggaattgtttgtgatgtgtggtattgaacttgtgattgcatatgctttgtggtacctatagacagtagtgtttgtctattttaactctcttgcttcggatctccccttgagtagattcagctaaataagttataaatttcaccatcttaggccttcttgaaaattataagtatctgagacagcttaatttcataaagctactgtgcatatttggaagtatggtgtttggttttttaaaaaaacctggcaggccagagtaagcaaattgtttttttatgtttttgtcaagaaacaccccaagataaatgtaaacaaatatttgcgcattaccgtcattgatactggaatttgacatttctgtcctcagaagtcactgttctgtcagagtctgctgtacttgcctgagtgaatagtgcaggattggcaaaaacgttgcctgctcatggcagatcatctctaaatctctcttgacaacatctctagctgaacccagatcagtgattctcaaccttggctgcatattggtatcactgagaaacttaaaaaacaaacaaaccaaaacctgatgcctgagtctcacccaaaccctcagataatttgatttgattgggcttgggggtggtcttgctgtggagatttaaaaaatctccccaggtcattctaatgtgaagtcaaggttggttgagaaccactggctactacaaatggataagagttggtagtgtgaactgaaatgtatttgccatcctcagtctagtgaggggattttctaaccatgccacaatatataaacaatttgcagtttgaatggatagaggttggttatcattggaatttgaaaggacaaatgacaagtaacatcggatgatttaccagtgttttgtgatcttttttttttttttttttttttaagatggagtctcactcttgttgcccaggctggagtgcaatggtacgatctcagctcactgcaacctccacctcccgggttcaagcgattctcctgtctcagcctcctgatttacaggcatgtgccaccatgcccggctaattttgtatttttagtagagacagggttttaccatgttggccaggctggtctcaaactcctgacctcaggtgatccgcccgcctcggcctcccaaagtgctgggattacaggcgtgagccactgcgcccggccaatgacattttaaaagaattgccttcagagggtagctggaaaagcaaatggatgtgggacaagaggttgttccacaacctcctggggtggggatacccgttctgtgatggcattaaggagaacgagagggctgagaagagagcaaaatgatcagccctggattttgggacttggccaaaaaagaaaggatggaacaggacgtcaggataagatctaagacttgaagcagaaactgtacttcttcctgacccaggaggtgtgagacagggaagtggtggtagcaaacaggatagaatgagaggttcccttttacacccaaacttgttctttgcttagtggcagaaggctcaatttttctttattagagcattttctttattacagcactatgagctttactatatgtgaatcacctgtgagcacttgttaaaatttctggatccctcccaaagtttctggtttaggactgctgggggaaggctcaggaatctgtatttgtgaaggttaactgaaccttttttgtttgcttaccatctattcagtgttttccctattctttgttctatttatttagtaatttaaaaaattgactcattttaaaaaactgaatcttattttaaaatgaaactgtcactactacacgtggaaaacatttgccaaaaaataaaaaatgaaagtgtaaatacataactattaagaaaaaggtcaggccgagcactttgggaggccgaggcgggttgatcacgaggtgaaggaatcgagaccatcctggccaacatggtgaaaccccatctctacaaaaaaatgcaaaaattagctgagcgtggtggcgcgttcctgtagtcccagctactagagaggctgaggcaggagaatcgcttgaacccgggaggcggaagttgcagtgagccgagattgtgccactgcactccagcctggcaacagagtgagactcagtctcaaaaaaaaaagtcatatatgtaccactctgaagattatttttaatatcattttgggaactactagcgattctgatacagatagttttgtcatcatacttggagaaatattgaactagagacaaaaagtttcacttagattgcatgattttcagctactgttgcacacttggaatctggggcatttttaaaatacttttggtcagcccccatcccccgatttaattggtgtgggctacaacctggacatcaggatttttaaaacactctcctaaggtaatcgtaatgtatattctgggttgaggatttagaggttaaaaagcatataatgcagttagactaagaagcataaattcatgaatactaaaatacacttatctcggtataattagaaataaagaagactggctgggcatggtggctcatgcctgtaatcccagtggtttgggaggccgaggcaggaggatcacttgaggcgaggagtttgagaccagcaagggctacatagcaaggcctcgtctctaccccaaaaaaaaaaaagggcagaagaaaaattagacaggtacagtggtaggtgcctgcaaatcccagctactcaggaggctaaggtgggaggattgctggagtccaggaggttgaggctgcagtgagtcctgatcctgtcactgcactccagcctgggtgacagagcgagaccctgtctcttataacaagaatgaaaaacaccacagtgaccacctgggggatgtgggcagggggagaggaaaagaaggtgaattaataaagcactaaggcaccgtgtccttatgatcgcctctgctcctgcctgcttctcttgttttctgttcttgatgaatagtgtgaattaataaagcactaaggcaccgtgtccttatgatcgcctctgctcctgcctgcttctcttgttttctgttcttgatgaatagcgtgaattaataaagcactaaggcaccgtgtccttatgatcgcctctgctcctgcctgcttctcttgttttctgttcttgatgaatagcgtgaattaataaagcactaaggcaccgtgtccttatgatctcctctgctcctgcctgcttctcttgttttctgttcttgatgaatagcaagagcttttaaattgtcagctagtccccaaacgtaagtgtgcatcagaattaactggagggtttgttaaaacacagattgctgggactcatcctcagaatttctgatcgagtaggtctggggtggggcacaagatttaatttcccaggtgatgcttctgctgctggtcagggaacaacacttgaaacactcatctagttaaccaagctgaaaactttaggacattagcctgacatttattgtctctgtgtattttatatatatccagtgaactttaaaaataattacgtaaacacaaacctgtgtttccatcacctagaattagtaaatgttaatgggtgtgtggataaatattaattatgaataaatattgcctttttggtgataataaaccgctgtgttttatttcacacttttgagtacaaggaataaaaaaatacaacttttctgggcttgagataagtgctctttaggttaagctataacaccgaagagaaaatagtgctccattaacttgtttcatcagtcttttaggcaaccaaatgagaaaagcaaagaaaaacagtacagtctagattgtatactccatctgagaaaaaacattaaaaagtattacgtatctgaaaatgaaattgtcggacaggcgcggtggctcatgcctatagtcccagcattttgggaggcggaggagggcggatcacctgaggtcgggagttcaagatcagcctggccaacatggtgaaaccccgtctccactaaaaatacaaaaattagccggacatggtggcaggcgcctgcaatcccagctactcaggaggctgaggcaggagaatttcttgaacccaggaggtggaggttgccgtgagccaagatggtgccgttgcactccagtctgggcaacaagagtgaaactatgtctcgaaaaaaaaaaaaattgtcagctgcaatcattttatcctgtttttctgtttgaatagtttatttgaatagttcatggaattaataagttgaatttatttctatatctagaaacttgggaggggaagggtaaactgttatgtatggtataaaaaatttaaaagtgttgtgaaaatactattttcaattctaaaacgcttgttcaattctaaaatgacttgtttcccctatgcttgatatagatcaagagggaaaaagtattaatgggtattatttattcagcaaacattgagtttacattcaggactgtcaacttgactatggaacaattcaagtagctttcgttagtcttgcctagcttttcgttatgcattaaatatgtgcttcattcaggaggagatcaccccaccccagccaggttagttttgtcaggtagaaataatgctgtttttatattctcatgaagagtgtatgtattttttcatcgtggagctaatgctaggattccctgaacttgctagcttctataaatcctcctcaccattcttcgaagcaagggctttggaaagtatggacttaactgtctcatgaaaatccttgtatagcttcaattgtcctccctcctatttatttttcatgaaattattctcttgacacacttgtttattttctatttagtctttctagactcttctatttgcttccttcttggactatttgttccctcttgctagaactctttatcttcactcattaactaaactttaagaaaagagtccttcccatgtttcctttaacagggaggccagcttgtttttacagctcatataatatatgcaggtagtagaagacagatgaaagcaaatactttgcaaattatggtatgtttgcttcagttttcaaaaagtctgggagcttggtctcttttccctggaaaccacctctgttttgtcttgcagatgagagtgtgatctttaagctagccttgaccttttgggtggtctgtgcttatctttcaagtgtttgcagtaattaggaccagtatatcaaaaaaagcatgctacctatgttatttgtattgtcctgatcttctagattcagaaaaaaagagaggttattatttttataactggatttcctatatttgtggataagaattccaaaactaacaaagagaaaatcatcttgactgttacgtgctgtaaaaatcatgtattcaaagtttgtactatcacaattctggattcatgaggatttgccagacattcaaattaaagcctaatcaataactttcttcttcgtagagggccattctaaggccagtgctttcccagggcctgggtatattatgtagtatgatgaatatcacagagcaattgcccttgtttaggaactgtgtattgggattcctttaagatttttgttttaacatacttacatttcactaggattcttccctaccgcacccccggctctttttaaaaaatttacctagtttgtcccttgcctgtttggctactagatatatttaactgaccttagacagtgctgcaggcagagttcagcatttaggcaaaacggatggcagtgttagctgtttttctcctggcatgtcactgtgcattatctgggatggcatgctttgtgagtatctgtatggtttcccaatgagagaagggaggtctggctgcattcactcgcacaaggtgacctttgtttctacacattctctgctttaacaaagcattgtctaatcagtctgtcaatacatatttattgagtgcctactgtgaatgcccagtagtatgctgtgtactttgagagatttttttcaaaagggggcagggtagaaagaaagagaaatatgcatttgagtttagaataatgttaacatgaaatatgtataccgtgtgtgattttataaacatgaatttctggaggagcagaattctagagtattctggcccacattagcttcaagaatggaattattcttaagagtaaaatcacttaagctagaagttccaggctgctgtgagcagtgcctctacactccagccttggtgacaggagacccctacctaaaacaaaacaaaacaaaacaaaaaaagaatgaactgtttcctcattaaggtgcaacttattcatgtaagagagatgtttaatgttaaggatttcctttcctttccttttttctttcctttttctttcttctttcctttcttttctttgacagagtctcactctatcacccaggctggagtgcagtggcgcgatctctgttcactgcaacctctgcttcccggcttcaagcaattcttgtgcctcagcctccccagtagctgggactacagtcatgtgccactacacccggctaatttttgtatttttagtagagatggggttttgccatgttgcccaggctggtctcgaactcctgacctcaaatgatctgcccacctcagcctcccaaggtgctgggattacaggcgtgaaccaccatacttggcctgttaaggatttctttaaatgtggtatttgatatataggcttacacaattagtatatcttaaattatgtaatgaatttcccacaatctcagcatttaaaaaaatgtttggaataggaagatgctcataatattttaggggaaatacatgtatatatagtgtatatatgtatgtatacaatgatcaatctttggagcagcatagtgtaaaaagcgcaagctacggagtcagactgctggatggttctgccacttcaactgacctagggacaggtagattttattatttgtttccttttttgtaaaatgaaaataatggtacatcatgggtgagatgtaaactttaaatgagttagaatgcataaagcattcagaaaaggagctggctgggcgtgggtggctcatgtctgtaatcccagcactttgggaggcccatggcgggagaattgcttgagcccaggaatttgagaccagcctgggcaacataatgagacccctgtctctaaaaaataaaataaaataaatgaaaataaaaataaaaatagaacatggtctggcctgtggaaaacattaattgttacttttattgtagccttttttttttttttaaaaaaaggtgaatgtcagcagagaaaaactgttttaaaggatatccataaaattttttttgtgatttttctcagattcataggattattaatttttctttttatctgtaattcctttttcccccgtaatgaacacgtttctagtgtaataaagtagaagataatgaagaataagatttagtctgaatatttatatgaatccttatgaagaagtgtcgttgtctgtcattgatacccaagatttgttgtctcacggccatggaaaactaggacgcagacacacaaagagtgaggttcagagtggaagtttaataggcaaaagaaagagaagagctctctgcgacagagatgggtcctggagaggctggtcctggttctgcggtggaatgcaaggggttttatagataagcttgaggaggtggtgtcatgatttacatagggcatgaaagattggttggaccaggtgtgccattctggaaaactggttagggctaggtgttccatttgcctagggtgcaaaaatctggccacccccaccctaatcttttattatgcagatggcttctctgtctgcccagcgcagtgtctgtttctttactatacatgtggtgacaaagaaaagggaaggtgaagcctccatgttgaacatacctggcccccaggtagccgttttctgttagcatagctgctgacattcacccgtgcaagcttccagcttgcttttttatgtttgcagcatgatttttcaggctgctctttgttagaaaagaaattcttttggggctgctttttgttaaaaggggaaattacgccgaggactctattgcccttattatctgcgtaaataatttctttctacctcctgtatcaatgatacaacaaaatctagaatttgttgccaggaaattagtaaatatttgaatgatattgaatggtctacataggtgatgttattttatcttgaagctgttcataatttagcataggaaacatggcaaacatggcagaaataccatggatcatatgcttgttttatttttagtgtttttttgtttgtttgttttgttttttttgagacagtctctcactttgtcagcgcgatctctcggctcactgcaaccaccgcctccagggctcaagtgattctcctgcctcagcctcctgagtagctgggattacaggcgtacatcaccacacctagctaatttttgtgtttttagtagagactgggtttcgccctgttggccagggtggtctcaaactcctggcctcaagcagtccatcttccttggcctcctggaaagcgctgggcttacaggcatgagccactgcgcccagcctgtatatcttcttttgagaactgtctgtttaaaatataaatgaaaataaaaatagaacaggggctggcctgcagtaagcattaattatgacttttattgtactttttttttaaaaaggtgaatatcagcatagcaaaactgttttgaaggatgcgcatggtttttttttttttttttttttttccttgaggtggagtcttgctacgttgccaggctgaagtgcagtggcttgatttcggctcactgcaacctctgcttcccgggttcaagcgattcccctgcctcagcctccttagtagctgggattacaggcacttgccaccacgcccagctaattttggtatttttagtagaggtggggtttcaccatatttgccaggatgctctcgatattctgacctcgtgatccacctgcctcggcctcccaaagtactgggattacaagcgtgagccaccgcacccggcctaaaatttttttttagtgatttttctcaggtgtgtaggattattagattatttagatccttagatctagactatttagatcctttgcccattttaaaatcagattaggttttttttgttttgttttgtttttgtttttttgtttgtttttgctgttgagttgtttgaattcattttatattctggatattagtcccttctcggatgcatagtttgcagatgttttctctcattctgcagattgtctcttcactctgttgattgtttcctttgctgtgcagaagctttttaagtttgttatagtcccatttgtctattttggttttctcaccagtgcttttgaaaccttaccaagaaagtcttttcctagaccagtgtcctcaagtgtttcccctacatttttttttctaatagttttatatgaatagtttcaggtcttacatttaagtctttaatcagttttgagttgactattgcgtttggtaaaaggtaggggtctaatttaatttttctgcatgtggatatccagttttcccagtactatctattgaagagggcgtccttttcccaaagtatggttttggctcttttgttgaaaatcagttggctgtaaatatgtggatttatttctaggttctctgttctgtcctattggtctatgtgtctgtttttataccagcaccatgctgttttggttactatagctttgtagtgtattttgaagtcacatagtgtgatgtcttctgctttgttcttttttgttcattattgctttggctattcagggtctttctggttccatataaacttgagaattgtttttttatttctctgaagaatatcattgatattttgatatggattgcattgaatctatagtttgctttggaaagtatgttttttttttttttttttttaagagacgaggtcttgctctctcatcccagctacagtgtagtagtatgatcatagctcactgaaacctcaaactcttgggctcaaatgattctcccacatcagcctcccatgtagctgggatgacagtggtcattttaacagcattcttcctatccatgaacatgggatgtctttccaattttttttgtgtcctcttcaatttcttttatcagtattttgtaattttcattgtagagctctttcaccttcttggttcaatttattcttagagtttgttgttgtagcttattgtaaatgggattgcattcttggttacttttttagctggtttgttattggtgtatggaaatgctactgatttttatatgttgattttttatcctgcaactttagtgaatttgtttataagttctaagattgttttgatggagtctttaggtttttctagatataagaacatgttgtctgcaaacagggacatttgactgcctcttttgcaatctggatgccctttatttttttctctagcctaagtgctctggctgggacttccagtactatgttgagtaagaatggtgaaaagttggcatacttgtctggttctagttcttagaggaaatgcattcagcttttccctattaagtgtgatgttagctgtcactttgtcatatgtggccttgattatgttgaggtatgttcctttattgcctagtttattgagagtttttatcaggaaggtatgttgaattttatccaatgtttttttctgcatctattgagataatcatatggattttgtcattcatgctgttgatgtgctatattacatttatcgttttgtgtatgttgaaccatccttgcatccctgggataaatcccactttgtcttggtgtattgtcttttgaatgtgctgttggattttgtttgctagtatgttgttgaggatttttgcatctgtgttcatcagggatattgaccatagtttttgttgtttctgtacccttgtctggttttcgcatcaaggtaatgctggctggccctatagagtaagttacaaagaattacccctcttcagcttttgggaatagtttgagaagaattggtgttagttctttaaaagttttgtagaatttagcattaaagctatctgatccagggtttcctttgttgagagactttttattaaaattgattcagtcttgttacttggtgttgttctgttcaggtttactacttgtattagtctgttttcatgctggctgatgaagacatactgagactggagagaaaaagaggtttaattggacttatagttccacatggctggggaggcctcagaatcatggtgggaggcaaaggccacttcttttttttttactattatactttaagttttagggtacatgtgcacaatgtgcaggttagttacatatgtatacatgtgccatgctggtgtgctgcacccattaactcgtcatttagcattaggtatatctcctaatgctaaccctccccccttcccccaccccacaacagtccccagagtgtgatgttccccttcctgtgtccatgtgttctcattgttcaattcccatctatgagtgagaacatgcggtgtttggttttttgtccttgtgatagtttactgagaatgatggtttccagttgcatccatgtccctacaaaggacatgaactcatcattttttacggctgcatagtattccatggtgtatatgaaaaggcacttcttacattgaggcggcaagagaaaaatgaggaagaagcaaaagcggaaacccctgataaacccatcagatctcatgagacttattcactatcacaagaatagcatgggaaagactggccccatgattcagttaccttcccttgggtccttcacataacgtgggaaattttttttttttttttttgagacggagtctcgctttgttgcccaggctggagtgcagtggtgcgatctcggctcactgcaagctctgcctcctgggttcacgccattctcctgcctcagcctcctgagtagctgggactacaggtgcccaccaccacgcctggctaattttttttgcatttttagtagaacgaggtttcaccgtgttagccaggatgatctcgatctcctgaccgcgtgatccacctgcctcgggccccccaaagtgctgggattacaggcgtgagccaccacgcctggccacatgtgggaattcttggagatacaattcatgttgagatttgggtatagtacactatatcactgcttcttcctggtccgatcttggcaagttctatatatccaggaatttatccattccttctaggttttccaatttgttggtgtatagttgttcataatggcgtctaatgattctttgtatttctgtggtttcctttttcatttcagattttgtttgagtcttctctcttcttagtctagctaatggtttgtggattttgcttatcttttcaaaaaaccaagtttctggctgggcgtagtgggccatgcctgtaatcccagcacactggtaggctgagtccgcagatcacttgagcccaggagttcgagatcagcctgggcaagatggtgaaaccctgtctctactataaaaaaaaaaaaaaaaaagttgctgggcgtggtggtgtatgccagtaatcacagttacttgggaggctgaggcatgagaatcacttgaacctgggaggcataggttgcagtgagttgagattgcaccactgcactccagccggggtgacagagcaagaccctgtctcagaaacagcagcaacaacaacaagaacaatccccaaaacaagttcttgtttcattgatgttttatatgtgtctctctctaattatctaatctaattgaatctctctctccccccccatatctccatatctccatctcttgctttctctttctctctctctggtttctattttgcttatttctgctctggtctttatttcttacactaattttgagtttggtttgttcttgcctttcaggttccttgagatgcattgctaggttgtttatttaaaatctgtcttcttttttgatataagtatttattgctgtaaacccccctctttgtactgcttttgctgtttcccagaggttttggtatgttgtgtttttttttcttcttttcttctttttttttttttttttttgagacggagtcttgctctgtcacccaggctggagtgcagtggcatgatctcggctcactgcaagctctgcctcccgggttcactcccacctcagcctccctagtagctgggactacaggcacccaccagcacgcctggctaattttttatatttttagtagagacagggtttcaccgtgttagccaggatggtcttgatctccagacctcgtgatctgcccgcctcggcccccgaagtgctgggattacaggtgtgagccaatgcgcccggccttttcttttctttttttgaaaatgaagacggggttttgccatgttgcccaggctggtgtcgaactcctgagctcaagccatctgcgtgcctcagtctcccaaagtgctgggatttcaggcatgagccaccacaccttgtcattatgttgtgtttctatttcggttttttttccaacaaatcttttgaattccttttaaatttctccatagacccagtggtttttcaggtgtttagtttccaaagttcttgtttttgatgtctagttttatcccactgtggtctgggaagatacttgatatgattttagttttacaaaatttgttgagacttgtttcgtggcctaacatatggtttatcctagagaatgttccatgtgctgatgaggagaatgtatattctgtagctgttgcatggaatgttctatgaatgcctgttagttccatttggtccatagttccactgaagaccagtgtttctttgttgattttctgtctagatgatctgttcagtggtgaaagtggggtggtgaagtccgcaattattcttatattgggatctatgtctctagctctaataatatttgctttatagctgggtgctttggtgttaggtgcatatgtgtttatagttgttacgtccttttgctgaattgatccctttatcattatataatgtccctttttatgttttttgacttgaaagtctattttgtttgatataaatatagctactccttcatgcgtctggtttccatttatgtggagtatctttttccattccttcattttctttttttttgagacggagtttcacccttgttgcccaggctggagtgactgtagtagcatgatcttggctcactgcaatctctgcctcccgggttcaagcagttctcctgccttagcctcccaagtagctggggattacaagcatgtgccaccacgcctggctgattttttgcatgtatgtatgtatgtatgtatttatttatttagtttttgagatggaatattgctctgtcgcccaggctgtagtgtggtggcatgatcttgcttcactgcatcctccacctcctgggttccagtgatgcccctgcctcagcctcctgggtatctgggattacaggcatgtgccaccacgcctggctaatttttgtatttttagtagagacggggttttcaccattttggctaggctggtctcgaactgctgacttcaggtgatctacctgccttggcctcccaaagtgctgggattacaggtgtgagccaccgcacctggcttattccttcattttctatgtgtgtttttacatgtgaagtgagtttcttgtagacagcatatagttgagtctttttttaaaaaaaaatccactcattcagcctatatcttttaattggggaatttaaaccatgtacattcaagattgttcttgatatgtgaaggcttactcctgtcattttgttgttttctgattgctttgtatatcctatgttccttttttcctctcattgtttatccttgctgtttggtggtattctgtagtgataacatttgactagtttctctttctcatttgtatatttgctttgccagtgaattttatacttttatgtgttttcgtgatgatacatattattctttcccttccagatgtaagactctcttcagcattttgtatggctggtttagtggtgaattttttcagttttcatttgtctgtgaaagactttatttctccttcatttctgaaagatagctttgctgggtatagtattcttggctaacaatttttttgctccccacccccttcattcagcagtttgaatatatcatttcattctctcctgacttgtaaagtttctgctgagaaatctgccattagtctgatggagattcccatacatgtgacttgaggattttctcttgctgtttaaaaaactttttttttttttttgagagacattattctgtttcccaggctggattgcagtggctagtcacaggcacaatcatgtctcacgacagccctccaactcttggcctcaagcaatcctacccactcagcctcctgagtattctcttgctgttttcagaatattcttttttattactgtgattattattatttttagagatagggtcttgctccattgcccaggctggtgtgtgatggttcagtcatagctcactgcagccttgaactcctgtgttcaagtgatcttgcctcagcttcttgaatagctaggactacagctaaaagattggccatccctggctactttttacattttttgtatagatagggtcttgctatgttgcccaggcttgtgtcaaactcctggcctcaaagaatcctcccgcctggcctcccaaagcattgggattgcaggagttagccaccgtgttcagtgtagaattctgtttttatcatttacttttgacaacttggcaataatgtaccttagagaggactttctttgggctgaatatgttttgggatctgtgaataccaaagattcgagggatatatgcctgtatctctgctgagacttcggaagttttccgctattatttcattaaacaggttgtctatgccatttaccatctcttctgaaattcccaaagtgcaagtagttgttcacttaatggtgtcccatatgccatgtgggctttattcttttttatcctctcttctttttcttctgagttttttctttttttttctttttctttttttgaggcagagtctcgctctgttgcccaggctggagtgcagtggcacgatcttggcttactgcaacctccgcctcctgggttcaagtgattctgctgcctcagcctcctgagtagctgggattacaggtgtgcaccatcacacccaactaatttttgtatttttagtagagggagggtttcaccatgatggccaggctggtctcaaactcctgacctcaggtaatctgctcacctcggcctcccaaagtgctgggattacaggtgtgagccaccgcgcccagccctgtctgagattttgcaaaagacctgtcttcaagttcagaaaatctgcttgatgtagtctattctattttttatttcactcattgaattctttaatttcacaatttgtttgtttgtttgatatatatctccttgttgaatttttcactgatgaattgttttcctatttctttgtaccgtttgtgtgtgtgtgtgtgtgtgtgtgtgtgtgtgtgtgtgtgtgtgtttgtatattgctgagtttccttaagatcattatttttcatttttttcaggcatttcagagatttctttttttggggcgggggggacggatttcttcctagagaattaattgagtttcttttgaggtgttgtatttcccttgcttttttatgtttcttgtgtctactttggcatctgtgcatctggtgcagcagctgctccttccaattttatggagcagcttttgtgcggaaatactttttcctgcaggtatatctacagtattggctggataacgtgctttggccgtacaatagagtagtattcagccatgaaaaggaatgaagttctgatacatgctgcagtgtggatatacctccaaaactttatcctgactgaaaggagccagatacaaaagatcacttattgtatggttccgtgtatatgtaatatattttgtagataaatctacagatgtagaatgctaattggtggttgccagaggctgggaagaatgaggaatgggaagaaactgctgggtaaggagttttaactttggagtgatggaaatattatggaactaggtagaggcagtcattgcggaacactgtgaacgtactaaatgttactgaattgttcactttaaaatggttaattttatgttatatgaactacacctcaatacattattttttaaaagttttatgaacagtcataaattaaaacaaatattcgctatggcgattaatataattgccctgtgttgaggatttaccgggagctggagccttcacatatattgattctaagccttatgtcagcattgcaagatagattaggaagaacaaagaactatattagtagtttaaaataatggctttaaactgctttacaccttgtttatcaaatcaagtgagcccttgaaatttaatcagggactggacggtagggggcacccatggtacttatgttgctctggctatgttgagagcgtcttaagtcataaacacagatttgttgaatgagtttgatactttgaaaattatcacctagaggctgggtgcggtggctcacgcctgtaatcccagcactttgggagactgaggcaggtggatcacgtgaggtcaggagtttgagaccagcctggccaacatggtgaaacctcatctctactaaaaatagaaaaattatccgggtgtggtggtaggtgcctgtaatcccaactattcaggaggctgaggcaggagaattgcttgacgctgggaggtggaagttgcagtgagctgagattgcgccattgtagtccagcctgggcaacagagcgagactctgtctcaaaaaaaaaaaaaaaaaaattagcaagaaggatcttattacgaacttatgtttatttgagtttggtattttatctttcagttttaagttttgtagttgaaaatatggaactataggcatgtgccaccacacccagctagtttttgtattttttatagagacggggttttgccatgttgcgcagactggtctcgaactcttgggctcaagcaatctgcctgcctccacctcccaaagtgttggaattacaggtgtgagcctctgtgcccggccaaaacataagttttatgatataatacttgctctatggacgatgttagatgttttaagttttattttcttttaatgaaaaaagattggcaaccactaaattgtttttacaactcattttttaacaagccagtttgaaaagtttttagtgtaaaatgccagtgtttctgctatccgatgaaaagcatcaggttctataaaattttactattggaaagttagggtttggggaagagtattctaaatatatgtaactttgtaatcataacacaaacagaagtaatgttaataaatggtacctcaggagattacttggatagcactaggatgccaggtgatagtagccagagaatgcttcaacatatattcaaaactcaccgaagtaatttagtagaaatgcttgcttacagtgctgagaaattgctgatggaagtggatctctgagcgcaggaaaaagtgcagcctgtcttgagcagagggccatgagtgctcaggggtgtgcccctgtaggaagggagccctggatacaggtgctctgttttagttttctcaaaatagagctgaaaggatcactatttattcagcagccaagcagagggcattttcctttcctgctgaaggctgcaattctgcctgtctttgtagttctcttgcctaggaaaaggtacatatgaatcagcacagctttgttataatgatagttctctatttatcatgatcatgtatgagctaatttatattgtaaaaaatatatttagaacaaaactgtgtgtgtgtccagtgtagtttgccaattttactgtatttcattttagccactgctttttttttttttttttttccttctgagacagagtcgctctgtcgcccaggctggagtgcagtggcgcgatctcagctcactgcagcatccacctcccgagttcaagtgattctcctgcctcagcctcccaagtagctgggactataggcgcccaccaccaagcccagctaatttttgtatttttagtagagatgggttttctccatcttggccaggctggtctcgaactcctgactttgtgatctgcccacctcggcctcccaaagtactgggattacaggcgtgagccaccgcgcccggcgatgctgagatcttaattaagactctaagttttggagagagatgttcaagtttttcatctttacctgagaatccctacaaaatgccaaatactgtaattgtacactaaggtgccaaaattttgatctcaaagatccgtatgaaattatcttggagataaggaacctgaaggcttaaaagacacaagaatcaagtttctcttctggccctttcttatttattacatacaaaaataattacttttccctttaggaattaaaaaaaaaagtagtcactcagggatacctgattctttactgatgcttagcatttttttgtgaataatttttatccctctaacagtaaaatgatgttaaaagcccttgaaaaaatgaaaattaattgcatttcatacccttgaagctctgattttattgataattttgttttttaagtgaacaaaacctcaaaatatactagcaaggtaaatttattgatttctcctcttatgcccgattgcttatcaatttggttcttttgtctaagaatgatccaattagcagactaattttttttcaacagggaactttcgccttcttacactgtgttctcattggagcattgcatagtctctgcatacgtagagcgtgaagatggtgtctttatgtataccttcttaagtaagctaaactgtcttgaaaatggcagtaagtggcacattaagacacaaaaggttatttcttttttggcgaatggttgtttgtttaaatggagaaacataaggtcttatattgagaggtagatttatttaatattccatagatgtaattttaaaaatatttctcctgtctcagaatgaagtgagggttctgctaagacagctttgtaattcacagctttctttgaaaatgctgtacctctattccttattgatggacttgaatgcacaatcatttgtggggtttttttgttttgtttttatgaaatagcagtttgatcatttataccaaaagttagtgctatatgattagatatcaaggttccttagatagaagcattccaggctggatatctgactccttttatcatctgcatggtgtacttagctgtatataaaatggaaaagtagcaagtttaaatgactggtaaagttggaggcacactctgctacccagcggttctatttctgtgtcttcttgagagaaacttttacccatgtgctcaaggatctatatagatggaggtgtaatttattataatggtgatctagataggatctagatagatggaggtgtatttattataatagtgaataagtacaaaaatacttaactgttcctcagtaagtgaatggatacattgatattattcgtatagtggaattcaagtaaacaatccttatctccagaatacttagggcagatgtattttggaatttagaaatttttaaactttaaaggtaattcggtatgtataccatttattgtataacactcccattgggatttgggaaacacctcataatcaaacatactaatttttctgtagcaaaatttatgaatattcatattaagtgggataaatagattttaaatggcttcatactatttgggttaattacattttttaattaggttatgggaaaacttaagagctttttggattttagatttttggaaaaagaattgtgaacccatattataaagttcataaaatgaatgaaatcgagctacatgtatcgatgtggataaatctgaagcatattatgttaagtaacaaaaggaagttgcagagataaccttgtgcaaatgacatcatttatgtgaattgttaaataagcaacagtgagagagagagagagagctctgaagcaaataaggcaaattattggtagtggttttcttactttgttgtatgtttgaatgtgtctttataacctcaaacttcagcttttaaaccttctgttttaccttaagaatgtaaggttacattgagttaggcaataagagtatgctacaaagcatgtcagaactggaagtgttctttaaaatcatttaaattatcatcccttctttttttcttactttctttttttcttttcttttttttttggaggcagggtctcactctgccgcccaggctggagtatagtggcatgatcatggttcactgcagcctcagactcctgggctcagggaaacctcctgagtatctgggactatagatgcatgccactgtgcccagctaatttttttaatttttttgtagagacagtgtctgtgttgcccaggctggtcttgaactcctgggctcaagcagtccttcctcctcggcttctcaaagtgctgggattataggtgtgagccactgtgcctggtctactcttccttcttctaatccaagtcattcctacttgttaagagattctcttgaatatttatttattttccctttttaaaccttagaccttttacttcttttcaaaacatattttggttgagatatagtttccatacagtgaaatgcacacaccttaagtatcttgtttccatgagttttgacaaatgccaacacccgtgtaatccacaattctgtcaagatacagaacatttccatcatcccacaaagttcccttgcatctctccccagttcgcatcatccctgccccgcagcacaggtagtgttctgattcctttcactttaattttacgtgttctcgaacttcatttaaatggaatcatacagtctgtaccctgttgtgtctggcttttgttgctcagtgtgttgttttttacatttatccatgttgttgcatgtatccatagttatccttttatatactgagtaacactccattgtgtgaatgtggtactatcagtttatccaatcttctgttgatggacatttgtgttgtttccagtttttggctcttatagataaaaccactgtaaacatttttatatggttgtgtttattggtacatgttttcatttctcttggggtgatacctaagggtggaattcctgggtcctagggtggtgcatacttcacttcgtgagaaactaccagagcagttttcagtgttgcttctggctgcttccatccttgccagcatttggtattgttaattgtctaaattttagccattctagtgggtgtgtagtgatatcttattgtggttttgatttgcatttccccagttactaaagatactagtcactttttcgtttgcttattggttagttagttcaattgcttattgtccttagaagaacgttcatcttccccaggaatgtatttttctttttgaagtatctaagtcttctacccacttttaaaaagttttttttttttaattgagttgtagaagtagtttatatattctggatacaagtcctttaacagttatatgtggcatgccaattttatttttatagtggtctctttctttttaaaatttttcctcatcactctttccatatgatacaatgttctcttttgataagcagaaattaaaaattttgaagtctaatttgtgaatttaaagttttatcattagtacttcctaagataaccatccaaatatctttcccttaaaagtataaagtctgaggctgggcacagtggctcacacctttaatcccagcactttgggaggccgaggctggcagatcacctgaggtcaggagtttgagaccagcctggccaacatggagaaaccctgtctctactaaaaatacaaaaactagctaggcttggtggcgggcacctgtaatctcggctacttgggaggctgaggtatgagaatcgcttgaacctgggaggtggaggttgcaatgagccaagattgcgccactacactccagcctgggcagcagagcaagactctgtctcaaaaaaaaaaacaaaaaagtgtaaagtcagctgaagtgatatgaaagcttttgtgatcatagacctaagcatttgaattgcaaatataacttggtgtgtgaaagctctgcagtatgcatgcaggaattaaatgtctgtctggaaataatgccaacaaatatatttattggggtttgtgtgatagaattggcagataaccaaggaagcaaatttattttccttttaaatatgaaggaaaatttatgaaggaagagcaaatttattttcctttcaaatacgaaaacatgaagtaatcttttgtaatgtttactacctacattgattgcctttctctgcattaatttctcaaaaattttcttcattaattttcttgaggagctcttttatctgcttaatgtctttacaaacacatgtgcaaaagagtctcagacgcatcttatttgatgattgtcatggaaaatattaagggtttgtgtacaaatgtttatactgcagtgttttgcttcaagaaaaatgtatggtcttctctatgcaagttttatcatttttgttgttgtttttatttccaagtcctttctgtgttttaattttaatttttacttttatttttgagacagagtctcgcactgtcaccctggctggagtgcagtggtgcgatctcggctcactgcaagctctgcttcctgggttcaagcagttctcgtgcctcagcttccctagtagctgggattacaggcatgcaccaccatgcccagctaatttttgtatttttagtagagatggggttttaccatgttggctatgctggtctctaactcctgacctcacatgatctgcgtgccttgccctccctaagtgctgggattacaggcgtgagccactgtgtccagccaataaatactttaaaaataaattttcaggccaggtgcggtggctcatgcctgtaatcccagcactttgggaggctgaagcgggtagatcatgaggtcaagagatcgagaccatcctggccaatatggtgaaacctcgtctctactaaaaatacaaaaattagctaggcatggtggctgtgcacttgtagtcccagctacttgggaggctgaggcaggagaatggcttgaacccagaagacggaggttgcagtgagctgagatcacgccactgcactccagcctagcgacagagcaagactccttctcaaaaaaaaatttaaaaaaatgtttttttcagcaatgtgtggaaaatatacacaagatataagaccaataaaatgctactgtctaggagatgaggtgcctcatacctgaatccagcaccaaggtgggcggataacctgaggtcaggagtttgagaccagcctggccagcatggcaaaactccatctctactaaaaatacaaaaattagggggtggtggcgtacacctgtaatcccagccacttgggaggctgaggcacgagaatggcttgaactctgaaggcggaggttgcagtgagccgagatcacaccactgcattccagcctgggcgacagagcgagactctgtctcaaaacagaagggacttggaaataaaaacagctaacaacaaaaacccgtaacatagtcatttattatcattatcaagtattatgtactgtatataattgtatgtaccacacttttatatgactgtcaacgcattaggtttatttacactaacatcattgcaaacacatgggtaaggcatgtgttacaacattatgatggctatgaccaatgtgataggaattccccaccctcccacccgagacggagtcttgctgtgtcgctaggctggagtgcagtggcatgatctccactcactgcaacctccgcctcccggataagcgattctcctgccttagcctcctgagtagctgggattacaggcacgcaccactacacccagctaatttttgcatttttagtagagacgggctttcaccatgatggccaggatggtcttgatctcttgacctcgtgatctgcccgcctctgccttccaaagtgctgggattacaggtgtgagccaccatgcctggcctgtgataggaattttttagctccattgtaatgttatgggaccaccatgatacatgcagtctcttgttgactgaaacgtcatgtggtgtatatagaatgcatttatgacagtaggacttacccattttgatagtgttttcatttattcctttttcttttttttccgagacagagctttgctctgtcacccaggctggagtgcagtggcgtgatcttggcatcctccaactcctgggtgcaagcgattttcctgcctcagcctcccgaatagctgggattataggatgccaccatgtccagctaaggttcgtagttttagagatggggtttcaccatgttggtcaaactggtctcaaactcccccaccccaagtgatctacccactttggcctcccagagtgctgggattacaggcatgagccactgcacccgaccacattttcatttattctttaacttctattctgggttgtggtagcataaagatggattatgtttattgctgaaataaacctgttgtccaaattttgatgttttccagccattatcttgctacttagatttatgtacagcattcgcagagcaaaaagatagatgatcttatttttcctggattcagaggcagagagtagttgttagaattctagtgtaattgctcattcattttcttgactctgacatctttttttagaggaaaataactttggttagtaagctccaaataatgggtgagaatgttaaacaatttaatccatccctttgagttctagtgcgggtcttttttgcattttggtgagtctcctgcttgtgtttagattagtctgaaaactttgatttggtttaatatttgagggctttcagtgtgctttgctgtacaggaaataaatctctgtcattaactcaaagaatactaaactaacaataaggaggagtaaattaccttggaggctcttcccctgtctcattctctgtggttcagactcattaaattagtttcttcttttaaaatgtttcttcttttaaaattatggaaattagaattcagttgacgtttgtacaaagtggggttatatctgtgtataagttttgacaccccccaaatttaactattaatagcctactgttgaccaggggcctgataacatagttgattaacacatattttgtatgttatatgttaacatgtattttatgtatatactgcattctttaaagcaagctagagaaaagaaaatgttattaagaaaattgtctgggtgtggtgcctcatgcctgtaatcccagctctttgggaggccgaggctggtggatcacacggttaagagatcaagaccatcccggccaatatggtgaaaccccgtctctactaaaaatacaaacattagccaggcgtggtggtgctcacctgtaatccctgctactctggaggcagaggcaggagaatcgtttgaacctgggaggcggaggttgcagtgagctgagattgtgccattgcactccagcctgggcaacaaaagtgcactccattgcactccatctcttggaaacagagcaagactgtctcgggggaaaagaaaaaaaaagaaaatcacaaggaagagaaaatacacttactattcattaagtagaagtggaccatcacgaagatcttcatcctcatcatttttgttttgagtaggctgaggaagaggaagaagaaaagggattggtattgctgtctcagatttggcagaggcagaagaaaatccatgtgtcagcagaccctcaaagttcaaacctgtgtggtacaagggtcaactgtactttgttttcatagagatatattaaagttttatgagtttagctcatagtgatcttataggttctaagcttcatttgaatatattgcatgtaaaataaatgctttatctgtgttccttttgtctttcttgaatattgttgttaatttaaaatttgtaataggttataactcttatgttttacccatttgtgagctttatttttggataagaactttatcctgtacttttgctgtgcttcgtatagtacaactatgaaagattcttgttgactgttgattatctgaaaatgcttctttttgcttcaggtcaaatattgaataaacctagagcatataattaacatttttattaggactgtggtttgtattttggccagtttggatttaagaattacttgtattggttggtgtagaactgattttttttttctttttcttttttttttttttggagatggagtctcactctgtcgcccaggctggagtgcagtggcaggatctcagctcactgcaacctctgcctccccggttctagcaattctcctgcctcagccccctgagtagctgggtttacaggcgcgcaccaccatgcctggctaattcctgtatttttggtagaaacggggtttcaccatggtggtcaggctgatcttgaactcctgaccttgtgatccgcctgccttggcttcccaaagtgctgggattataggcatgagtgatttttttagaataagagtaattggctgcattatttttttaaggaagaggtataacttcccagatacttgcaatgcggctaatatacagtagccatttactttcaacataatttctcaacatttaatttttgtcagtttttcataaaaaatttatgacagggtaaaaagatgacattcctaagtcctagaaagtttattgatgataaatacaaagaattaaattgcagatcagtcttagaagtgctattctgtggataagcatacggccctgggcagcacagacgggaacatcagatagcccaaccaaaccggaagcttgacttggttgacttaagaattctttaaaactcttttgcgtgttacattaataaagtttatttaatacatgtatttatatgtttcagaaaaaaatgttcttaatttaacatttgtaaaagggtacaatactggtgttttnnnnnnnnnnnnnnnnnnnnnnnnnnnnnnnnnnnnnnnnnnnnnnnnnnnnnnnnnnnnnnnnnnnnnnnnnnnnnnnnnnnnnnnnnnnnnnnnnnnnnnnnnnnnnnnnnnnnnnnnnnnnnnnnnnnnnnnnnnnnnnnnnnnnnnnnnnnnnnnnnnnnnnnnnnnnnnnnnnnnnnnnnnnnnnnnnnnnnnnnnnnnnnnnnnnnnnnnnnnnnnnnnnnnnnnnnnnnnnnnnnnnnnnnnnnnnnnnnnnnnnnnnnnnnnnnnnnnnnnnnnnnnnnnnnnnnnnnnnnnnnnnnnnnnnnnnnnnnnnnnnnnnnnnnnnnnnnnnnnnnnnnnnnnnnnnnnnnnnnnnnnnnnnnnnnnnnnnnnnnnnnnnnnnnnnnnnnnnnnnnnnnnnnnnnnnnnnnnnnnnnnnnnnnnnnnnnnnnnnnnnnnnnnnnnnnnnnnnnnnnnnnnnnnnnnnnnnnnnnnnnnnnnnnnnnnnnnnnnnnnnnnnnnnnnnnnnnnnnnnnnnnnnnnnnnnnnnnnnnnnnnnnnnnnnnnnnnnnnnnnnnnnnnnnnnnnnnnnnnnnnnnnnnnnnnnnnnnnnnnnnnnnnnnnnnnnnnnnnnnnnnnnnnnnnnnnnnnnnnnnnnnnnnnnnnnnnnnnnnnnnnnnnnnnnnnnnnnnnnnnnnnnnnnnnnnnnnnnnnnnnnnnnnnnnnnnnnnnnnnnnnnnnnnnnnnnnnnnnnnnnnnnnnnnnnnnnnnnnnnnnnnnnnnnnnnnnnnnnnnnnnnnnnnnnnnnnnnnnnnnnnnnnnnnnnnnnnnnnnnnnnnnnnnnnnnnnnnnnnnnnnnnnnnnnnnnnnnnnnnnnnnnnnnnnnnnnnnnnnnnnnnnnnnnnnnnnnnnnnnnnnnnnnnnnnnnnnnnnnnnnnnnnnnnnnnnnnnnnnnnnnnnnnnnnnnnnnnnnnnnnnnnnnnnnnnnnnnnnnnnnnnnnnnnnnnnnnnnnnnnnnnnnnnnnnnnnnnnnnnnnnnnnnnnnnnnnnnnnnnnnnnnnnnnnnnnnnnnnnnnnnnnnnnnnnnnnnnnnnnnnnnnnnnnnnnnnnnnnnnnnnnnnnnnnnnnnnnnnnnnnnnnnnnnnnnnnnnnnnnnnnnnnnnnnnnnnnnnnnnnnnnnnnnnnnnnnnnnnnnnnnnnnnnnnnnnnnnnnnnnnnnnnnnnnnnnnnnnnnnnnnnnnnnnnnnnnnnnnnnnnnnnnnnnnnnnnnnnnnnnnnnnnnnnnnnnnnnnnnnnnnnnnnnnnnnnnnnnnnnnnnnnnnnnnnnnnnnnnnnnnnnnnnnnnnnnnnnnnnnnnnnnnnnnnnnnnnnnnnnnnnnnnnnnnnnnnnnnnnnnnnnnnnnnnnnnnnnnnnnnnnnnnnnnnnnnnnnnnnnnnnnnnnnnnnnnnnnnnnnnnnnnnnnnnnnnnnnnnnnnnnnnnnnnnnnnnnnnnnnnnnnnnnnnnnnnnnnnnnnnnnnnnnnnnnnnnnnnnnnnnnnnnnnnnnnnnnnnnnnnnnnnnnnnnnnnnnnnnnnnnnnnnnnnnnnnnnnnnnnnnnnnnnnnnnnnnnnnnnnnnnnnnnnnnnnnnnnnnnnnnnnnnnnnnnnnnnnnnnnnnnnnnnnnnnnnnnnnnnnnnnnnnnnnnnnnnnnnnnnnnnnnnnnnnnnnnnnnnnnnnnnnnnnnnnnnnnnnnnnnnnnnnnnnnnnnnnnnnnnnnnnnnnnnnnnnnnnnnnnnnnnnnnnnnnnnnnnnnnnnnnnnnnnnnnnnnnnnnnnnnnnnnnnnnnnnnnnnnnnnnnnnnnnnnnnnnnnnnnnnnnnnnnnnnnnnnnnnnnnnnnnnnnnnnnnnnnnnnnnnnnnnnnnnnnnnnnnnnnnnnnnnnnnnnnnnnnnnnnnnnnnnnnnnnnnnnnnnnnnnnnnnnnnnnnnnnnnnnnnnnnnnnnnnnnnnnnnnnnnnnnnnnnnnnnnnnnnnnnnnnnnnnnnnnnnnnnnnnnnnnnnnnnnnnnnnnnnnnnnnnnnnnnnnnnnnnnnnnnnnnnnnnnnnnnnnnnnnnnnnnnnnnnnnnnnnnnnnnnnnnnnnnnnnnnnnnnnnnnnnnnnnnnnnnnnnnnnnnnnnnnnnnnnnnnnnnnnnnnnnnnnnnnnnnnnnnnnnnnnnnnnnnnnnnnnnnnnnnnnnnnnnnnnnnnnnnnnnnnnnnnnnnnnnnnnnnnnnnnnnnnnnnnnnnnnnnnnnnnnnnnnnnnnnnnnnnnnnnnnnnnnnnnnnnnnnnnnnnnnnnnnnnnnnnnnnnnnnnnnnnnnnnnnnnnnnnnnnnnnnnnnnnnnnnnnnnnnnnnnnnnncctgccttggcttcccaaagtgctgggattataggcatgagtgatttttttagaataagagtaattggctgcattatttttttaaggaagaggtataacttcccagatacttgcaatgcggctaatatacagtagccatttactttcaacataatttctcaacatttaatttttgtcagtttttcataaaaaatttatgacagggtaaaaagatgacattcctaagtcctagaaagtttattgatgataaatacaaagaattaaattgcagatcagtcttagaagtgctattctgtggataagcatacagccctgggcagcacagacgggaacatcagatagcccaaccaaaccggaagcttgacttggttgacttaagaattctttaaaactcttttgcgtgttacattaataaagtttatttaatacatgtatttatatgtttcagaaaaaaatgttcttaatttaacatttgtaaaagggtacaatactggtgttttctctgactctgatcttcttgataaacagtgtactgagttctctgtgatatattttgtttgtaatcatgaccatttcacgtgtccataattttttttctctaaaaatatctctagactacatagttctgttattttaggaatgagaataaacgggatcaaagtgtactcttgttctaagaaactaatgacagtttatttgttggaagttctgcctcagaagagcttctgatatttatctaaaatatatgaatagtagttgtgatctgtcattgtttttgcagatatctaattgttgtaataaaagtcataggccctgtcagatagttaagaattttcattattgttgttcacaatatcctaccatttcattgagatatagcttggtgtaataatagtacagtccctggagtaaattttagacaaatactttcccagcctttcaaaatcaagctgagtgttagagtgagaagtagactagtgagtgttgctataaaatttggagtgtgagatcattttgcagtgtgtcgggaacagacttcccaaatagacattctagtattatcttacaactcgatctttccttaaactcaatgtatctgtttttggttgatcattatagatgtctgtgatgtgtgaatatgcccattttatcttctgtatgaatatgctggagaaagagtagccttgcttgtagtctgcttttttccttcttctaaaggagttggcaggaatttttataaaataaagctagcctgattgtagccaaaagaggaaatgttggtttatattttagtggagaaaactgctgtatagacttctaggctaccaagtcagagcattgttttatttttatactatagtaaaatgggtgcaggcggagctgaagaaccagacacactagtagttaatgttttctttctttaccaaaatagtaattgccatgctacatttagccatatgtgccaaagcgtatgtgaaactgttaactgtagccaacatatatttctcctgacttgaatgaattgatgacgaatggtcagaaaaggaggaacagtcatacctagaaatcagcttccctgttgaatttcacttctggtatttccctttgggatatattcactcaggagtgtcaggattttttttgacttccaagggaaagaaactaggcttcagagaattagcattttgatacatctttttattgaaggtcttttgaactccagcaactgttaatctttaaaagatgatgctggtagtgaaatgcattttaaaatttatattcatgaatttaaattcctgattttttttttttttggtgagtttattcttcgaaagaaatagcagtgcttttcaagtgtttgaagactaccagaattgaaagctcactgcttgctaaaagcataatacccaaaccggaaatgataaaggaaaatgtcattgtctttgtattaaaaaagaaaatatctattaaaagtcatcataaacaatgttaaaagaaaaatggcagacttggaaaaatatttgtaacatacacagcaggtgaaaggttattttcctaatatgaagagctcttaaaatggattaagaaaaaatgttcaataacaaaatgggcaaagaacaaggagagaggagtcacaaaagttgatatacaaagacacagatagaaatgatttgtaatatgacaaaagtcgatatacaaagatacatatagaaatgatttgtaatatgacaaaagtcgatatacaaagatacagatagaaatgatttgtaatatgacaaaagtcgatatacaaagatacagatagaaatgatttgtaatatgacaaaagtcaatatacaaagatacagatagaaatgatttgtaatatgacaagtcgatatacagagatacagatagaaatgatttgtaatatgacaaaagtcgatatacagagatacatatagaaatgatttgtaatatgacaaaagtcgatatacagagatacatatagaaatgatttgtaatatgacaagtcgatatacagagatacagatagaaatgatttgtaatatgacaaaagtcgatatacagagatacagatagaaatgatttgtaataagacaaaagtcgatatacagagatacagatagaaatgatttgtaatacgacaagtcgatatacagagatacagatagaaatgatttgtaatatgacaaaagtcgatatacagagatacagatagaaatgatttgtaatatgacaaaagtcgatatacagagatacagatagaaatgatttgtaatatgacaaaagtcgatatacagagatacagatagaaatgatttgtaatatgacaaaagtcgatatacagagatacagatagaaatgatttgtaatatgacaaaagtcgatatacagagatacagatagaaatgatttgtaatatgacaaaagtcgatatacagagatacagatagaaatgatttgtaatatgacaaaagtcgatatacagagatacagatagaaatgatttgtaatatgacaaaagtcgatatacagagatacagatagaaatgatttgtaatatgacaaaagtcgatatacagagatatagacagaaatgatttgtaatatgacaaaagtcgatatacagagatacagatagaaatgatttgtaatatgacaaaagtcgatatacagagatacagatagaaatgatttgtaatatgacaaaagtcgatatacagagatacagatagaaatgatttgtaatatgacaaaagttgatatacaaagatacatatagaaatgatttgtaatatgtatcagaattacaattgtacatactttgtgatccagcaattccatctttgagagttcccaagaaaaatgtggattcatgtgtaaagatacatatgtgaaggtgcatcttacaatagtgaaaaatgagaactaacctaaaatatccgtaagtggaattttatgaccaacatcttctctccaaccaatttttttattatggtaaaatatatataacataaaatttaccatcttaaccatttcgaagtgtacagtttagtggcattcagtatatcccatctatctccagaactcttttcatcttgacagactgaaactgtatacccattaaacaataactcctcgttctgtcccactcctatgtcctggcaaccactgttctagttccttctttatcaattcgactgctctagatacctcatgtcaatggatacatatagtgtttgtctttttgtgattggcttatttcacttagcacaacgtcttgaaggttcatctgtgttgtagcatgtgtaagaatttctttcctttttaaggctgaaaatcattagcaggtgatatggtttggctgtgtctccattcaaatctcaactggaattgtatctctcagaattcccacatgttgtgggagggccataggaggaggtaattgaatcatgggggccagtctttcccatgctattctcgtgatagtgagtaagtctcacgagatctgatgggtttatcagggggttccgcttttgcttcttcctgattttctcttgctgccgccatgtaagaagtgccttttgcctcataccgtgattctgaggcttcctcagccatgtggaactgtaagtccaattaaacaagtgccttttgcctcataccgtgattctgaggcttccttagccacgtggaactgtaagtccaattaaacctctttttgtttccagttttgggtatgtctttatcagcagcgtgaaaacgaactaatagagcagccaccttatttccaaaaaaaaaaaaagattttttcaatggataatgcaggtatttatacccttatttaaagtatgagggatctgaaacccagaaagatggtgacatgtctaaatgtcataactagtcagcgtgagagtcagaactgaaactcatgttttctcatcacagtttcgtgttcttcccagtatggtacactgcttaggccttgaatacaaggaatgatcttttattgttgcttcttcattcctaaaaataagatttttgatgtcacagccttttggaattcattgtataatgtgctggaatttacataaccattcagattaaaggttcgtgtaccttctttagggatagaagctaaagatctaccctctcaaacattttagtagttcatctgcattaacacctttatttaattagccacccatgttgttaccgtcccctgtataaaaagctttgcatattctaacttaaaaaaactttgctatattattatctttgggtattaccagttttgatttctgcaatctgctctgtttttgctactagaggaggaaagctgatttggagttttctttttttcttggttctagttttagtgggctgcaaggattgctttgaatgccagctctatcacttactctgtgatcttggacaagtgcttaaacctctctaagcctcgtgccctcatttataaaattaaataatagtacatgtgttgggtatctaaaatagtcaaattcacagaatcaaagtgtgtaatggtagttgccgggggtagggggaaatggagagttactaatcaacaggaatataaacttttggttgagatgaataaactctacagatttgatgtataacattgtacctgtagtcagcagtaatgcattgtacacttaaaagttgttaggaaagtagatgtcatgttaagggtttttactacagtaaaataaaaaaagagtccatgtgtcataatgaagattaaataacataaaaaatgtgtggtacaatctggcatatacaaactacttgttaaatgttaatatttattatttaatgtttataatacttaaaagtcattttgtatttcgctgtccttcggttttgcttgtttgtttgtttgttttgacacggagccttgctctgtcacccaggctggagtgcagtggtgtgatcttggcttactgcaaactccacctcccagttcaagcaattcttctgcctcagcctcctgagtagctgggattacaggttcgtgccaccatgcctggctaatttttctatttttagtggagacggggttttaccacgttggccaggctggtcttgaactcctgacctcgtgatgtgcccgactcggcctcccaaagtgctaggattacaggcgtgaaccaccgtgcctggccaatttttgtatttttagtagagatggggttttatcatgttggccaggctggtcttgaactcctggtgatccgcctgcctcggcctcccaaagtgctgggattataggtgtgagcccccgcgcctggccatcctttgtattttttgatgaaaaaaaaaaaatttttttttttttttttttttaagacagagtttcactcttgttgcccaggctggagtgcaatgagtgcagtcttggctcactgcaattcccacctctcaagttcaagcgattctcctgtctcagcctcccgagtagctcagattacaggcacacgccaccacgcccggctaacttttgtattttagtagagacagggtttcatcatattggtcagactggtcttgaactcctgacctcagctgatttgcccaccttggcctcccaaagtgctggaattacacaggtgtgagccaccacgcccggctgttttgatgaaattttttgaaagaatgtattcatattcctgtagatttcccatttcccacattccctcaaatttagtttccgtgttaatatcttctattaattttgaacagtgtctttattgtagtttatgcaaagtgaggagtgagtgccatacttattttgcttcctgttgagaataaactgaagttaaattactgacattttgcatattatctcaatcattttttaaggacctgtaaaacagaataaggtgaatcctaatttgctagatgcagatttcttgtagctatttttgattcctgcaggctgctctgatttgctacttgaggaggaaagctgatttgggggttttctttttgtcttggttctagcacatgcagatgacaatccaggctctccaggatgaattgcggatccagagggacctgaatcagctgtttcagcaggatagtagcagcaggactggcgaaccttgtgtagcagagctgacagaggagaactttcagaggcttcatgctgagcatgagcggcaggccaaagagctgtttcttcttcgaaagacattggaggaaatggagctgcgtattgagactcaaaagcagaccctaaatgctcgggatgaatccattaagaagcttctggaaatgttgcagagcaaaggactttctgccaaggctaccgaggaagaccatgagagaacaagacgactggcagaggcagagatgcacgttcatcacctagaaagccttttggagcagaaggaaaaagagaacagtatgttgagagaggtatgtgactacttttttagttttatgatttgttggttatcttttttttcactgattaatcagcatcttggccccagtgaatctacgtgctctgccgtgctggtggaagagaatttcatcttttgtatttaagtgcgtcactgatttctgttctgatttgccctgttgtatgggatgacattgtctggtatgtatgctggctcagtgactttctgggtcttttctctcctgctcccctgattttgagagttcatttgttgctaaaggggtaaaaaattccttgatttttcactcatctctagatctgttcatagagacaacaaacacaacaaaaccagaatcagaatagctaaccattgcttaatttaaaaatattagtaaaagagagtaagcggttatctcagcttatgtgtgcttataaaagtccttggcagcaataatggatatttgccctgtggtttccatggaaactgttgccttgctgtaaaagatacgtgataaaaatcattggctgccatggaggcatagctggagagagtgatgtagagacacagtgttacttatttttagctgacctaggtgactactgataattttttacttttctaaataatgtatcattttaagaaggcgtaaaggaagaaaccatcttatattgaattaaaaaattaatagccataataacttttctatatatagttggacttcaggtaattttcacttttgggcaggggaaaataaatccctaatctgtgttagtatgagtctgaataattcctttttaaataaaatgtgaggaaggaggtttaaaaaatggcgtattcccaaagcagcaaaataataatttttaaaaatacttctaaatttgtaggttgttctataatttttccttttgtaaaaagtctgaaatcttttttaacagtgagggcatttttatttttgaagtagaacatcattgttttttaaaaacatgatgttattacactggaaatccattgtagtaaaattgggaaatagattaacaaaaacttataactcaaagtattgttacctagtaataattattaacttatgtatatgcttccagtcattttttttttattttaaatttttattgtttttatttttagagatagggtctcactctgtcactcaggctggagtgcagtggcatgatcatggctcactgcagccttgaaatcctgggcttaggtgagccttctgccttagcctccctagtaggtaggtctacaggtgcatgccaccatgcattgttaatttttaaattaaaaaaaaaattttgtagagacagagtctccctatgttgcctaggctggtcttgaactcctggcctcaagcaatcctccctccttggcttctgaaagtgctgacattacaggcaatatgcctatgcctggcccattattattattgttgttgttgttgttgaaagtgctgagattacaggcaatatgcctatgcctggcccattattattattattgttgttgttgttgaaagtgctgagattacaggcaatatgcctatgcctggcccattattattattattgttgttgttgttgaaagtgctgagattacaggcaatatgcctatgcctggcccattattattattattgttgttgttgaaagtgctgcgattacaggcaatatgcctatgcctggcccgttattattattattgttgttgttgttgaaagtgctgagattacaggcaatatgcctatgcctggcccattattattattattgttgttgttgttgaaagtgctgagattacaggcaatatgcctatgcctggcccattattattattattgttgttgttgaaagtgctgagattacaggcaatatgcctatgcctggcccattattattattattattgttgttgttgttgaaagtgctgagattacaggcaatatgcctatgcctggcccgttattattattattgttgttgttgttgaaagtgctgagattacaggcaatatgcctatgcctggcccattattattattattgttgttgttgttgaaagtgctgagattacaggcaatatgcctatgcctggcccattattattattattgttgttgttgttgaaagtgctgagattacaggcaatatgcctatgcctggcccattattattattattgttgttgttgttgaaagtgctgagattacaggcaatatgcctatgcctggcccattattattattattgttgttgttgttgaaagtgctgagattacaggcaatatgcctatgcctggcccattattattattattgttgttgttgaaagtgctgagattacaggcaatatgcctatgcctggcccgttattattattattgttgttgttgttgaaagtgctgagattacaggcaatatgcctatgcctggcccattattattattattgttgttgttgttgaaagtgctgagattacaggcaatatgcctatgcctggcccgttattattattattgttgttgttgaaagtgctgagattacaggcaatatgcctatgcctggcccgttattattattattgttgttgttgaaagtgctgagattacaggcaatatgcctatgcctggcccgttattattattgttgttgttgttgaaagtgctgagattacaggcaatatgcctatgcctggcccgttattattattattgttgttgttgaaagtgctgagattacaggcaatatgcctatgcctggcccattattattattattgttgttgttgaaagtgctgagattacaggcaatatgcctatgcctggcccattattattattattgttgttgttgaaagtgctgagattacaggcaatatgcctatgcctggcccattattattattattgttgttgttgttgaaagtgctgagattacaggcaatatgcctatgcctggcccgttattattattattgttgttgttgaaagtgctgagattacaggcaatatgcctatgcctggcccgttattattattattgttgttgttgaaagtgctgagattacaggcaatatgcctatgcctggcccattattattattgttgttgttgttgaaagtgctgagattacaggcaatatgcctatgcctggcccgttattattattgttgttgttgttgaaagtgctgagattacaggcaatatgcctatgcctggcccattattattattattgttgttgttgaaagtgctgagattacaggcaatatgcctatgcctggcccattattattattattgttgttgttgaaagtgctgagattacaggcaatatgcctatgcctggcccgttattattattattgttgttgttgaaagtgctgagattacaggcaatatgcctatgcctggcccgttattattattattgttgttgttgaaagtgctgagattacaggcaatatgcctatgcctggcccattattattattattgttgttgttgaaagtgctgagattacaggcaatatgcctatgcctggcccgttattattattattgttgttgttgaaagtgctgagattacaggcaatatgcctatgcctggcccattattattattattgttgttgttgaaagtgctgagattacaggcaatatgcctatgcctggcccattattattattattgttgttgttgaaagtgctgagattacaggcaatatgcctatgcctggcccattattattattattgttgttgttgaaagtgctgagattacaggcaatatgcctatgcctggcccattattattattattgttgttgttgaaagtgctgagattacaggcaatatgcctgtgcctggcccattattattattattgttgttgttgaaagtgctgagattacaggcaatatgcctatgcctggcccattattattattattgttgttgttgttgttgttgttattattattattattattattattattattattattattattatcatttgtgacagagctttgctctgtcccaggctggagtgcagtggcgcaatcttggctcattgtaacctccacctcccgggttcaagctattctcctgcctcagcttcctgagtagctgggacaacaggcgtgcacaagctaatttttgtatttttagtagagatggggtttcgccatgttggccaggctggtctcaaactcctgacctcaggtgatctgcctgactcggcctcccagagtgctgggattacaggcgtaagctactgcacccagccccatttttattatttatagattccttcattatttgtttctttttttatcttacaaggatggaatgctgtgcatcagcactgttcagaaagactttctgggtggagtgctaattaagttgggaaggggattttataacagggtaagtgtcctttagtaggtaccctttcagtggagatctgaagagaagaagccagctttgccaagtaaaataatttcatgaagaagcattaacagttttaaagacctcataggaaggagttttgaggaaacaggagggaggctggagggcaagaatatactgtataaggggaagacttaatgagatgcgaaattggagaggtggccagagtcagattcacttatcacgtatttactggacaccaaccatgcgcacagcactaaggatatagcagcaaacaaatccatgctgtctttgagaaaaagtacctgcctttatgatccttgcagataatgcaaccattttattcaaaatgggagagaaaaccattccaccgttgaatcaagggagtgacacaatctgatttgcttttaaaatttactctggttgtgctgagaataaatggaggaaggagagaagagtgaacaagggagtatagtaaggaatttaactgctgtaatctagattaggggaatggggacttgaaatgattgctggagatgtacagaatatcactagcgtatcaggaagcagcacaaagaattatgggctggcaatgctagggtatccagaaatttcattagttattgaattattgtccatcttttaaaaaaaagtggcatttaatcaattcttttttttttttttgagacggagtctcgctctgttgcccaggctggagtgcaatggtgcgatctcggctcactgcaacctgcgccccctgggttcaagcgattctcctgcttcagcctcccgagtagctgggattacaggcacccatcaccaggcccagctaatttttctgtttttagtagagacgaggtttcaccatgttggtcaggctggtcttgaactcctgacctcgtgatccgcccgcctcggcctcctaatatgctgggattataggcgtgagccaccgcgcccggcccacatttaatcaattctaaaagtcacaactttccctgttttaacaatgaaattgagttaagtgttaacacttggtgtcatgttaacagtctatatcagcaaagcagcagtcctggtatatttgtttgcccgtgtattcacaaatataatcatgtccattcattttgtcatcatttcagctgaggtatgagcattgttggcatttcccatgttaactttgttgttcagtgtttctgcataaatattctgtgaatcagcattgaaacaaaattacccggtatggagaaagttatgaaaacagtttatgatggtatgtgattaaactctgtttaaataagtttaaaaaaactaactcttgcaatcagtattaagtaaaaattctagggcgggtgcaatggctcacgtctgtaatcccagcactttgggaggccaaggcgggcggatcgcctgaggccaggagttcgagaccagcctgggcaatatggcaaaaccctgtctctactaaaaatacaaaaattagctgagtgtggtggtgcacgcctgtaatcccagctctttgtgaggctggcacatggtaattgcttcaacccaggaggcggaggttgcagtgagccaggattgcaccactgcactccagcgtgcagagtgacactctgcctcaaaaacaaacaaacaaaaccctaaatttatgataaagttttgtgtcatgatttatttggaggcatttccactatttcttttcagcatgtacaacagtggtgtgtcttataatcagtggcatcttagatttgatgaaataagatagcattaaaatggcatttgtagctattagtagtaacatttgtaattagttttacgttttctttattaacatgattttgtagctggcaggtaaataattctcccccccaaaagccgagaggtaaaaagtaagatttcaatgaagcattgtattttctgtttgtactcaaatcacattgttgtttgactgcttattcttagcttttgtattatttcgctgtagctcctttcatttgactgttagaagagtggggacatctcttggacaaatgctgaattacaggcaagacttggttagtgctgggggcttgacaggtgattctgttatacaccaacatttgaggccccaactttggttttcagtccgctagcagaggatacctaagttggctgtggaatttttgggtcttcaatccatatgcataccaaacattgtctataggccaactaaataatatatttcagtatgtgctcctacttacttaaatgctggtatgctattgtgattaataaaatacaactttgttttaaaacattattgcagcctactagttttttgtctgtattttaatcaacaaaccgtattagtacaactgctatcgtgttaggtttgcaaaaatctttgaggttaaaagtgctaatatttgaatatgttctaggctagggaattctgaatctaactagcatatctgaggactgcttgtcagtttgtcagtattactggcagatagaaggtataagcagaggagattaaagaaaaaaagaaacatatatatatgtttatgtgtatttatttatatataaatatatatttttctatatataaatgtatatttttctatataaatatatatatttttctatatatatatatatatatatatatatatagaaaaacatagaaaatgaataggaatttaaaaagaaattttttttttttttgagacatagtgtggctctgtcgcccaggctggggtgcagtggtgcaatctcagctcaccgcaacctccgcgtcccgggttcaagcaattcttctgcctcggcctcctgagtagctgggactacaggtgcctgccaccatgcctggctaatttttgtatttttaatagagatgaggtttcaccttgttggccaggctggtctcaaactcttgacctcaagtgatcctcccggctcggcctcccaaagtgctgggacaacaggcatgagccaccacacccggccaaaaaagaaaaagaaattcttagtttgtcttttgtagcaattttggaagatgagaacagttgcataccttatttatttaagttattccttctctctctttttttttttttgcaacagagtctcgctctatcgcccaggctggagtgcagtggtgcgatctcagctcacctcaacctccgccacctgggttcaagtgattctcctgcctcagcctcccaaatagctgggattacagacgtgtgccaccacacctgggctaattttgtatttttagtagaaatggggtttcactgtattggtcaggctggtctcgaactcctgacctcaagtgattcgctggtcttggcttcccaaatgctaggattacagacgtgagccaccgtgcctggcccttcctctcctttttaaattacatcatttgtccttcatttccattttgacaaggtgacattttctgagcacactactattaccagagatggtaatgggttcaggtacaatggtgtgtgacactgggcaagttaagatacgaaaaagtggtaacagttctttccatttaccctcccttcttttttatttctgtctccgctgtgttgtcagtatgataaattcagaaattgaatctgtgaagggacttcccgaacaatgtggagcttctatccttgaaccaagggtgctgagggctaagacttgaaacttgaaaaaaaattttcagacctaagttttactttttagtcacacatacttctttctctcaggtgtgcaagtaaaagttgacttacttttacaaagaaacaactagggaaaaggagaattattaaattttgtttctcaggcgtggtggctcatacctgtaatcccagcactttgggaggcttaggtgggcagatcacttgaggtcaggagttcaagatcagcctggccaacatgctgaaatgccgtctctactaaaaatacaaatattagccaggcatggtggtgcatgcctgcggtcctagctatttgggaggctgaggcaggagaatcgcttgaactcgggaggtggaggttgcagtgagccgagattgtgccactgcaccaaaaaaaaaaaaaaaattgtttctaacttgtttattttctaaatataaattagtcattattctttagttatttaaggagagaaaatgaacatattttttatggtctaccacatttgaaagtatattatagcaacattaaatggactaagacaaaaaaagacaaatagactatataacaagattcagatacttctacctctaattttttcaaatgaaaattttcagccaaaaaggagtgaaataaagtgaccaaatagcatattctacttcttacacttctttgaatagtacttctatttccagtcttctctctctattgacaatgcgggaggcataggcttgatgtgcttggtgggaaaggggagcttatgagctcactgactggaagatgtgttcatagtgaactgtaaggtgcaggcttctgaatgggagtttgttttgagcaatgggttttaaaacgtctttgtagaaaagctttatgcctatggatggtttaaaatacaccccaattctttattgtacgcagggaaggatttttttttttttttttggagatagggtctgactttgtcacctagagtgcagtggcgtgatcttggctcattgcggcctccacctcccaggctcaagcagtcctcctgcctcagcccccgcaagtagctgggactacacatgagcaccaccacacccagctagttttatgtgtttttcatagagatggggattcaccgtgttgcccaggctggtctcgaactactgagctcaagtgatctgcctgccttggtttcccaaagtgtttggattacaggcatgagccactgcacccagtcaggactttttattcaaatggatttttctgttttctttaggaattaggtgatgctcaagaggagaaatcagatgaaataagttgaaaatctaaattgtgtgttattttttaaaaaatgcagttttaatattttcaagtagatacagaaataccaaataaaaatgttgtaaagtataggttataaaattttgttaataaatgaagattgtttacagttagcagagttcattttatttttactcagacaatttaaagttcgacactcatttattgaacaaatactgttaaatatctaccgtgtgcccagtcaatcaccttgtagtgtgcagaacagattcaacatggacaaactaggctgggaggaggctgacgagtttgtcgttttaaggcaggtgagagattattatggcctaaactaattaatgtgttaggtgttgggatggaagaaaacaaataattttaagagattttaaaaactcttttttgatacaatatggaatgcatgtaagaaatagaataaaacaggtgtatagttaagtaaattataaagtaagcaccctcataaccactacctaggtctagaaatagaactttcacagccacccagaagtcctgtacgtgaaccaacccagccagaactctcccttccctctaaaagtaaccagtgttctgggttttatagttatcatgcctttgcttattatacttatcacatctgatccttactatcatagtattgttatcttgtattatatgttaaattaatatcattcctaggtatcatccctaagaattatgtctttgttttgtctgtttttcaaaaatatgctttaaatctcttaattaccgatttgcccttaattcctccttttttttctcgtgcagttggagcatttcttggcttattagctggaatgacaattccatcatctttgtaatatccatgtttatttcagtggaatgacttctctcctggttgtaggtcatattttcctacttcgtgtgtatagaatttgtggtatgatggacattttggacacaaggtgattgagtatctggattttggtaccttccttaatgaagggttgttttgtctggcaagagttaatttacttggggattaacttgatcctttcaagacttgcttttaaactctgttaggcctggtttagaatagccttttctctaggctacatcagctctactcctaagcttgaccttttagtgtctctactaaatgcctctgctgttctccccactatttggaacttgaatttttcccagccctatggggttcaggtagttgctcaactcatggctctctgatagttgctctttctccagtagctcttgatcttattttgtggcagcttgccctatacatgcacagcttagtatttggccaaagactcaaggggacccttgtcaggttagacagtgctgcttttctggtaagctcccttctctgtgttttgtttttaatttttaatttttttttttttttttgagacagagtctcactctgttgcccaagctggagtgcaatgtcgcgatctcggctgactgtaacctctgccccccaggttcaagcgattctccttcctcagcctcccgagtagctgggattgcaggtgccccccaccatgctcagctactttttgtatttttggaagagacggggttttgccatgtttgccaggctggtcttgaactcctggcctcaagtgatctgcccgccttggcctcccaaagtgctgggattacaggcgtgagccatggtgcccggacctctggtattttgctccgcaaagttttgcagattaatgggaaccttactcattaaactgtctttggagctttgcaagactgctgttctttgtttgggctttccctccctacgccccatactagacatatctgggccatcaccttgtttattttctctcaaggatcatagtcctgtattgcttgttatccagggtctgaaaacagttatttcatgcattttgtttaattttatgatagtttatgacaggaaggcccatctcaccttatggtcaaagtgagaagtataatggtaaatttattgaaagatttaaagcagattaatgccatgatttgtggatattttatcaagataaccctggtgctctcttgaaaatagacaaaggaggtggaagaaagctaactagaggctgttgcaaactagactggaaatggggtgaaatggttagactcaagaaatacttccgcactagaacagttaggacctgctgttgacttggttgtgggaaatgaatatcaggaggagaaaaaggagagctttggtgtttggcttgagccactggaatggcagtgccatttaatgagacagagaagactcatctctcatcagagtcaccagatgatgggtgagattgaagaagaggaaatcaagaattttttttgataaaatatgtgtgagttgcctgttagacatctaaatagagatgccaaatgggcagttggatgtatgagtcctgaaatcagagcagagggcaggcctagaaattcatcagcatttccgttgtattttaaaccatgtagtagattaaagagtttagatggaaaagagaaaaaggttagaactgatcacctggtcactggtctaatttagacctggaggtctgatttagaaggaagaacctgtgaaggaaacagagaaagtgcaactggagagtgagaactaaaaacaggagagtgtgatgtcctaatagtcaagagaaaacaagtgtctaggagggattgggccgttgctttgaatgcttctgagagttccagggagatgaggacagaaatgtgtttgttagagttggtaacttagaattcgttggtggtcttgatgagttgtttcaatggaggggtagagaaacaagccagattaggctgcttttatgaggtaaagggaatcttgtatgtctgaaatattttaaaattaattaaaataaaaagagtgaatgggagagggagaggaagaaggagagatagcaggtgtggaccagctgtcttcagggcaggcatttgaacaccttggagttcacagagactctgcagtggtgtgtgggcagtttcagattctcaactcccatgtgtcattctctggattttagttggccgaaaacatacctgtgagatcatctttcccctccctttttatggttgcactttgcccactctaactcctgttcatccttcagctctcaggtgttccttaggaaactttacaagatcccaagactacgtcaggatctcctaattactctcttacagtattgtggatattttctttatgacactttttacatatgaattatacagttacttaaaaagtattttcattcatttgacaaatatttgagtactatcattgtactgtgtattgttctgggtgctgatatacatcagagaataaaaaagaaaaattcctgggataggagagacaaacaataaacaaacagttataaataccaagaaaaaagtagatcttggttagggagattggggatgtatattagagtcaaatcataagtgaaaatggggtaataaggatgagcctgcttgagactttgattttttttttttttttttttttttttttttttgacagagtcttgctctgtcacccaggctggactgcagtggcaccatctcggctcactgcaacctccacctcctgggttcaagccattctcctgcctcagcctccccagtagctgggattgcaggtgcgcaccaccaggcccagctaatttttttgtatttttagtagagataagattttaccatgttggccaggctggtcttgaactcctgacctcgtgatccacccgcctcggcctcccaaagtgctgggattacaggcatgaaccaccgctcccagccgagactttgacttttgaacagacttcaacagttaagggaaggagagagcctgtcaaagggagcagtgagtgaaaggccttaagtcaagagggtgactgacatgttgaggaaaagcaaagaggtgagtctggctggagccgactggatgagagagaggagtataagagatgaggccagagaggtaacagggccggatcatgtagagccttctaggtcagcataaggactgtgacttttactgtgagtaaaacgagaagcttttgataattgcaagcatattttgacttctgctttaaaaagatcactctagatgctctattgtgaatggtgagatagatttgggagactgttggtgtaatccaggcaaaagataatggtggcttagagcagtgtgatggtggaggtggtaagtttcaggatatattttgaaaatgggaagagcaggatttcctgatgagttggatataggtgtaagaaaaaaagagactcctatgtttttggcttgaacaactggctggatgcataccatgaatcaaggcaggatgagtgaagcaagtttagaggggaaggccaggaggtcacttgcagatgtgttaacagtggggcagatatttgatactccaggaaagtaaaggtacatacgagtatggatttcagtaggaggtaaacatttgggagttatcagtatgtgcatgatactgaacagtaaataccaagggaatgagtataggtggaaaagagaagcctacaaaggactgatgcttgggacactcctgaggagttgggaagaaaagcttagggtaagataggaggaaaagcttagggtgccataccttgaaagccaaggaaagagagtagaataaggaagagggattgagcagttgggtaaaatgctgctggtcaggtacagtgactaaggatgcatcatgggtgctagcaatgtggaggtcgtcagtgaccctgatgaattgcatagatgattatttgattaaactctatttttcctattaaagcttccatgataaaagggaccaaatatgttatttctcattattatatctccaaaacttagttcctggagtgcataaatgggataaatacataggtcccagagcctctgggaggactagagaactgggctccgaagttatatagacaagaataatgcctcgaatcaatcacacttctatattgctttagtgatgacagtgctgcgtggcacaggcatgtgagtgtgttacgccgacatcactgacactgctcaccaccactggagcctctgctgttggtgtgtctggaagcctgaggtagctgctgcctctgccacccactgctggaattgtctgtaaatattcatgtcccggcttcttcatgtcacaagattctgtttcaaagtacatgacgaatgtgtctgattgaggtgattaggtcatgtacctgggctttaatcacaagaaaggctgggtaacaagtatgtggcattttcaatttctgttgtgggaggtagactctgcctttaaatgtggagttcccacacatgctaaggaattcagatatcacacggcgaggaagagtgatgaatgcctgccacggtgcgagataaatagattttgtggggtatacgtgtaaaggtaatagttgaaaccataggattagggaagggctattttggatggttatttgtacgggttgttcaccaaacaagagcttcctgctgatggagcccgtaggccctaaaattcagcctgtgcttcatggtgatgttgcatctacccaagaagggttgctttttttctaattcgcataaagttactctgtggattagtgaaggctttggattcaggctatagaatccagatgttccaaggacaggaatttagaaaatgtctgcaggtaggaaaggaaaagggtggagtttagagctaggataattctttaatggaagccggttgaaaattttaaagacgttccttctttaacttaaatttttttttttctggtaccagctagagtttgcaaaggaggtgaactgacaataactattaggtttagaaacaaggaggttttttatttgctattttagatcgtatggttcagtggagaggtgaggatagaaactggctgatcattcattcatcattcattccttcatctaacaaaagaggaacagatagagaggagaagtaatttttaacgactgcttacatatcagacagtgcctgaggaatacagaagacagtttctaaaagagttcacagtatgatatgttagagaagaaaaactattgctaatacaatggggtaagtgctcatggagctatgtaagctgtgtagcatgctgtatgagaaataggaggtgtacaaaattcagcacaggagtaggaagggactaaaatatttcctttctagctaattcttgaacgtttggtagccatttcattcattcagtattcattccttaaatgtctattaagcgcttaccagtgtggcagctactgttgtaggtgctttggatccatcagtgaatgaatgaaacaaagatcttagcttttgtggagcgtacattctcgtagagaataataagtaaacataataaatcataaaatatgttagagggtaagtgctatacacaggaaaaagtagagcgaagtaaaggggaaggacacatgcgttcttttttggctgtgttaaattttaaaataaggtgtagattatactgaaaacgttgaacattcattttgttatgaaaaatttcaagcctacacaaaagcagtaagaactgcatgatgaatctccacatgctcatcactcagatacaccagtttcgaaaattttgccacacttcctccatgtattcttttttctttttcctcttttctttaccaaagattttaaagccaatccctggcatgacgtcattttcctctgcagactttaatatgcgtctctaaaatatatggacattttcttgcatagcgacaatggcattatcacaacaactaaacctaatactaacacaaaagaggcatttgagccaagactggaaagaagtgaagtcttcccctagcagcttgtgcaaagggcttaaggatcaggagcatgcttagcatatttgaggagcagcaaggagtccatagtggctaaagcatggagacccagggaagagcgatgagatgaggcctttgcaggctgccgagaggacttgggctctagttggagtcgaatggggagccatgacagggttttcagcagaggactgacaaggacaactttatgtttacaagggtcacttgaagtgctccattaagaaaacactgtagtggagcaagataaagcagagctcagttagaaggttgttatggattaaaaggtatatttttgtttagtggttcattccaggtggtggccgtggagatggcaagaagtgcttggattttgggtatgttttgaagctagagctaactggatttcctgactgcggcttgagagcgaaaggaaggcattaagaagactcataggtttgtggcctgagtaacaggaaggatggagcaggtttgggggcaccatcaggagtagagatgacatcttgccatgttgcccaggctggtctcgaacccctgggccaaagtgaccctcctgccttggcctcccaaagtgctgggattacaggtatgagtcatcacgcttggtcaggagttgagttttgagcatgtagagtttgaaatgtttgttggacatgaaagtgagatgactaggtggatagttaaagctggaagtagggagagaggcagcagaaagcattcatctctgtattccctggattcccaagagcctgtccccagggtacttggaagtactgacttatttagagacattcacagagtctgacaagaaaatcactgaagtggtttggtaacctggaaggctctgatatcccttccttccttttctatcctgaactcagtaaaatttgggtaaaaaaaaaaaaaaaagctatgtttttctgacattttctgaacctgaactacttaggaaacttgttcaacagtgtcatgtttttcttcctaactgtagcaccactagagagcgagcttcatcgtaggtaaccaggtggtggttattctgggggtggatgccgtggaaaggatgttgtcaacacagattgctttccacagctgcagtcagcaatgcagactgattgtgatggtatttatttctccttttaaaagggagcatttctaatccccattttggatcatttggaattctgattatatttcccggagttatgtggaagattgacacacaacctgaggatgtgaaatcgtagtttcagctgttatggtagctcgtgtctgtgtgactgattttaaataactaggtgttcagagatagggatcctcctatgcctgcatggttgagtgagcctgaatgcagtctgtggattccctgattcacagggaaaggttggtaacacagaaggggtcattgtctcataaggctgtagtgatcttttgcatacatcggctctcactcctctttgaaaaaaatgagggtgaacaggagagcactgaatctctttctgcctcttttctacaggagatgcatcgaaggtttgagaatgctcctgattctgccaaaacaaaagctctgcaaactgttattgagatgaaggtaagtgagaatctagtaaagaatcttatgaattaccttatacttttaagtgatcaaaaacttccatgtgtgagtgttaggaaatggcatgtaatagtatttcacttatttggagattaagagtgagaatcaatgaaaatgacatcttaaaagaatttcagttttatttccttttacttgtagaccataattcaaattggaccaaaaagagttgaacagaatttctttaaatcagctattcgcagatgtcttggtctcaggacccctttattctcttaaaatgacagactcacttccttcattttaagaaaatgtctgccagataccaagtctgggtaaccatagcttgtcagttttctttcaagtaaaaatagtgttccgtgaagaaaatactgaattcagtttacaactcaaagcaacacgagtcctgtgcttagggacagccatcgtatttcagtacgcagcttcattccatttgtcacacacaatattaaaagtatgtgtactccagagttgagatttttttttattattttttatttttattttttgagatggagtctcgctctgtcgcctaggctggagtgcagtggcgtgatcttggctcactgcaagctccgtctcccgggttcacgccattctcctgcctcagcctcccaagtagctgggaccacaggcgcctgccaccacgcccagctaattttttgtatttttagtagagatggggtttcaccgtgttagccaggatggtctccatctcctgacctcgttatccgcccgcctcggcctcccaaagtgctgggattacaggtgtgagccaccgcacctggccaagatttattaaaagtaatactttttactgcttcttcaagggcagtattaaatgaagtagtcttttaaaaattttatttcttatttttcatttttttcctacaagtacttgacgtgacaaatattaatataatgactacaagtatggtttgatgccattgccttgatttgtgctaaggcactagcagttttgcccatcattgctgtatatctttagtgcagacagtggaaaagtcaagtgacatcatggtattattgtgaaaatagttttgatcatgcatactttgtgaaagggttgagggtaccctgagagttccatagaccatcctttgaaaacctctgccttaagttaatgaatatttagaaatctttaggctgttcagtatagtgattaagagcttgctttctaagttaaactccctggattcaaaatctcgcttcacttaaccaactgtaagatatggagcaaattacctatgcctcagtttctttatcaacaaatggtgatagtaatagtactcatccagtgggtcgttttgaggtttaaattagttaaaacatgtaaaaacactttgaacaggacctagcgcatagtaaacattcaatccatactagctgttgcagctgttatttttgttcacaatctgttctttctcataaaagttcatgtagttagggacctccccccacaactacttcttcatatcctctagaaagctcaatactgtgttttgcattgtgggccttcatttaatatttgttgatatgacaagaatatttagtcaatggtatataaataattttatgtaaatagatacttctgaagtagttatgggaactgttgtcttaatttggatgatttcctcttaaaactttatatcgtatacatctttattctcggtggggaaaggatttaccaaacaaattccgaattagtggattctgggttctttgtagttaattggtagtcttgagtataatcttgtaaagggcctttagaatcgttcagttgcatggttttaccctttccacattcaccacaagtttgttgtgttatttcctgatcccttgttaacacctaagaataaaacacatgaatgtacctatgtccacaaaatgatttgtttaactgccttttgacagaatgaggacgagtaatagtattacttggtggcaatggatgcattttaagttgtgtgaaccttcagccattctgctaagaaggagaaagattctggtggcccagtggggtcaagaggatgtgatgctgaaatcacaacagaaatagctgtgttgctgagaatgtggaatgagcttcagagaattatgaaaatctagtgtagtctttagggaaaatagggaagaaaggtgattgaagtaaaagagcccagtaatcttgaaggtgatgcaattttctttgccctctcctctttcgcctcttcttcctctctttcctcttcttatcccttctcccaccattttccctcattccagcctttccttctttgttcctcttcttctctttctcttcctcccctttctctactatttttttgtttgtttgtttgtttgtttttcctttaccagtggaggaacagggaagaatgactgtactgctctagggttagagttttgctgggatagataaagcagagcgagtgattgggatgcaaatgaattgagggtgatgatgacagagtagtttggacgttggtcctggactgtaccctggatctggaaagagtaaaattcaggtggactgacaggttgggagaaaatgtaaaagttaggaaagtggaattctctgtgaagttgaacaggaaataatcagagtgagggtatgacaggccaggggaagagagttctggatgatgataggatccatcagtcctataaactggatcacccaaatggactggaggatgagatcattgcaattaagggcgtcaaagaattctgacattgcaatcctcggattatggcaagagtggtgattgaaggggatattgtaagccaggtgccaaagacttccaaaaatgggcaggagtgatggagaagtccctggatggcagcaatggggagggtagggtgaaaaggagtatgagctttccataaagggaaacagccttgaagaactgggagaatgtcaaccctttcccctgctcctttgtggtgttggggtgttattgaccttcactggagagagttcatgggaaaaaggttgagaatttggggaatttgacaaagagcagaggatttcagtaagtccagtgggattggttggttaatgatggaagggctggggctggggaagtacagagtagtaaagtgaaaaggaatttttttatttaaatattacacattctaggaataagaaacctggttggaatgactttccttaaacccagcattggtacccgttgggttggtgctagaactagttgagagtatcaggccttaattttctggcctgatttccttggtaggttcttcttctggtcagtcagtacctgcctcctggttttcagagctggagtcatgatccctttttgggaagaaggttttatggctcatgatttggtagtgagggtgctaatttgtcaaaagctgcctttgtctgtgtttagggtaggggagaagttagattatatttttaagggccttgtagagactttctagaggctctgtacaggttccggctgccatgtgatgtacagagttggagttcttacctgggactaaattgtcttgagtggagccccagtgctgctggagatacacttccctctttcagctggtccagtttcattaccactcaggctgatgacagaggagaacttacctttaactttcactttctttcatttgtaggctagtcatatgcttatgcctagtattttagtcttttttaaggtgctgtgttctgatatttccagagaaattttatagcaatcttaaaagtgaattttcaggtagtgcaattgaagtagtactttttatgggtcagtcattccacatgagtaaataaaaatcctggtttaggtatagaatgactctgattgtattaattcagtacaatggattttgaacaggtacattttaagtttaatttgaatgaatttataaaagacagttttcattgtgatatttttaaaggtcacgtgatgagcaagacagaggaatacatcctctcctcccctcccttgaacctgaaaatagctaggtgtagttttctcgatataaagccttaatctctctcatctttatgctctgagaataaaggagacttaatcaagaaattattgaggtaaagtagaaaaggagttaatttcaaaatagcttccaaaggaatggtttatctaaaactccaagtgaaataaagctaagctatacttaatttatgctctttaaggtctctatttctttggtgagtaagcacctgcagctacagatacataaaactattcattccatgtaggagtctttctgtaattcatgacatgtaaagtagcctggggagaaactaggtactgcgacaaacaaaatcaagagatcgaatatgaaataatgttctgttggaaggtgatatttgtggtagagatgatggtttataaggacagtgatttttaaaaattaagaattattttaaatgtatgaagtacagacaataaggattgctaacatgataaataacttaattattcccccatttttctgcagtgggatgttatgtaatttttattattgcacatatagctgtacacgttactgtataaatctttgaaaccctcttacttttttcccctcctttggggcataatatgttttttaggggtcaccaagtaaaatgataaaatactagaactagaaaaggctttactattaatattggaaatttttttcaccagaaatttgtaatttctgatgcaaagaaattttaaccagtttttcattgcatttacttcttcagtaatttagtaattattttcaactttaatttaaagggtgcagagctggaggcagccatagaagaaaaatcatactgtggatatgagtgcttctcctcccactcaaatggctgtaaaggacgtattttagaaggaaggcactggctgggcatggtggctcacgcccataagcccaccacttttggaggccaagacaggtgtatcacgtgaggtcaggagttcgagaccagcctggccaacatggcaaaaccctgtctctactaaaaatacaaaaattagctgggcatggtagcgtacacttgtaatcccagctacttgggaggctgaggcaggagaactgcttgaacccagaggcagaggttgcagtgagctaagattgcgtcactgcactagagcctgggcgacagactctgtctcaaaaaaaggaagcaaggcaccaattgccagacagcattttttctgtatatttgtctatctttattaaatgtaacttctttaaatatcatgttattcagcttttctgggtttttgtgaatacttcaatcactaaatcttccattgtcttcaggattcaaaaatttcctctatggagcgtgggcttcgagacctggaagaggaaattcagatgctgaaatcgaatggtgctttgagtactgaggaaagggaagaagaaatgaagcaaatggaagtgtatcggagccattctaaatttatgaaaaataaggtaatggcatgtgagacttttgattcttaaaaggagtttgaaaaattgatgcatattttttacttctctagtgatgataaagccgtattttacactcttttatcaggtttcagggaagaatacttttagcatagttctttcaaatgaaacttctccagaattaaagtcagaattactgacatagatagttactacaagtttttacttataaagacaattctctgtatgaggctacatatgtattgtcatggtttaagttttcatatctattagtacttccgaaaaacttccagatgagtttttctcactatatgaaacatcaggttctttacctcttgtgaattatttaaaaagtcaaaaccctaagaggcttgagatggagtttcgctcttgtcacccaggctggagtgcagtggtgtgatctcagctcactgcagcctctgcctccatgttcaagtgattttcctgcctcagcctcccaagtagctgggattacaggtgcgtaccaccacacctggctaattttttgtattttttgtagagatggggtttcaccttgttggcctggctggtcttgaactcctgacctcaggtgatccacccacttcaatctcccaaagtgctgggattacagacgtgagccaccgtgcccagccctaagaggctttttaatgaaatgggtgaaatgaagttacgtttcccctccaaatacagttctgtaacggaaagccctttctttgccctatcctgtggggaagatccacttgctgtcaggtttattgcttcccatgtgcacttcaggcgtaatatgacaaagattgataccaccaagacctatcagtctgtgtttatcatcagtcacaatgttccttccttgtatccaaagtcatttagtttgattctgtaaactatttaggcaagttggaggatttagtttatcacaattatcaatttaccagttttgttgtggtttcattaaacattatgattgtaattataaagtttaagccagaaaataagtgttttccccctttatttcccagttgtattctccaggttcttagaaatgaaacccgcaacatcccagtagtgtgaaggaatgataacatcacttcccctccagtttctggcttcttgccatggtgcccatacctggcatataagtctacagaatattcctctgctacctccagactctattattaattatttctactactttcatttcagttttagaaattaaaaactcacatacccaactttttttttttttctttttctttttttttgagtcggaggtatgctttgtcgaccaggctggagtgcagtggcgtgatctcggttcactgcagcctccgtctccagggttcaagcttcagtctgctgagtagctgggattacaggcgcccaccaccatgcccagttaatttttgtagttttagtagagacgggtttcactatgatggccaggcaggtctcgaactcctgacctcaagtgatcctcctgccttggcctcccacggtgctgggatataatcataggtgtgagctgctgcgcctggcctcacataaccaactttctattagtttggatttttcaccctgatttgagaacaagacatagtgccgtatgatctctgtgtttatgtttttcatttgttgattagcacattccagtccactgtggggggaaaaaacctgtgaacttagagaaactacctatggctctttgaagagggaatgaggggaacagatttgattgtattatataagttattgttatttctagttaccattctgcctcaaaagtagacaagaagaagacctaagttgacacataagtgaaaaagaataataatgtcgtgacaggtagaacaactgaaggaggaactaagttcgaaagaggctcaatgggaggagctgaaaaagaaagcggctggtcttcaggctgaggtctttgccgtaagatttacctctttgtgtgcagtggtcccacagtgggaccctgctagctctatggcttctgggtggcttaccctttcattctctatggttggcagctttgcccattactagcactaaccagcctgctctgctctttaactgactcctgttcactagtttgacccacatgtcactttgtgtgcagtgagccttcacgtgttctggaagccttgtacctggtactttattgttgcttttgtcactctgtggatggtatttcaaagcctgtttctttctcaaccctttattgttggtttatatgaatggcggccttcttttcttcctaggtacaagaatatatgcagttgttctaggcctatcacctagagtttatttgaatttgaaactcttgagcaaagtgctttaccttatgtagacattatctttaagtctccagtgagtgattttgccacaaatgttactttctttaggacagatgtatagaaagtatttatctagtaaattgaaattactaagagacttatttcaggtatctaaatctagttcaatattctaatgaacttaaaatttcaattcagaacataataataaaataaatacagttggccctccatatctgtggatttgcatctgtgtgtttaaccaactgttttttattttcagggtaaaaaaatggatgttgtgtctgtgctgaacatgtacaggcttttttcccatgtcattattccctaagcaatacagtatgacaactatttacattgtaaatatttacattgtattacgtattacaagtaatctagagatgatttaaactatactggaggatgtgcataggttatatgcaaattctacatcattttatatcagggacttcagccttcattaattttggtatccaaggtgtgtcttggaaccagtcccccatggacccatggataccgagggatggctgaataataaagtagctaacacttgcacacttactgtaaacattttataacgtgctgagttagacatattatcaactccaaattatagacgaggaaactgaggtaacagaatggtgcctaggaaaacacagctagtaagaggcaggatttggttttatacaggcagtcttcttccacatactgcttacaagttctttactgacctatactaggctgtgcacacatttgtcaaagtgtcagcaaaaactgcttctgaaaataattgtggctaagactggaataaaaaaatacagcatttaaaaaaccaaacttgggctacttttgtagatttgctatttatggtccactttatagtatatattaaaaagggaaatattttggtggaaagggtctaatttggtttatggaaaccatatattggctagagggaaggttgatcaataacttcctttttaaaatagctactattagtaatttctgcattgagtcagacaacaggctaagcacatttcatgctttattttactgaatccataaacagtacagtggcattcgtataatttctccttattactaattaggaaactgattaggaaagtaattattcagggacacatagctagcttagttctgataggtgaatgtctgcaaagccttgtgctcctaagctttgtattatatttgcttcccctttataatgtcttcccttctcagtctttaaggaaaatttgtgcttctaaactctgcttttcttttctttttttctttttctttatttttttgagacagagtctttctctgtcgccaggctggagtgcagtggcgagatctcggctcactgcaacctctgactccctggttcaagcgattctcctgcctcagcctcctgagtagctgggattacaggcatgcgccaccatgcccagctgatttttgtatttttagtagagatgggtttcactatgttggccaggatggtcttgatctcctgaccttgtgatccacccgcctcggccttccaaagtgcaatgattacaggcgtgagccactgcacccggcctaaaccctgcttttcatttaaaatattttcttttctttcttagtctttaaggtcaatatagcattatttgaagcttacttaataatgcagatgatgacgaaacagatttttatatttatttttgaccacgtgattggaggtagctggaaatttgaataatcttagtcatagttctttagctgagaaaatggtaacactttgaacatcccccaaaatattcattcatacaacaaatgtgtttttgttacaatcagtgtgttagggaatggaatagtgttaatgggttgtttttattggtgaagggatatcataaaagactccacgttgttacagtgtgtgctaactcttgggtacatactattttgcaggatgaatatagccaccgtttaaaattatcttccactgatgtttttagtatcctcaggtactttgtatacaataagcatacagaaatatttgttgaatgaatgaataactatatctctaaaaagagattttatgcatatgagaaaaatacttaatcttttttgaaacagaaggctaaattggaaatttatttttggtgttcctcaaaggtctaattttaattaatgtgaaatttatttcttcatgggaaattgttctcaaaagctttatcccttatacctaagattattacaattacaatactttagatacattcaagtttttgaaaatgaaaagataactttttgtttcatcagtgacaccgaaattactgacttgtcaaatgtatacttccaataattagtatcttttttagttccttgttaggtggtagacataatttaaaaggagatgtaatttctgtttacatggcttccatttagggtaaaaaactatttttaaaattcttagaaaacaggaatgtaaagaaggtgttagaaagaaaatactttcaatgttaagagagaaattaatcaatacacataacatcaaattataggattttacaaaaccatgttatgtataacattaaaagtggctttttaagataagaattttatgcaaacttttgagaatgaaaaagataacagtgaaaaattagcacaacagcagcagattttgaattttaaatagtactaggaggtttctaaaaccttttttgttatatctgcactcatcctgcatttgatccatcatgttctgaagaggtctcacctagaaaaatgaaaaccatttcatcagtacagtggtgttcagttgcttactgctgtctcatagtcatctaattgaattggaatttcctttccctccattccctttctaagaggtttcaaagaatatttagaagacacaataaatgaaaactggacatttccctattggttgaataagtttagtggttttttttggctcagggttggggagatccaaggttatgtcatgcaaaaagatgaatatgacctatcacacagttcgtgctgcatttagtttcatattttgtgactcagatctgtgaaagatacagataagaggtgtttgttttatttcttttttccttaaagtgttttacttcttttctagattggccaggtgaaacaggagctgtccagaaaggacacagaactactcgccctgcagacaaagctagaaacactcacaaaccagttctcagatagtaaacagcacattgaagtgttgaaggagtccttgactgctaaggagcagagggctgccatcctgcagactgaggtagaaacaattctgggatttgtggggagttggtttcttggcaccttttcataagcgttacctgtgctgtttttgttatgtttagaattgggaaatatgagtaatgttatgattaattcttcagcagcgtgatcagtcactgtgctaaaatgtaaccatcttatttcagttgttcttagatctaacaagttaaaacaggtgcagtttatgtttttaattctttaaactttagccaagtctgtacttcaaagtatactctgacagtattaaaaataaaaggataattgtaaaagagaaatcattgatttagaagcttcagttcaacccctggtgaattttctagtcatgaatgacaatgagcttggttacactgtgtttggagtacatttaagtgtctttaagttgtgatattatgaataactgtatataggaaactggaatctgttaaagttctagatagtctaattttaaaccacagattattagacaatgtgtcttcatatcctgtttgaaaataaagttagtgtttttagaattttttttttttttttgagatggcctctcgctctgttgcccaggctggagtgcagtggtgtgatcttggcttggcgtgatcttggctcaccactacctccgcctcctggattcaggtgattctcctgcctcagcctcctgagtagctgggattataggcgcatgccaccaagcctggctaatttttgtatttttagtggagatggggtttcaccatattggccaggctggtctcgaactcctgacctcttgatccgcccgcctctgcctcccaaagtgctgggattacaggcatgagccaccatgcccgggcagtgtttttcaaaatcttggaagatgatctagactattggctatgacttcagttaggtatccaccatcttcagataggtatatgacttcagatagatatttagtgtatttgctaaataatcccagatcgattcttatctatcttactttcaatgatcgaagagaaagagttgatgataccatgtggatttactgtcttaatataaatattttttaaaggttgcagtgaaatagataatttaagaatagataagtagttttgctttatagaagaaacataaagcatatgatgtagattagctttttttctttaaagaaaaataagaacataatttggtggaaaaaaggaatgaggaggaaaagaaagaataaaaacctcatagtcttagaagacaagaatcttccaataaggaagaatgaagaaggaacctaaactgtttcatgtaatatttttatctgtacaatttggggctttgttaaaaatgggagattttagctgacatgtttgtcatttttcttataacttacactttttctattttagttatgtttcattttgttatgatgtcagctccattctacctcacagagatatttgggtataaaatcatgagatgcagtagtggctaaggctttggctctagagtcatgtttactgagtttggacttccatctttaccacttactatgagtcgcgtgatcctgggaacgtattcaacttccttacacttcacttttcacgtctgtaaggtgaagagaatagtagtgcttaactcataagtttgttgttagaattaaactcgtttatttactgccagtgtctggcacatagtaaagtctttgtacattcgtcattgttatcattttataattcttctaataaaatcaactaatgcatatactgttgagatgttaagagaacatagtatttagatgatctgcattttcttacttttattaagctaaacttaggtttattcagggaattataaatatgaaatcatctagataatgttacctgcaaagttattcatttatagctttattttaaaaattttttgtgggtgcatagtaggtatatatatttatggggtatgtgagatatttaatacaggcatacaatgtgaaaataaattatggagaatggcggtatccatcccctcaatcgtgtatcctttgagttacaaacaatccaattacactctttaagttattttaaaatgtaatagctttattaatcgtttttcacttcagtagcttgagtgcatgcaatacagcaaaagggtcagaagagggcgccagtgttctagaggtcagccgcacttccaagtttgctactgtaatagctttggatggaggtggcaggtgtacaaaccagagaaccaagcagttggttaatgataatgcaaacatttaaaagcttgtcacagtctaataaatgacttttcccccttggcaatccatgcttctctttgtacccccctcaaataatattcttattagccaggtctcacccagatgggcttgtgattggtttcttgtaccatagagaatagattgtatttattgtcattcatgaatggtttttagtttttagccattgcaggagtagctgagtctcagtgattatttctgtaagttactagggccactgcgcaaatagaaccatctcatcataaaagataaaagaatgaaagctaactttctttggaatttgggatgattttaagaatgtaatatgtctatttattagcattgcttaaaaaattactctggtggcacttgacaagagtcaccttttccaatgtaacttgccagtgttagagcccagtaaaaggcagtttataccagctctttgaaagttttcatgtgtttctataatttgctcttagttgatttcatcttttctgcagctatcccagacttcgatctaacactcggattactaaattaagtatatatgaaaaaagaacatggagcatggagtttttctttcatttttatttttagagatagaatcttactctgtcacccaagctggagtgcagtggcatgattatattaatagctcattgcagcctggaactcctgggatcaaacgcttctcctgcctcagcctcctgagtagccaagacttataggcatgtgccaccacacctggctaatttttaaaactttttgcagagacagagtctcactgtgttgcctaggctggtctgggactcctgagctcaagcaatcctcctgcctctgcctcccaaagtgctcggattacaggcgtgagccactgtgcctagcctggagtttaaaaaattttaaaaatcctttaaggaaaacagttacatgtgaaaagatctgtttgttttttgttttgttttgttttttttggtttttttttccctattcagggtacatggactaaggccctctggtgttatacaaggtacagtatatatggaatcgctcccgttttgtaaccatctcttttaatctgatgactttcacagaggtggtctggatttagtaatatagtggttaaaagcatggtctttggtgtcagacataggcttgaaaaccagccctctacctttactagttgtgtgaccttagaggagttactttacttcttctttgtgtgtgtgtgtgtgtgtgtgtgtgtgtgtgtgtgtgtgtgtgtgtgatggagttttgctcttgttgcccaggctggagtgcaatagcacaatcttggctcaccacaacctcgcctcctgggttcaagcgattctcctgccacagcctcccgagtagctgggattataggcatgtgccaccacacctggctaattctgtatttttagtagagatggggtttctccctgttggtcaggctggtctcgaactcccgacctcaggtgatctgtcctcctcagccacccaaagtgctgggattacaggtgtgagccaccgcatccattcaggagttactttacttctttaagcctccatttcctcatctataaaatgaggataatgataataacaacttcctaaggtttttatgactaggtgtttaattctgttctcatctgaatatggagggacatttttttattaatttattattttttttttgcgacaaggtttcactttgtcattcaggctgtagtgcagtgccttgatcatagctcactgtaaccttgaacttctgggctcaggtgatcctcccacttcagcatcttgagtagctaggactacagatgcaggccacctctcctggctgattttttaatttgtattttttgtagagacagggtctcactatgttgcccaggatgttcttgaactcctggcttcaagcagtcctcctgcctcagcccccaaagcacaagaattataggcaggagccactgtgtccagccatggagggaaatttaaattcagtgggttaaaaaatttcgaaacaccttacagtttatagcactttgatttgatttgatctttattgttttatttgctcttcatagtaatggcatgggttagacaagataattattgttgttttgcttttataattgagaattttgtgaactgcttattagcataccacttttgactggcacttgaggctactctcactagtaacactgggacttttgatatatcatttacagtattctcaagaattaaagttcttttcttgttccaaaattgtgatgctatactagggacctaccattaaatgtattttcaggatgaattctcaatgtgcagagcagagctgattgtatcaataagccaaaataatgtacaccttactgcttcaaagtagtacaggtttttccccttctccaggaaattgtgttttggaattctgtttattataggtaaggaatataatctatatcttagtaatagtaagaggaagtggttcttttttttggaggtgctcaggagatcagcatctagcacaaggtgaggacctgcccttgctctaggatgttttggcactaggcactagagctaggatgctgttgtttgacgtgcaccctctgcttgcagtcccagcccagttctgacttcttcagcatactaagagttagtaatacattcttagaactagagggcatttttagagatcatccagtctttccgtaatttaaagaatatgtatgataatatctaacctgagtcttgtaccatggagggtttgtatactttcattttcccagttaattcttagagtaaccttctaagaaataagaattgttgtaacattttacagatggggagttaaaacttagagagactgaggttacatgacctagtgcccgatcgattcaaacccgcaaacttgcgttcttgatcataacgctgcaattcctccctgtgcagagagaatatagtgacatgctgaaggcctatacaactacttggtattagttttgggactggaattcatcatttctgacttcgctaattatgatgtgcatagacgaccatgactcttgtttgattggtaggttgaggactagccacaaagaaagatggggagaagaagaaacaattcatgttggtagagaggagaaaaggatttaggttgatggaattacatagcctcagaaagagataggcatcttttgtgacgagactgtgaaagaagagaaagatgtattgattgatctcttcattcaacacggttttgggagtacctgctgagaacccttctgagcactggggatacagtggcaaatgaaacaaaggctggtgatctctatctctatctctatctgtgtctctatctctatctctatctctatctctatctgtgtctctatctctatctctatctctatctctatctctatctgtgtctctatctctatctctatctctatctctatctctatctctatctctatctgtgtctctatctctatctctatctctatctgtgtctctatctctatctctatctctatctgtgtctctatctctatctctatctctatctctatctctatctgtgtctctatctctatctctatctctatctctatctgtgtctctatctctatatctctatctctatctctatctgtgtctctatctctatctctatctctatctctatctctagctgtgcctctatctctatctctatctatctctatctctatctctatctctatctgtgtctctatctctatctctatctctatctctatctgtgtctctatctctatctctatctctatctctatctctatctctatctgtgtctctatctctatctctatctctatctgtgtctctatctctatctctatctatctctatctctatctctatctctatctctatctctatctgtgtctctatctctatctctatctctatctctatctgtgtctctctctatctctatctctatctctatctgtgtctctatctctatctatctctatctctatctctatctctatctgtttctctatctctatctctatctctatctgtgtctctatctctatctctatctgtgtctctatctctatctctatctgtgtctctatctctatctctatctctatctgtgtctctatctctatctctatctgtgtctctatctctatctctatctctatctctatctgtgtctattgatatatctgtatatatctatctaaatctctatctctatctctatctgtgcctattgatatatctgtatatatctatctctatctctatctctatctctatctctatctctatctgtgcctattgatatatctgtatatatctatctaaatctctatctctatctctatctgtgcctattgatatatctgtatatatctatctaaatctctgaaacagctgctcagagtaaaagaggactgggtgctatgaaaagagatagggcttagaatctttttcagatgaatgtgtttctctcactgttgtatgtgggttgttgagttatggggtaggggttgggggtgggtgctgcagggtgacactggtatgatattcaagtctgcttgtgaaggtagactggctttggagtgctccttcccctttcagcatcctctctatacctggggcagagcatttgttctagcagcggtacagatgatcataccagaggcgttctgatctgggaggcttgcttcctgccacaaccactcccccagctccagctggtgagatggcactgcttacggtggtgatggggtaatgtcttgtttgtgggaagatgtagatactgataagcttaagaagttacattaagttacttaagaagataatgataagcttaagaaaatacagttacttaagaagataatgataagcttaagaaaatacaagcataagtatggctcttaatacgctagaaaaatcaaaatggaatgtataagtttcaaaccgtcagagtaaaacccagtttacccagtggagaatagagaagaatggggaggggagagaaagaaatgtgatagcatgtggacaccatgaaaaagaaggctgagataagtacaaatcatgggaaagtcaataaatacaaataagtacttagatcaaaatgaaaatatacatctcagttgggctaaaaagatacagaaagatactgtcaacaagagttaaacagacaaaaagtaacagcaaagttaaaaatacagagatagaaaaaaatttaaaaataaaagttatatcaggaaaataggccttcccaaatatgatttattttaatattgattaaattatcttttaaggcacacagagcaatgttatatgctgataaaagaaacagtagatcaagaaaatataaccgtgccgatcgatgcacctaacagcatggcatttaaatacataaagcgggccgggcgcggcagcccacgcctgtaatcccagcactttgggaggctgaggcgggtggatcacctgagttcaggagttcgagaccagcctggccaacatagtgaaaccctgtctctactgaaaatacaaaaatgagctgggcgtggtggcacgcacctgtagttttcagctacttgagagcctgaggcaggagaattgcttgaacccaggaggtagaggttgcagtgagctaagatcatacccctgggtgacagcgcaagattctgtctataagtaaacaaataaatgtatatatagcagcaatgaggtgaaacagataaatcaacaattgtagttggtcatttggatgtgctcctgtcagaatttgatcaaataaagaagcatcaacataaagttttaataacattaacaagctcaagttcatagatgtgtatatagaattttgtcctaacatagagaataaacaatattttcaagaacttactgaacagtcgtaaaaactaaccatgtactgggtcataaaggaaactttaaaattcccaagagtcaaagtcacatgactttgcactcctaatgcagcaaaattagaaatcaggagtaaagatagtaaagtagtaataaaggtagtaaagaacagcagcagaaaaccaaaataagtatataatcttgaaacatactaccaaaatgacctgtgggttaaaggaaaaatataaacatttaaaaatgagtggcagtgaaagctctctatataaaaatctgtggaacataattagaaaaaaatctgtggggtgtaactaaagcagtatttagagggaaatagctagtttttaacatatttatcagaaaataagaaagaaaagcaagtaatctaggtgttcaaatcaggaaacttagaaaaaacagagttaatccaaaaacaataaagaataataaatataaggtgagaaattaatagagaataaaacaacaccaagaggtagttatttgaaaaaggttaataggacaggaacagctcttacagatgataaaggagaagtaactactagtactacagagtttaaaaataatataagacaactctaaacaattatattcgaataagcttgaaaaacaagaagaaataagtttctggaaaaatataaaatgacagaagaagttcaagagaaaagagaaaacatgaacaacagtcgttatagaaattgaaatggtaatcaacctcatccctttttccctcccaaatcctaaggcccagatggctttcgaggagaaaatatttgatattttctttctttttttttttggagacagattcttgctctttcgcctaggccggagtgcagtggcacaatcttggctcactgcaacctccacctctcaagttcatgtgattctcctgtcccagcctcccaactagctgggactacaggtgcatgccaccacgcccagctaattttttgtatttttagtagaaatggggtttcactgtgttagccaggctggtctcaatctcctgaccttatgatctgcccaccttggcctcccagagtgctgggattacaggcatgagccaccgcgcccagcccaatatttgatattttctatcaaatatttaaaaatagtcattttcatcctcaagttgttccccactccccaagaaaaaacaagaaagcctaatactctacccaaggatatgaggaaaaataaataaattaaaagatactccatgtcaatagatggtataatttaatcctgcagggatatcagttttcctgaagttaatgtatatattcttctgcatttccaattaaaacaccaagcagtcggccgggcacggtggctcacgcctataatcccagcactttgggaggctgaggcaggtggattatctgaggtcaggagttcaagaccagcctggccaacatagtgaaaacccgtctctactaaaaatacaaaattagctgggcacggtggtgcgcacctgtaatctcagctactcggaaggctgaggcaggagaatcacttgaacccaggaggcggaggttacagtgagctgagatcgcaccactgcactccagtctgggtgacaagagcgagactccgtctcaaaacaaaacaaataaaaaaaacaaacagtattttttaggaattcattttattttaaattttgtaaggaggagttacaaaaagacaaatactacatatgattccacttgtcatacctagagtcaaattcatggagacagaaagtagaaaggtggttaccagcggctgggaaggagagaatgtggagtttaatgggtatagaattttagttttgtaaggtgaaatgagttctggagattggttgcacaacagtgtgaatatactcaacactactgaactgtagacttaaaatgattgagatagcaaattttatgtctgtatatcttacctctattaaatttttaaaaatgtatatggatgaataaagctattctaacattaaacaaaaagagaagagaagatgggagaaccctgccctgtgagacatgaaaatacagagtcataaaccaaacgaaaccaaacagtgcacctcagaacagtgcggtaactagcacaggaaggagcagatatgaaaagaacagggagtgtgaaatcagaaacatttatgtggagagatagtcataaactagtgcaaaattaagcaagtatgagaaaactgacataccatatggagaataaagttggccacctacttcatgctagatgaaacagtgaactctagatggattaaagacctcagtgttaaagagaaactataaagctaatcaataaaaatgtttagtaggaatatattgggtaagataacttaaatgactccatcaaatttaagcatttctgttcaagaaagaaaaccattggcaaagctaacagatgagattgggagaagagtttttttagagcctcttaaaatagtaaggattcagataaagaataaaaaagagatgcttgaggctaggtgtggtggctcacgcctgtaatcccagccctttgggaggctgaagcgggcggatcatgaggtcaagagatcgacaccattctggccaacatggtgaaaccccgtctctactaaaaataaaaaaattagctgggcgtggtggcacgtgcctgtagtcccagctactcaggaggctgaggcaggagaattgcttgaacccaggaggcagaggttgcagtgagctgagatcatgccactgcactccagcctggcgacagagcgagattctgtctcaaaaaaaaaaaaaacctcaaaaatcaatagagactatagggagagggaaggatttgaatagacaattaacagataaagaaacctaagtggttaacaactatgccatgatatcatcaatctcactagtaaataaagaaatgcaaatttcaaagatgatgaaatactatattttgttcatcaaattgataaaaattagaatgtgagataacattcagtgcttgtgaggatttgggcaaacagtaacataaatgacgtaggtggtttcagtaatcccattccttggtatatttcccagaaaaactttcctgctggtccacaaaaggacatgtataaggatgttcaccacagtattatttgtgggaagaaggaattaaaagcagcataagtgtttattactagggggttggataaataaagtattgtggatatgtaccatggaatactgtacaaaagtcaaaagcagtgatgcagaagcagggatagatataagtactatctatgtttacttttttttttttttgagacggagttttactcttgttgcccaggcttgagtgcgatggcgcagtctcggctcactttacagtacttgttacaagtagtgtgttgtttaaaaaacagcatccatcccgttttttaaaagtaaaaaacaggttgaggtatgtaacattaatataaattgaaaacatgtatgaatataaaaatcaccctctgtgtttctaagatacatattcaggaacatattaaaacatattagaatagctgcatattgaaggagggatgggtattggacataaatggaaaaagaggaaaacaaaacaagagtagaacttcacatgaatcaacgataacacttggacagcggatagaccttggtcctaagtgagatagagatctgaagccaagacctccgcataaatctagtactatcctgagaaaggtcggacgagaaaaaaattcctcctaccagtattaatggcaatatgagagactgacttattctccttggctttgattttgtggagaaaggtctctcatcatgcaggtttgagtttgaatagacataactgctctgaagggacattctctcaacctagtacgtgtagattcccacaggtaaaagcattgcttagaatgaatttacaattccacattagttaatcacttgtggattgtaatctcccctgaaccaataatgggagtaagaacaaatggagtgatcagacccttaggaacgctggataatagaacgagagtataaactaaatgattaaaggacggactgagaggcatgggcacactctccagaatggatgatcagatatgacttgttaggatgttgtttcatgactattgagagcaaaagctgaagtagcactaggtttttaatttttattttcttaatttttaatttttatagagacagaacctccttatgttgcccatgctggtcttcagctcctggactcaagtgatcctcccaactcagcctctcatagtgttaggattacaggcgtgaggcaccgtgcccagctagcactagctgtttagtacagtgtgtttgaatcttgggtctgccacttgctgtatgagtgtatacttttttgcctcagttttctcatctgtgagaagaataatagccttaccccataatgttgtgagaattaaatgttaattatctatgtagtaacactcagtaaatattagctattataattaataaatgcataaagaaatgatttaaaacgcgaggaaaaaaacaaaggtactgtaaataaaaccaaccgggttataaaagatcaaaacaggattttagacatgaaatatatagtaactaaaatggaaaactcagtatattagtgtagttgcagattatagagagctgcaggaacagttagtgaattggaacatagatctgatgagctattacccagcaagcaataggaaagataggaagatagaaattattaaaaagaactctatgtaaattgagcccaacttatatgtaggagtttcaggagtggataaagagaatgggaggcaatcttaagagagaattgctgagaatttttctgattttgatgataggaatggattcttcaattcaggaacaaattattcttgagcaggaaaatatctacacctacatacagcatagtggaaccatagataaactaatcttaaatactgccaggtagactgggcatgatggctcacgcctgtaatcctagtggaggtcaaggtaggaggatcacttgagaccaggagtttgagaccagccggggcaacagtgagactgcgtctccacaaacaacaacaacaacaaaactaacaacaacaacaaaaaactaaccaggcaacaacaagaaaaaaaacttaccaggtgtggtgtgtacatgtagtcctggctactcagaagtcgaaggcgagagtatcccttgaccttagctaagggcttcagggcagtagtgagctatgattgtgccactgcactccagcttgggcaatagagcgagaccctgtctctaaaaaagaaaacaacctgctggggagaaaaaatacattacgtgtaaaggattgacaattaggccaacatcagacttttcagttgccacaacagtagtgagaatatggtagcgtaaaatcttcaaagtttagtgaaaaacattggcaactcagaattctgtaccaagctgaactctcatcattcttcagtaaagatagaagaaagacttttactttcagattaatacaaatgagagtttactacccaggatccctatggaaacaactgttaaaagatgtatgttagaaagaagaaaagaatgagatgcaagaaaaaaaaaacaggagatgaaaaggcattaatgtaacaggaaaaactaatctaatatcaatataatagtatggcatagaccttacagtaatactgccgttacagccaaaactcgcaaatcaattgaggtttattcagtaaaggtgaggaatttcagagaaagatcacaaaaggaagagcttgtctgttgcttctccttgttggtataatgttgctaaataatagagcaggtggaattctgcatctagattgtttctatcttccctgtcaagagcataggaatgaaataaatggaatatatatttctacagtggcaaaatgaaaatgaagctcaaggtgtgtgaagacagaaattgtaagaaagcgtaaagacctctgcagtggccaggcagagtgactcatgcctataattccagcactttggaaggccgagacaggaggatcacttgagcccaggagggttttcacatagagaaagctataaggaattctccctttctgtgagggttttcacatagagttataaggctttgttgatcttagttctgataccagaacgaggaagtgttatgttatgtgttggcttaaggggtcaaagtaggttggctgactgccatgctttatcaggtttgcagaggccaagagttccttggggctgcatacctgaatagcacttattgcagtatactttgtgtagccaatactgtgtcttctttgtctgctatgagttttcaagggaaaatgagtgaaggtatcaacattaatttttcagaatataaatttgcgaaacgtatagtctttttttttttttttaaactatgtactgtggaatgactcatttctaccttgactattttgatatctgagcttttcatctttttgtcaagtatggggtatcaaacagagctcaatgcagtttgttgaaacagtactctaaaacagtttacttccgtgtggtctgtaatgctgtcagtcccatggctcagtgcccttcacgtagcattcagcctcccatctaggtgggaacaatgggaaatgcagtcataggatatatcatttagagtggacttgagcaagttacttaattagtttgggccttgatttttctcagctttaaagttgggagtttaaattcagttatttaactgttaaaaaaatttatgaagtactgtggaatacaggaaaattgtagaaaatataatagataccagtcagatttaacatacattaaaataaagaattcttaaaaatgtctcattctaaactaatcaatggaagatgtggtttaaataaaagttattagaattttaggtttttagaactagttggggccaggaataaagatttggaagctgtggaggtggtggtgaaagccttagaattggattagtttctccagaggaggttccatgcagtgagatgtgaggaggaggaaatgacagaggatggagaacactgaaaaggtgtgatcgcagagttagaaaggaaaagtgtcatgttggcaaagccaagaggggaatgataggaaacaagccacatatccatgcaactaattattactactaatttgcctttagatagatctgtttattgatttaaaacaaaggaaagttaaggtacgttgagagaattggttttttttaattgaggcagagtctctctctgtcacccaggctggggtgcagtggcacaatcttggcacactgcaagctccacctcccaggttcgcgccattctcctgccttagcctcccgagtagctgggattacaggtgcccaccaccacacccagctaatttttttgtatttttttagtagagatggggtttcaccctgttagccaggatggtctcgatctcctgaccttgtgatccgcccccttggcctcccaaagtgctgggattacaggtgtgagccaccgcgcccggccagaattaattgttttttgatcagaagtgagaggccaaaacagtagggtagccattttctgttcacttccattggtagagaaaaccttgtagacaaaagccttctgtttttattgaagttggcatgacctgtttgccacagacaaacttggcaagttgggcaaatgctgttcctgcagctctgctgatgtgaataaacaaggttttattcctcctgccaggactggtgtcagggcaatgactgtgtgtgtcctgctggtctttgaggggttttcctgaatatgttttttgtggtttgtaaaatatggacctcacgcaaaattatactacaaatttagttcactccaaaccaaaagatcagtgtagaattcagagcaattaatctggtagtagcaaagtggtttttgtggtggtttttatctcaaatctccagactagcatatttgaattctgtactgcacaaaaaagcagactaagacaaagtgtacacaggtgatttgaattgaatacttagtcaataaaagatcatttaataattaggggtatggacttgggcagtttctgttcctaatatttattatatgaaatattttttgtatcaaagcctgtgtttccagccacacttatactaaaggtttgtatgtttataacaagagttcttattctttcccttttcagtcacctttttcggtcaccaattcatacttgacactctctcagtgccgtgcgggtatttatgtccggtcagcattgacatgtttccaggtcacttaactgaatcatggatccaatataaagtgcagcttgggcatctgggtgcctttcataaagaggcagcaatgtggggtctcacaaatgttgtcctgtgtgatggtggtgccatcagaaagaaaaacacttagaagtgatgagggatgtgttcctacatacagatccatgtcccgcagatggaaaggcttttatttttctgaaattaatgcttagaagagctgagagacaagaaaattaggcagttgagacttcaggtttgaatgcctaagctttttgcctttgtagtaagaatttgtgtatttaggacatacaggataaaataatgtgggtttttttttttttaattgagacggagtttcgctcttgtcacccgggctggagtgcagtggcacaatcttggctcactgcaacctccgcctcctaggttcaagtgattctcctgcttcagcctcccgagtagctgggattacgggcatgcatcaccacgcctgactaatttttctgtatttttagtagagacgggatttcacattgttggccaggctggtcttgaactcctcacctcaagtgatccacccacctcggcctcccaaagtgctgggattacaggtgtgagccaccacacctggccggttttttttttgtttgtttgtttttaatgaggtgctttgttttttgcttttggttagaggtagtggtagattaatatatagtatacaaaatacagattagcatgtagtaattagatgcaaatgattatgtgatttatttatttttcaaatttctgacatgtatacttttctaaggctttgacctccttaactgtgtagaagggtcaccagattcagtaagcaccttcgccatgactgatgccttgtaatgggttcagctaataggaaccaaacctgacactgtcaaataggattagtagcaacactggctggcttgagctgtgcctgaatgccagtggataagggtcagtgggttctttggcatcttgagcagcctggttgttgaatttcatattccactaaggtctttactctgtggttgcaatccttttcttttaactgaatcaatattcagtctgttctgacacttcccttttggacctttttttgtttgcatggtggagtgttgtgatttttactctcttggcaaatttcaggtatataatacagcattattaattacacgctgctgtatattagatccccagaacttactcgttttataactgagggtttgtaccctttgatcagcatctccccatgcctctccctgttcctatccccagcccctggtaaccaccattctcttctctgtttctttgagttcaactttattcagattccatatgtaagtgagatcataccgtaatctgtgttatttctgatctcagttttcactgaatgctttttgtccttgtattatgagttgtgtttttctgcttctttgcttgtctggtgagtttgggttggatgccaagcattgtgagttttaccttgttgggtgctaggcattttgtattcctgtaaatattactgaactttgttttgtgatgctggtaaaatacttggaaatagtttcattcttttgggtctttcatttaagctttgttagatggtaccaaaattgcatttattctaaagctagtctcctcgtgcaccccctcccccttgattatattaaagagatttgcaaaaatttaaaacaattatattcttcttactattttagggggaaaatacaggtttttgaaattaaaatgttactttgattaacataatgggtttattgttatttaaaagctgttctaattttttttttttttttaaagatacagtgtcttgctttgctaccaaggctggagtacagtggtgtgatcatagctcactgcagccttgaactcctgggctcaagcgatcttcctgcttcagccccctgagtagctagaactataggtgtgtgccaccacacttggctaattaaaaaaaatttttttttgtagagatagtgtcttgctatgttgcccagggaggtcttgaacttttggcctcaagtgatccttctgcctcagcctcccaaagtgttgggattacaggtgtgagccaccgcacctggccctaattttgagtgtagcaaatattgatagatataactcacataaataaaaactcaataattgggggtcctcagtaactttttttttttttttttgagacatagttttgctcttgttgcccaggctggagtgcaatggcgtgatctcagctcactgcaacctccgcctcccgggttcaagtgattctcctgcctcagcctcctgagtagctgggattacaggcatgcgctaccatgcctgactaattttgtatttttagtagagacaaggtttctccctgttggtcaggctggtcttgaactcccgacctctggtgatctggccaccttggtcttccaaagtgctgggattacaggcctaagccactgtgccctgctggtcctcagtaatctttaagagtgctgaggattcctgagaccaaagggtctgagaatggtaatggaagggaacattcagaacatttgggtgcctgaggcttctctagagcagggtacttgcccaaagggggcttgggattttgcttcctgttccaacctaacctttgtgttgccctgatatcttattttctgttactggaggcatcttccaaactcagttctccaggtcacggaaacaagtcaatgaaaaagcaggacaggtgtcacttctgttataagcttaccacttcgggcttctagtctctgttttcaacattttagtgatgttgtctctttctctatgtgtacacttctgtatatgcttatatgcatgctgatctatgaatttgaaaagaagtttgttgtgctttacctagcatttctgggtgttttgtagcagtaggtgtggtgggctgaatagtatcctccataaatctgtgtctacctggtactcagaatgtgaccatatttggaaatagggtctttgaagctattattagttaaggtttgagataagatcatgatggagtgggctctaaatgcaatgactggtgtccttatagaagagagaggacatataaagatacaaagaagagggtgaagtgaaggtggaaacagagattggagtgatgcatcgtctacaagacgaggagccaggagacagcaagaggcaaggaaggctctttctcagagccctcatagagagcaaggtcctgctacacctttatgtcagacttctaaactccagaacttggagagaggaaaataaatctattgtttaaagccacctggtttgtggtcctttgttagggcagtcctaagagagtaaaacagttaggtttttctggatttctagctcatattcaggtcattatcaggtattttcaggtttttatcaaagcatttcaggtattatcagggagactgttaagatataatgtcatgtcagaaataacacaccaaaaataaggttcttattctctctcgaagctaaaacccatttagtcttcttcatcagaaacctgggaacccatgtttgacttatctctcttttatcccttatatacaaccaataaaagtcaagctcctagacatgacactgatgctttccgtggctaaggccttgtcttctgctgcacctcacataacttaccacctattctatgctttagcaattctctattcatagctctctgagaagttaacatcctttctaatcttcattatttgtggtatctctgctcaaaggttcttccattatcttcctcaccagccatcttctgctcatctttacatgctttgaggtatctccaagcaatctgagtgcttcttttctgtacttttagaaaatattctctacacttctgttgcagcactttctataatatatttatgtgatctattttggcaacattcttctccattaggttgtaacttcagcagaagacaggaaatatcttagttatctttgtgtctccagtaaccagcccagtgtaacttttccgatatacaaataccatgactttctcctgcttaaaaatcttcactgacttccatttgcaagtaggataaaatttaagcctcttattttagcaggcaaggatttatgatctactatcttttcaggcttgtctcttgtccttcttctgttactttatgccaagcaataccaaatgaatttacaagtatatcatgctgtttcatgtttctagattttaaagtattctatttcctcttcctagatatccatgcatttctctctgccttcccttttgtatctagtgatgttctcttcattattcaaaaaccaattcagacatttattcttttagaaaacttttctgactcttctgacatactgttcataggagagatttccctgcctgcctgtgttcacctgtgttcctttatgctggtattctttggtatgtgataacagattataatctttgatgtcatatctagtctttgagttccagtccttctactcaccagttcttttttctttttctttttctttctttttttcttttctttttttttttttttttgagacagagtctcactctgttggcaggctggagtgcagtggcaccatctcggctcgctgcaacctccgaatccctggttcaagcaattctcctgcctcagcctcccgagtagctgggattataggcaagcgccaccacgccaagctaatttttgtatttttagtagagatggggtttcaccatgttggccaggatggtctctatctcctgaccttgtgatctgcccatcctggcctcccaaagtgctgggattacaggtgtgagccaccacgcccggccatagtccttctacttaccagttctttaatataatatgaggtaaactatttaactacgctgagtcacagttttatcatcttttaaaatagggagataatgttagctactttacagtgctaaatgttttaagtgagataggattactgaggataaaagggtgggcaaaataggggccaggagcggtggctcacgcctgtaaccccagcactttgggaggccgaggcaggcagatcacctgaggtcaggagttcgagaccagcctggccaacatggcgaaaccccgtctctactaaaaatacaaaaaaaattagctgggcatggtggcatgcacctgtaatcccagctaccagggaggctgaggcaggagaatctcttgaacccaggaggcagaggttacagtgagccgagattgcgccactgcactccagcctgggcgacagagcaagactgtctcaaaaaaacaaaaaatatatataatttataatatgttacatattatgtatattatttatatgtattatataatacatattatataatatataatatatttatataaattagatataatattatcatatatagtatatataatatatattaatatataaatgtgtaaatgtatatattatataattatatataaaatacaattatatataattatatattgttttatattatatataatatataatacatattataatataattatatttaatacatattatatataatataattatatttatttacataatatatataattgtatataatatatatcatatataattatatatgatatatattatataatatatatcatgtataatataattacaatatatgatatatattatataatataattacaatatatgatatatattatataatatatgttgtatataatacatatatttatataatatatgttgtatataatacatatgttgtatataatatatgttatataatatataatatatgttatatgtaagttgtatataatatgtaatacataatatatgttatatataatatatatagaaatattggtaagttctgtataatgatgttattaagttctataagtagaaaaaaaagtgttaaattctattacaaaataccctgagaaaggatgagggagatagtatttgtctgttgggggtttggaaaatatttattaaaatggtggcataggaaaaggaccttgaaagatgtgttcagtaggcagattttttttaagtggtagagggttaaggatattacaggcataggacaaaatgtgaacaatgacaagaaagaaggaaagtatagtatttattcagagaatggcagtactgctgcaatggagagccactggaagtggggcaaggaggcatatggcaaaggttaggcagtgctggtacattgggaccgtctgaccatggaggaccttgaattccctgctgtgatcctgtgggttagggtggtgttagagaattagtggttaagagtgtggggtctggaggcaagaccacgtaatcttagatctctgcttatttgtagctgtgagatcttgggcctgctatctcctctgaggcccagtttcccacattgccgtgagagagtgtgaagtttcctgcagggagaatgcaagggaagaaaatacgatacctgagaacagaagtgtgaggattttaatgtatatacagtagtcctcccttaactgcttttttgctttccttggtttctgttacctgtggtcacctgtggtctgaaaatattaaatggaaaattccagaaaagaacagctcccagattttaagttaagcttttttttaggtagtgtgatgaaatcttatgccattctgctgtattccaccctggaggtgaatcttccttctgtccagtgtatccacgtacccacactacctgccccttagtcactagtagctgtctcgttattagatcgactgttgcagtgtcagtgcttgtgttcacataacccttattttatttaataatggccccaaagcataagagtaatgatgctggcatattgttacaattgttctattttgttactagttattgttgttaatctcttactgtgactaatttgtaaattaaatgttattatgtaataggtatgtatatagaggaaaagcatagtgtgtatagggtttgatactgtctgtggtttcaggcatccactgggggtcttggattatattcttcgacgacaaggggggattactgtatatggtgacaaaaatatacatgaacacatgcaggaaggcccagaaaactgtttaattcagaaataaagtagtaaagtaaaacaggtatgatttttttttttttgaggagttgatatgagactgaaatcattgcttaagctgggaggaaaacaaaacaaaacaaaaaccagaatagagacgaatgataaaaaaagaaggacgatagatcagaggtcatgctatggacaaagggtagatttagtaggtgtaggaggaagaaaagaacagtatttgtgattcagaaaaaaaaatttagagtttgaaagttctcaggtagatctttccagattataattaggttaactatgtatattaaagtagaatagaggtaaattacagatgaaagactcttgaaggagcatggtagaacttgtggtgaataatgacaaatgggagctcaaatgattattccctactttctggcttggtgagactggtcgcgtagaagtagttggtagaaatgtagtttagcagagtgaactatggtttatctacatgtttttcctttccagtatggtccaacataatttgtaagtacttacagtagtagcaagtacttattatagcagtctccaatgagactagtcttgttaagaaattttccatactacttaactgagcaggaagtaccaccgcacacacagtattgcttctcagataccttgtagtttagatacactacacattggatatcccttacctaaaatgcacgggactagaagtgtttcagagtttgagtttgggaatatttgcattatacttatgcttactggttgagcattcctaatccgaaaatccaaaatgttccattgagcatttcctttaagtgtcgtgtcagtgctcaaaaagttctggagtttggagcattttggattttggattttcagatttggggatggtcaacctgtattagatcttcctgagtgctttgatgtaccctaaatgtgaaacattattcatattttctttgtggtttaatccacgttcagataggaaaaataagacaagttaaagatgagagaccatagaaccatacttgatttcttagatttgcactgttcagtctggtagccaccagccatttgtggctattaagtacttgcaatgtggctagcccaaattgagatgtgatataaaggtgaaatatacattagatatcaaagagttagtatgaaaaaatataaaatagctcattaatagttttttatatgggttatatgtttgaaatgacaatgaaaaaagaatgtaaaaaagcttattaacaattttcggcttgaaaatatgacttattattttcctgttgaacagcactgaatctatgtgtggggtgctaaaagcttaataaaattttctctgaatggattttaaaataagtatcattagatttcttgttattttaaagttatatctaatgaaaggcattaaacttcagggataaaggtaactagttaccaaactttttagctggttagtcttgctgtctaaaaagtagacctttgcttttgctttgtatggatatctaagtgcattatggggttgtttttcataaaagcctcatagcctatgactagactgtattatctgatatagccagtgttatgcttggtgatgctttttttcccttttcctcattttagattttctaaagcaatgtagcttcacttggaaacttgttagaaatactgattttgaaccccaaccctgttgaatcagagactaagggcttgatttagccctccagatgattctgatgtgcatgaagtttgagaaacatagttgtagagattccattgtgtaacggtgagcacactggactctgaatccagagaaacatagatgtagataatactacttttatagaataacaaaactcaacctctttataacctttataacatatctatttgaaaggaattacattcttttctttttaattcatcacttgtaaaactcctacattcttaggtggatgctctccgattgcgtttggaagagaaggaaaccatgttgaataaaaagacaaaacaaattcaggatatggctgaagagaaggggacacaagctggagagatacatgacctcaaggacatgttggatgtgaaggagcggaaggttaatgttcttcagaagaaggtaaggtacaggtgtttcgagttcagtggcccattcctcatacatcttcactcctaccactaagttatttctaaatgctgtcagagtttcttgctcatttttcagtttatatttttgtgattagtaatttggaactcttgttgcggtaggtagattgttaagactgctctatatattcagtttttaaaaatttaaacactgttagtatcttccagtagtgcttttcatgctgtttctcaaaagtgccttgtaaattgccaaagtgtttgaactgacattcttttgccccttctgtcttttattgaaactgtaccaaattggtttagtacatggacttgggatggtacaacttcatttatgtgtttaataagatgacaattttaagccgagaccagtagcatccagaccaacacataattcatatatgagcaaaaaaaatgtgtgtgtgtctatttcaatacaaatcttactgttccttagtgcttgttatttccccttttttcagttaatatattttggtattctttccaagggtttcttcattgttgttactaacagcattgtatggatatactatagcaaaatttctactgatggacattaattttgctaaaaatttcttcctttacataaaatgattaatagtaaaaaatgttgtacatgtttagtttatacatatgtcaagtcaagtatatttctaggataaagtccttaaagttgaactgctgagtgaaaggatgtgcatttataattttgatggattttgccaagtaaccttaaagagactgtaccaagtttcatttctactatccgtgatgaaagtgttatattcccacatacttgtctgcagagtgtgttaataggctttttcactttttggcaatctgataggtgagcaaacaatgtcagtgtagttggagttctttcattgtaagtaaagtcgaacagacttttatatttaacatcctttgtattttctattatttgtttatatgctttacccatttttgttttgagttctttcctgcttttttaaaagttgatttgtagaaatctcttcccaatttaaaaattagttcttttgtccgatgtgagttctaaacatttcttcttgtttggcttatttattgagatggagtctcactttgtcgcccagactggagtgcagaggcacgatctcggctcagtgcaacctctgcctcctgggttcgagtgattcccctgtctcagcctcccaagtagctgggactacaggtgcctgcccccacatctggttaattttttgtatttttagtagaaacggggttttaccaccatgttggccaggccggttttgaagtccatggcctcaagcgagccacccacctgggcctcccgaagtactgggattacaggcgtgagccactgcaccagcccaccttttttaaaaaataaaaataaaaaagatgttgtccaggctggtctcaaactcctggccctaagccatcttcccatctcagcctcccaaggccactgctcctagctctgtttggcttttgactcgtgtgtgtgtgtgtgtgtgtgtgtgtgtgtgtgtgtgtgtgtgtgtgtgttcagacttcttaaataaagtgaatgttttaaggcttctggattttgtgacatattacaaaagttgtattttagaatatttcttattttctagtgatattgatctgtctgtatccagtaacattgtttaaatttttgtgtttttgtgatatatgttaatagctaattccttctaaggtacgtttctttttcagaagtgccctagcttttttttttttcttggctatttttccatttgaaatttagaatcagcttttatcatctcctgcctttaattctttctgttgcattttttattgggagtacataaaatttgtagttattaatttatagagaattgacaagaatggggtatatctttccatgaattcattttttgtttctcagaaatgttttaatgtttccttcataatagattttatacatttattaagcttcttcctaggttttctttttgttataaagtgttatatttttcattacatcttctaactgcttgttttttttgtgcacatgaaggcttgtgatttctctatatcagttttgtacttagtcatcatactgaattctcttaaaggtttggatttttttttagtttattcttttggcttttccaaatatgtagtgttatcatttctaaataataattatcttcctgtgttcagttttaatgtatgtgccccatttccttctccttctacttctgtgtaccacactacatgatactggacatctccacattatacctgatctgaatgagaatgcttttagctctctcccactaaagtacagtgcttgcttttgtgttagaattgatagctacattaagaaagtatccatctaaataaagtgaattaaaacttaaacttttttttattattttttgtttcagtagtttttggagaacaggtggtgtttggtgacatggataagttcttgagaggtggtttttgagatgttggtgcacccatcacctgaacagtggacactgtacccaatgtgtagtctttttatccctcacccattcccacttccccttgactccccaaagttcactgtatctttcttatgcctttgcatcctcatagcttagctcccacttgtaagtgagaacatgcaatgtttggttttccattcctgagttacttcacttagaataatggtctccaactccatccagcttgttgcgaatgccattatttcgttcctttttatggctgagtagaattttgtggtatatatatatatatatatacgtgtatatatatacgtatatatatatatacacaccacattttctttatccacttgttgattggtgggcatttgggctggttccatattttttggaattgcgaatgtgctattataaacatgcctgtgcaagtgtctttttcgtataatgccttcctttcctctgggtagataccagtagtgggattgctggatcaaatggtaggtccacttttagttaaggaatctctatactgttttccacagtggttgtgctagtttgcattcccaccagcagtgtaaaaatgttcccttttcaccacatccatgcaaatatctatttttttatttttaaattatatcgcattgtggttttgatttgcatttcactgataattagtgatgcagagctttttttttttgagatggaatcttgttctgccgcccaggctggagtgaagtggtgcaatctcggctcactgcaacctccgtctcccgggttcaagcaattctcctacctcagcctcctgagtagctgggattacgggtgctcgccaccacgccccactaatttttgcatttttagtcgagacggggtttcaccatgttggccaggctggtcttgaactcctgatctcaggtgatccacccgcctcggcctcccaaagtgctgggattacaggtgtgagccaccgcacccagcccttgttgagctttagtatgtttgttggccatttgtatatcttcttttgagaactgtctattcttttgagaattgtctattcatgtccttagcccactttttgatgggattatttgttttttacttgatgatttgaattctttgtagattctggatattagtcctttgtcagttgcatagtttgtgaatattttctccaattctgtaggttgtctgtttactcttctgactatttcttttgctgtgcagaaactttttagtttaattaagtctcatctatttatctttttgttgcatttgcttttgggttcttgttcatgaagtctttgcctaagctgacatctagaagagtttttccagtgttatcttctagaatttttatggtttcaagtcttagatttaagtctttgagccatcttgagttgatttttgtataaggtgagagatgaagatccggtttcatttttcacatgtggcttgccagttatcccagcaccatttgttgaatagggtgtcatttccctgctttatgtttttgtttactttgtcaaagatcagttggcagtaagtgtctggcttcatttctgggttctctattctgttccattggtctgtgtgcctgtttttataccagtaccatgattggttttggcgactatagccttgtatagtttgaagttgagtaatgtgatgcctccacatttgttcttattgcttagtcttgccttggctatgcaggctcttttttggttccatatgaattttaggattgttttttctagttctgtgaagaatgatgatggtattttgatggcaatttcattgagtgtgtagattgcttttggcagtgtggtaattttcacaatattgattctacccatccatgagcatgggatgtgtttccatttgtttgtgtcatctgtgatttctttcagcagttttgtagttttccttgtagaggtctttcatttccttgtttaggtattttactggtttttttttttttttttttttttttgcagttattgtaaaaggggttgagttcttgatttgattctcagcttggtaactattgatgtgtagtagtgctgctgatttgtgtacattaattttgtatcctgaaactttactgaattcatttatcagatctaggagcttttggatgagtctttagggctttgtagttatatgaccttatcatcagcaaacaatgatagtttgacttcctctttactgatttggatgtccgtgatttctttctcctgtttgattgctctgacaaggacttccagtactgttttttttttttttaaattttattattatactgtaagttctagggtacatgtgcacaatgtgcaggtttgttacatacgtatgcatgtgccatgttggtgtgctgcacccattaactcgtcatttagcattaggtatatctcctaatgctatccctcccccaacccccaccccacaacagtccccggagtgtgatgttccccttcctgtgtccatatgttctcattgttgaattcccacctatgagtgagaacatgcagtgtttggttttttgtccttgtgatagtttgctgacaatgatggtttccagtttcatccatgtccttacaaaggacacaaactcatcattttttatggctgcatagtattccatggtgtatatgtgccacattttcttaatccagtctatcgttgttggacatttgggttgattccaagtctttgctattgtgaatagtgccgcaataaacatacgtgtgcatgtgtctttacagcagcatgatttataatgctttgggtatatacccagtaatgggatggctgggtctgttgaatagaagtggtgaaagtgggcatccttatcttgttccagttctcaggggaaatgctttcaactttcccccgttcagcataatgttggctgtggctttgtcatagatggcttaaggtatgtcccttgtatgccaattttgctgagggttttaatcataaagggatgctggattttgttaactgcttttttggggtctattgagatgatcatctgatttttattttattttattggtattagttttgatctttcaatagtaatattttcaagtaatagacttaatagtttcaaaacatttttcacttctcatgcacttgatcattgtatatttttctcccattgtgcttctcatacatttacttcttattaggcacaataacatgttggtaagaaatatgaccagacaacttttagtggattagaagttacttgtaatttttactatgattaataatgcgtaagccttttgattccatttcctattaaacttttctttaagtgtaggatattattagtaaaatacgaatttttaaaatttcgctggttattgcagttgtggagtttgtgaggaggggagtgatttaattatttgatttcatacagtgcaagtttctgaaggcatctggatgcacaaagactcgattcaccactgtgccagcagcctgtttgttgctctaggctgattatacccaaaatgttggtgacatgatggattatcactttcattaggtcataagtgttaggggcatatattttacttttataacatttgtttttcagctcctattttctttgctctcattctataaggattacttcatttaaaaccaaagtgttgaaagattgcgtgggtcttcagtcattaaactttgcctttcagatcatgagaacatgacagcaagctactaaaaaagccttagatgattaatgttactggaagaaaagatatactggttagaattcaaaggttgtttggaagtaacgcattgcttatttttaactaggtaaaaatttttagaaaagtttttgtattagtccattttcacactgctataaagatactacctgagactaagtaatttatgaagaaaagaggtttaattgactcacatttccatatctgagtcgctagggaggctttgggaatcttataatcatggcagaaggtgaaggggaagcaaggcacgtcttacatggcaacaggagagagacagacacacacacacacatatcatgcaaatcttgtatattttttctttgtccttcctcttcatccttcacagaaggcagcagaggatcagtaattgtgctgtcttagtacaccacactgccccagtaattcatcatgttacaaacttttatgtgtcttaaaacttaccagatagtacaactgttttcaaaattggtttatgttattagtgcttcttttttattttatttaattaattattttttgagactgagtctcactctgttacccaggccggagtgcagtggcgtgatattggctccctgcaacctccgcctcccgggttcaagtgattctcctgcctcagcctcctgagcagctgggattacaggcacctgccacctcgcccagctaatttttgtatttttagtagagacgggatttcgccatgttggtcaggctggtctcaaacttctgacctcagatgatcctcccgcctcggcctcccaaagtgcagggatcacaggcatgagccaccaagtttggcctagtactgctttgtagacaattacctttatgcctgttattttcagtgcttagatccttcccattctgtgtactttttttgttgacgttactgtattaaggtggtcagaatcaacatttgtgatgtatttccagcaccattgttggctgataaaatagagatagctttaaatttagtatccataaaaaataaaatgaataccgtaggtttagagaagtttaaagttctcaagggatctatgtattttttaaaaattatataaaaataactttaaagtaatctttttttcttggtaaaacgtgcagttttatgtatttttaggcaggagtaacaactttttccacatttccatccagagaacaaaggtcaaaacagcatttattattctagctatagttttactgtttaaacttttgaaattttgtgtagcaccattgagagaagattagtgcttacagctgaaacttagttttaatacagtatcatatatacatatatattggttgatttgtttttgagacagggtctcactgtgttgcccaggctggaatgcagtggtgcaattatggctcactgcaacccttgtgtctggagctcaagcagtcctcctacctcacttcttgagtagctgggactacagacacatgccaccatgcccagctaattttttgtattttttgtagagatggggtttcaccatgttggccaggctggtctcgaactcctggactgaagtgatctgcccacctcggcctcccaaagtgctacgattacaggcatgagccaccatgccagacatctttttttcattttttgttatcatttatttctgaaactcagccaatatgatgtatagagacaaatacatagatattgactggcaaaaagtcatggagataaagtgtattacttgaacaagacttcagattgaatattattattctttagttttcattcatttgcccgctttgtgaggtattaggaatgacatgggtggtggtggatacaacatagaaaaatttcacttgcttaatattacttgaactaatctctgggaccatagtcccttggccatcaccaagactgagaagaatcgaatcaagattttgctttaggggaaggttgttttgaatatcttagggggatttacagtgcactctcctgtagcttacattgcaaagcattctggcatgggataagatgttcataactctgtgtgttgtctttaaacagagtctttgaagcagttccctcagacagcacaggacattttcctactgaaggaactcagatgcagtttaggcatacttatatgtggaaactatccatctcatagtttactactgaaccctgaattagctggtagcaacaaccccctaccctctctcccgcagtcagaggcttctcctgatagccatggcagtaaaaatagaacagtagaactaaaatattttccagaagcagaacatattcatagggaaaggatgaattcaaagttatttacaactcttttatcttcaaaccattacatataaattgatcaaataaaaatagctagtctaatgtgttttgagcaggtattaccatttttatttattatttatattgcttatttttgaatcatgatatttcaggctttttatttgatgagtcaacatcttaagattcctaatgagaatggaatatgaaaaataattgggtcattgttaacaatgataagtcattttgacagtatgtgtacttgatatgatcaatgatacttcagctctgtggttctcttccccaaaatgcacaaccccagtccaattatgaacaaaacagtagacaaatcctagttaagaaacattccaccaaacaactgactagtagtattcaaaactgccaagcctccaaaaactaggaaagtccaagaaactgtcacagccaagaagagccaaggagacatgccatccaaacgtaatgacatatcccaggcaatatcttggaacagaaaaatggcagcagacagaaactaaggaaatgcgaataaagcacggactcttgttaagaataatgtatccgtgttgattaattatgacaaatgtgtcatactaatgtaagatgttaacagtgtgaaatctggcctctgggttcccaggaactctctgtatcaccttctctgtaccatcctcacctctctgcaaatccaaaactattctaaacaaaaagtgcatttaaaaaatcaattcaaatttggcagtgtattagggttaagaataataaagtaacagtgattttgagagagctcaaaaataaaaaatttggaatggcattcttttcaaagcttggtggacccaaaacctataaatacttcagtgggggagatcagggattttaccttcggaacattaaggttgtatgaatttattggggaagagggaaggctacaaagtagtcaacctaattctatttgtcttctttgcccctggcttccagatctctctccaagtcaccatagaccatgtgcaccccaatattgaatatctcatgaacaaccaggacagatttgatctaagaaagactcaatgcaagaaatccctgttatattccagtggagagtgttatgtggaatggacccctccatttgaactcttaaattctgtttcaattcaggtcattattctcctctgctttccttggaggtttatacaaatcttaggtacaccaggaaaccatcctttgagccagggttctttctcagtgccaggcacttttctatgtgaattatatcaacaggtaaccctgtgaaccatgtttctacctaacgctgttgacaaatttcagtcctgtttcatttcacacaactgcccaacttggtggatcagaagacaacaggtaaagataaccaagtagccaccaagtaagactaggaggctttccgcaaaaaagacaactttctgaaatgcttggtgaaactgttcattagacagaatgtacatcactggattgatgatggagtttaaaaatagctcagcaaggctgggcgcggtggcccacgcctgtaatcccagcactttgggagaccgaggcaggtggatcacgtgaggtcaggagttcgagaccagcgtggccaacatggtgaaaccctgtctctactgaaaatacaaaaaattagctgggagtagtggcaggtgcctgtaatcccagctactcgggaggctgaggcaggagaattgcttgaacctgggaggcggaggttgcagtgagctgagattgtaccattgcattctagcctgggagacaagagtgagacttggtatcaaaaagaaaaaaaaaaaaaagctcagcaagatgaagatgtcttaatatggtggtatcttggctggcagagaaacaataaagagaggcagccagcagatgataaaagcccctaaaatgatccccagggtttctgtggctttccttgtttgaaagtaaatttcctgttgtactaggacactataagcatgcttgattttcatgtgattaacaagcagaggagagccagttaagcgcctttgcctctcatggaggctggggttgaggaagaagagtgagctgtgatgacctgggcagtggtgctgtgatgatggcttctggatgttcttgttgggcaatgtgtgaagatgatgaacaacacaaccaaaatgtagaaggtcttacatgtggagtaggtggtgcaagaggtctaggagaagagcactgggatagagatacaatttgagatggcccatttactatactacagggcattggtgatggcccagtacctggtcagagcaacagacagaaatatcggttggaggccatgtagcacgtgatgctagaagacagccagatgttgcacaggagttggccaaatttccaggtgtgtgtgatggtctatgtgatgctcatggatatgaacaaggagccagtgagatagttggctggtgtatatagcttcctggtgaggaagatggtggtaagcagaaaggtgttggagagagctgttgtcagtgcgatgatggaaaggaccacagcaagagatctctagcccctggaagttcccagctcctaagcctccggtatttttgtagtatcgagggatccgttggaggcctcctggaggatgtcttccattggatggttttgtgaggacattctagggagctttctcttccacagtcatagcttctcttttcacagttgtctgtaaaaggtcatctttccatttcctacttctgggaaccgtacatcagaagagcaaaccacaacagaaaatctccaaggcttgattacatgaagaacactgaggtgactcctagctacagttaaaggcttttcccaaatcagattaatcccaagatgtctctctgttctagaactctgataggcacatgctgaatatgttagacaattgcaggttatcacagcactgtgggcaaagctccacaatttcttgcctttggtattttgactctttttaaggcttgagacttatacgtgtttaactgtgccttcagaatatttcccatcctattccaaagagattgtggatttcaggttgctgcctgggagcttttaaaattagagacaaaagggaataccagcttattcagagaagcagtccagtcaacagctcacagttttcctaggtgaatcctgacatatgattggtacttaattttggttccttttctactgactgtttttgagcctgaaaagacaaacattccagttaccaaagcttgaagaatgcatgaactcggagaagggaaaacaaacggatcactgtgagtttgccaagcggggcaggtgttcgaagcccctccctggccgtgcgtgtggaatgctgggcttgccctcctgggccctcctttcttcacatggtcggattttggcctacataatcacaggccccagccctgcgccttcccctggccctttcccttcctgcacttttgggatactccatttctttttttgttaattaataactttattcgtttggagtagtttgggaagttcccaagtgtacctgaataatgtacattgtattcaataggtaatttttcatttctcccctgcctgcctccccctgctctgagtctctagtgtccgttataccactctgtatgcctttgggtactcagcactgcctccctcttatgagtgagaacatgcagtatttggttttccattcctgagttacttcacttaggatgatggcctccagttccatccaggttgctgcaaaagacatgatttcattctttttttcatggccgagtagtattccatggtgtgtgtgtgtatgtatatgtatatgtatatgtatatgtatatgtatatgtatatgtgtatatatacacatatacatgtatatatacacacacacgtgcatatatatgtgtgtgtgtatatatatatacacacatacccatgtgtgtttatacacacacacacacacacacacacacactttctgtctcttgccatatacaaaaattaacctaggtggattaaagacttaatctaagacccgaaaccataaaaattctggaagataacacagggaaaactcctctgaacattggctcaggcgaaggatttatgacaaggatctcaaaagcacaacaaaataaaaatgaataaatgggacttaatggacttaattaaactaaaaagcttctgtacagcaaaataaataatcaaaagagtaaatagaccacctacagaatgggagaaaatatttgcatcatattcaacaaaatattaatatccacagtctacaaggaacttaaatcaacaagaaaaaaaaataatcccataaaaaatgggcaaatagcatgaatagacatttctcaaaagaagatatacaaatgcccaaaaatgtatgaaaaaatgctcagcatcactaatcatcagggaaatgcaaattaaaatgacagtgagataccaccctaccccatccagaagggctattattaaaaagttaaaaaataatagctggtatcatggatgtggtgaaaagagaactcttacacactgttggagcaaacgtaaattagtacaacctttatggaaaactgtatggatatttttcaaagaactaaaagtacatttatcatttcaggctgggcgtagtggctcacacctgtagtcccagcacttagggaggccgaggcagatggatcacctgtggtcaggagttcaagacaaacctggcaacatggccaacgtggcgaaaccccatatctactaaaaataaaaaaatctgatgggcatattggtacgtgcctgtagtctcagctacttgggaggctgagacacgagaattgcttggacctgggaggcagaggttgcagtgagcctggatcgtgccactgcactcacagggcgagacttcatctcaaaaaaaaaaaaaaaaaaaaaaaagatttatcatttcatccagcagtcccactactaggagtctacccaaaggaaaagaagtcattctgaaaaaaaagacatctatgatatggaatcaacctaagtgcccatcaaccaatgaatggataaagaaaattaaactttccttttttttttttgagacggagtctcgctctgtcgcccaggctggattgcagtggcgccatctcggctcactgcaagctccacctccctgggttcacaccattctcctgcctcagcttcctgagtagctgggaccacaggcacgtgccaccacgcccggctaattttttgtatttttagtagagacggggtttcaccatgttaggtggtctcgatttcctgacctcgtgatctgcctgcctcagcctcccaaagtgctgggattacaggcgtgagccaccgcgccctgctgataagtatttttttaaaagccctgagaaatgacaatgtaggatttaaaaaatgacttgtattaacagtatgagagtaatatgtgttcaaggtaaaaaaaaaataaataaataaaaataaaaattaccaaaacatatggagtgaaattaaagttccttctcccatcctttgctcctctcagtgcagttctttagggttattaactgttgttaacagttctttgtgtgccgtttcataaagtttctatgcatatcaagcatttatgtgttatataccttttaaaaaacaactggaatcatactttttattaatttaaaaataaacattttaatatcatcttatatacagctttatctcatcttaaaaaatatctacatggttttctgaatcatacttctaccataatttaactaaatttaacctaagatttacaggtagatgaagataggggtttttcttattttattttatttattttatttttttgagacagagtctcactctgtcgcccaggctggagtgcagtggtgcaatcttagctcactacggcctctgcctcccaggttcaaacagttctctcctgcctcagccccctgagtagctgggattacaggcgcgcaccaccacacctggctaatttttgtattattagtagagaggattttaccatgttggccagcctggtctcgaactcctgacctcatgatctgttcacctcagcctcccaaagtgcagggattacatttgtgagccaccacgcctgacctcttgttgattatagtagtataacgcataatgacataaccgtctcattcatgagttgatattgtatgcgtgtaaaatgtcgatagctgtttaattatccaccaagagttttccactgatttacacggagaatgtttttttgcacagtttcattaaacatttgttatcaaacctttttaaatttccactgacttggtaggcaattctgaagtgtctcttttcttgcttagtatttatttaaagttgagttctcattgagcattttttcataggtttttgttttgttttaattgggaggtatatgttaatttcttttccatatttttctgtttgatgatgtattttttcttgttgatttataggaagtttttcctctagtaaatacattggtctatttccttttatgttttacaaatacattttcctgttttttgttttttgtttttaacttcatttatgtatttatttgggggtttatgtcaccaaatttaatagtacttttctttatgtcctctcagttttaggtcacactttgaaagtccttatacatgccaaagtcattttcatttttatatttttttgagaaaggctctcactcactctgtcacccaggctggagtgcagtgtctcagtctcagcccactgcaacctctacctcccaggctccaagccaaccttccacctcagactctcgagtagctgggctacagccgcacacaccaccatgtccagctaattttttagctttctgtagagacagggttttgccatgtggcccaggctggccttgaactgccgggctcaagcagtctgcccttgccaaggttattaaataattcatacatgcttttctctggtacttttaaagtttctttttatacatctaaaaattggtttataaaatttatatattgccgtaatgattcagttttatgtttttacatgtggctggccagttgtcattatagtatttgttaaataatccaccccttctcttctgatttgaaatgccacaaataaattatcagattagtagattgttttgctatattaattttatttttgcaggaatttctcactcttctcactcatttactttttcagatgaactttagtatgattttgtcaaattttcctcttccaaaaaatgaacttgttactttttttattgaatgtggtatctcagaagtcaagtgaagaaagggtttcaaagaggagaggatgatcagatttttcaaatactgctgatgagttacaaaaaatgaaaattgaccattggctttaataaagtgaagatccaaatatctaaaaaaccatcatgcagaagaaagattagacttgttcaatatggccccacattaactcaatcagcagatactctaaggagtcaattctaaagagagtcaaactgtccaaaactgataacacactacctgggaggaaatcaattcattcattataagtggacatatagcaaaattaaagtgtaatccgtcactttatctaattttgctatatgtccagtagagtgggcagagtttatagtttgtgcctagtttctcctgtgattatctgttactttaaacaatattttaaaactttctgtgtcttgatttaacacgtttaaaaatgaagccatgtttattgactactttttattaaaaatagtttatttatattaccaatcccccttcttgattttagttggtaaacttttgttatattttgctgagttcatagtacttttcagttttatattgtgttgttttttgtaaaggagaaacattgcttactgtaattatgattcatatttagcttttatttctgaatttcagtatatttaatgctcataactagtcgttaaaaacagcttaactgttcccagtttttttgttttatttattttttttttgagaaggagttttgctcttgttgcccaggctggagtgcagtggcatgatctcggctcaccgcaacctcgcctcctgggttcaagcgattctcctgcctcagcctcccaggtagctgggattacaggcatgcgccaccatgcccagctaatttttcttttctttttttttttttttttatagttttagtagagatggggtttctccatgttggtcaggctggtctcgaactcccgtcctcaggtgatttgcctgccttggcctcccaatgtcctgggattacaggtgtgagccaccgcgcctggctgttcccaagttttaaactttaatttttggttgcccaggaacttctttgaattgttttgtatgaagggttatgggtgctatcccaattccttgtttgttgaccatgtgtttatgttatctttttatattttaaaaaccatttcagagatacaaaaatgtatagagaataatatactgagtataatcactcaagttaagtaaacatttcaaatattgttgaagttcattggcatatctctccttgatagtactcctttttattctatcccagagattaatacttgattttagtatttatacatgttcaataagaggaagtacatatggcaaataaatatgagaaaaatgttcaactataatgaatgaattgatttcctctcaggtagcatgtatcagttttggacagttttgaccctattttgtttaaccagaattgattccttagagcctttggcaccagggaccaattttgtggaatacaatttttccacaggccatgctgcaggggacagttttgggatgaaactgtcccacgtcagatcatcaggcattaggatctcataagaaacatgccacctagatccctcgaatgcacacttgacagtaggattcacgctcttgtgagaatctaatgctgccactgatctgacaggaggtggagctcaggtggtcacgctcacttgtctcaccgcttacttcctgctgtgcggcccagttcctaacaggccacagaccggcactggtccatggcccaggagttggggacccctgccttagagtatttgctgattgagattaacttggggccatagtgaataagtcagatcttttttctgcatgatatttagatatttggagcttactctttggcagcccccaaatctcaatatcctacgtgaagtatttttattcccctcattgttcttatttgctttggttattttttctgatgacttttatgtgtctaaactgatttttcttccatcttgacttgtttagttaggattttggatctaattgcaagagagatgattaaaatgggattcatgttccgttcacggcccttagctgaaatgtgggctactcagtgaaactcactaacgttcagtttcttcatctgtagagtggatataatagctacttaaggatgttcttgtttaacgatgtaatgtgtatgaaatcatgcaccttggaacctgtaaagtggtatatactcaggatatgaggtatcaacataatttattctcattaaatttcattcagccaattactctgaatttagaatcatggagaatcttttgactcttgatttgattgtttagtctaacagtaatttagtctgacaatcaagtcttgatttgactaacaaatcgtttagactaacaaattgtttagccttgatttgattgaaggattgtcaatccttcaatttcatgccttctacccatttataaacgtgctctgtatactttcgtatagacaataaaatgttgaacaagcccccaaaagatttaggtgatacattgtaagaaactgctgatcagattgatatatccatcacaacaattctaaaagctttttttgttgcctgtagaatttttttttgtaagctcactttgtttgcaggtccagacttttataaatctatattcctatttgtccttcatgtatgttcttcaataagacccttaaaaatctaagatcaaggtgagcatggtggcttacacctgtaatcccagcgttttgggaggctgaggagggtggatcacctgaggtcaggagcttgaccctgtctctactaaaaatacaaaaaattagctgggcgtggtggtgcccacctgtaatcccagctactggggaggctgaggctgtagaatttctggaacccaggaggtggaggttgcagttagctgagatcacaccactgcactccagcctgggcgaaagaacaagactctgccaaaaaaaaaatcaaatctaagatcagcctgtaaaattccttcttctttaaattttctttttctttttgtagagacaaggtctcactgtgttgcccaggctggtatccaaactcctggtcttaagcaatgctcctgccttggcctcccaaagtgctgagattacaggcatgagccactgtgcccagcctgaaattccttctaatgatgataccttgatagtgaaccacctcaggaccaccacctacacatattttcctagcgttctaagcaatgtatgcactggaatagtctttgctgtttcttcttctttttccttaatgagtacatttgtagttgtacagtcaaaattatgttcttgtgggtctcccagtcttcccagtctttctaaaccgtcctcattccgcatagtgttttccactatgtgctaggcaaagacatatagatgtggtctctgctctcaggagtcccagaattatgggaggttagaaggttatgatacgaatggtatacggtggggcaaaaaaacgaggaattttagatttagccctgtatgaaaggagtctgaggaagtcttaggagctgagtcttgaaagtttgcaaggtagatggagaagggggcatctaagcctggagagtggtgtcaataaaaacgaggaggggtgttcctttccaccgtgtcatgccctggcatttcacttctgcttttaaacattcgtaatatacgctcttaaaaatttctggtagagctctgcatatgaatgccgtttctgtctcattacgaactctgaaatcacttgctccctggcaaaattatacccaatttttacctaatgagaaaaattacagtgaatgtagtcatctttattgacctgttaatttaggaagcagttgagttgagtttttttctcctctgtcccagaagattttcaatcaaaaactgtagaaatttatcttcagtgggatattgtggtataacttttaaggtagaactttaggtatccctgtagagatgccttaattctgtacaaaaaagccttaaattctgtactttgcttcttgattcagacacttgttccctaaggaagaagaatatggtaacactacatttatccttttcttgttctttggtgtctacattctctaatcatttctttcatgaatattataactgtatatttaagtaatatttaaatattgtaatatttagggagcagtactgagaaactatgttattttggcatttatctagatatacttaaaagaaattttttcttctgagcacaatggcagttatggtaatcgctgggttataagttagtcacatactgtggactgtctctggttctgtctgggccaccactgtccacccatagtcttccttgctttctaagtagtatacatatttgtatgcactagggtaacccagtgcttagagaatgaaacgagacaatagcagatggccaagcgtgctgtacaatgggattagtattgggctcctccttcccagggttctcccctatggtttaaagtagttctgtgttacagtaaatttcttatctttataataaatcactgacctggaaaatgtaattgagcatttgaatctgagctgcattcaaaatctgtgttaaaattgtacagcttcttgcttgattgattataaatgataatgtagcttggagtttaatttgcttacacagatgctatcaacattcccttccatgcttctgtaacttctgtttatttcgttttgcttgcatctccagtttcctaggtttgttttttttttttgtcctagttggttctttaagtctcttctattttgttttgggtaggaggtcagaaagaataggtcctttgtatgttccgtttgttttctgtgaagtcttggataagacagttgttagtttgttcactttttccatatcataaaatcggacaggagagtaaggttgttgtttttttaattaaagacaatatttactaatatattctgagaaaatattttatttttaaaattgtgcctttttatttttaataaggatcaattcctgtattttctgaatgttattattttaaatcttaacccagctgtgaagcaagctaagtttagagaagactgtgtcaggcctaattgaactttacgtctgaaacataatttagttagatattagaattttttcgttttctttcctttacttataattgtctaatagaactcactttgcagttctttgttgatggagaatatgtatagttaaactcttgaaatatcattttattgcaaaaacaatgcgcagtaaatgaagtttgatttgatgattatatttttactggtagctaaggaaatatactctgtgtaaatttatttgcttcatacaactttttttcccctccctttttaaaagtaaaccttaaggaagtggagagtttaacttgcaaagtattatttaacttctgtatgtcaacaggtttctggttttaaatgatgctgatcctatacaagtgatattttataattattgaagaattattctcttagaaagggaggttattttttttaccttgttatagtgtaaatcttttaattatgatatgttccttagcagtattccttccacttccagaacactcctctccaaaaaatactacaaaataacaaaataccccctcatccctacattgtgataatctagaaataataaacttcagatataagtgattaaaacaacaataaaatggatgtattgtgatagatctagcaaactctattgctgcatgataactgccctaaaacgcagtggcataaacaaccattttattttgcttatttatttgtgaatcaggaattccagaagggctcacataggtagtttgttcttgatttgtgtattttcacctggaagtgtctatgattggatgatctcctaccaagatggcttattcacttgcatatattctctttgctccttagcctctgtctacatggtggtttttatttttattttctttatttttattttttgagatagagtctcactctgtcacccaggctggagtgcagtggcacagtctcagctcactgcaacctctacctcctgggttcaagcaattctcatgcctcagcctccctagtagctgggattacaggcatgcagcaccacacctggctaatttttttatttttagtagagacggggttttgccatgttggccaggctagtctcaaactcctggcttcaagtgatccgcctgtcatggcctcctgaagtgctggattacgggcctcagccaccatgtctgacctacatggtgtcttttgccccagcttctgcaggtgccttgggttcctcgtggcatggggaaagtagtcacacttctaatgtggaagctgcttccagatttatagatgttagaagcagaagctgcttggtcagttaagggttattcttgaaagtggcttggaagtggcaggtcacttctgttgtattctgttggtcatagtagtcacagaacctgccctttttattttattttattttattttattttattttatgttgttattttatgttattttattttgttattttattttatgttattttattttgttattttattttatgttattttatgttattttatttttgagacggagtctcgctctgttgcccagcctggagtgcagtggcgctatctcagctcactgcaagctctgcctcccgggttcacaccattctcctgcctcagcctcccaagtagcttgactacaggcgcccgccaccgcacccagataattttttgtatttttagtagagaaggggtttcaccgtgttagccaggatggtctcgatctcctgacctcgtgatccgcccacctcagcctcccaaagtgctgggattacaggcgtgagccactgtgcctggccagaacctgtccttattaaagcagggtggtggtggtgtcaagaatggggctccaccttcttcctgagaaggggtagagttcatggcagaagagtatgtgagatggaagacattgttgtgaccatttttggaaaatatctacttcagtagaataaaacattggataaggggttggaaatcaaagagtgagttttttttgtgcggtatggcaataaaattcttactcccttttctgttgtcttatgatattgcagccttattaaccagaatggaagtggaatgtttctatttccatgttctgctcagtgttttaatctgttatttttagggtttctactgttatctgttgctttcaaacaagctactccaaaccagaaagaattctgaacaacttaagagttgttttacctaattcaggaattaccacagagtataaatgtaattcataggaagaaagtacagaagaataaggtatgtggaaaggaagaggactaacagaaggtgaattaatgctacttactgattttggcaattcaccttgggtgagaagcacgactgtctagatggaaactcttgtgtattagtgatctaacaagaaccagtgtgcttgctacaagactgccttttagaagatagaggtgtgtatagatgatacacagaatgcaggagaatttttttttttttttgagatggagtctcgctctgttgccccggctggagtgcagtggcgcgatcttggctcactgcaagttccgcctcccgggttcacgccattctcctgcctcagcctcccgagtagctgggactacaggcgcctgccaccatgcccggcgaatttttttgtatttttagtagagacggggtttcaccgtgttagccaagatggtcttgatctcctgacctcatgatccacccgcctcggcctcccaaagtgctgggattacctcggcctcccaaagtgctgggattacaggtatgagccaccgcgcctggcgagaatttttaagaacattaagaagaaataaacatggctaaactgttttgtgttatttgagggggataaagcaagatacatctcagaacttagagtgttttcacaattcgttgatggatattgctttgacctagcactgaggggttaatttggatggaattttttttccaatcgagctagaattcacagatcataaaatttaccattttaaactatatgattcagtggttttcagaatatttacaatgttgtgcaaccatcatcactgtccaattttcatcacttcagaaagaaactcacacctgctggcaattacaacccctcatcctctgacaaccagtaacctcctttttgtctctatggatttgcctatactggatgagaccttcgactgtgaacttttgagctaatgctgaaatgagttaaggctttgggggatattggttttgaaatgtgaagacatgagatttgggaggggctgggtcgaaatgatgtggtttggctgtgtccccacccatatctcatcttgaattgtaataaccacagttcccatgtattgtgcgagggacccagtgggaggcaattgcatcatgggatgggtctttctcgtgctgttcttgcaatagtgaataagtctcacgagatctgatggttttataaagagaagctcccctgcacaagctctctctgtctttgccttgtgccttccaagcaagtcacatggtggcttgccttccaacatgattgtgaggcctccctattcatgtgcaactgtaagtccattaaacctctttttcttcccagtctcagatatgtctttatcagcagcatgaaaatggacaaatacagaaggctttcagtcttcaccttgaagtatgatgttgactgtgggtttttcatagatgctgtttatcaggttgagaattcccttccattcctagcttgttgcatgtttttatcataaaaagatgttggattttataaaattctttttctgtatctattgagatgatcatttggtttttctcctgtattctgttaatgtggtacattatattgattgatttttgtattttgaaactaaccttgcattcctgggtaaagatagatttgtttttaaatagctttgtgtttttcagctggatgaatgtagaaacttgttctatcagcattattatggagacaatagaagtggacctgagagaatatagcctttggataaatgcttaattttcaagtgctaaggtgtaatataaatggacatatgcaaaggcttatattgtaatatttttacatcatggaaataattttgactcattaaacattatttctttgggcttttaagtaacttagtgaataatttgaggatctgtgcttatctgtgtcgtttctcatctgttgttaatacgccacattaatgttctcagagtcttgcaagttctagttgagtgttttgaccgagcacacattttaaacttgaaaattgataattatcaagtcaataaggaagggtcagatccctcttctgacaaagattgttcttagttgtttctcaggagatcctgtagcaggaacttgtcagagtagtaaatacacagacacatatctagaaaaagacaaaagatttagggaaaagtgcctggtcgcagttttaaagcagagtcaatattttcttctgcttaaaaactgcttataacttgacataaattctcttacattgcattctcatctgtgggaatggctgtttggttagatgcccaggtatctgtcaactctagttgagaaattgaagtaactaaccacgtgaagaagttattaaatcagactctgatgaagcagccttttatgctcttcctttttcctgctacaccagtatgtatatcctaaccagaaaatagcttcaagaatcagacatctattttgttctttatctgttttatcttcctgtaattgtcagacttcctcaattttttctcctaatgatttttttttcctaaaggagtttttcagattagaaaaatcatgtaattttacagagaaaaatttgcaaaattctataagatctttgggcttcttttttcttttctttttttttttttttccgagatggagtctcgctctgttgcccaggctggagtgcagtggcgtgatctcagctcactgcaacctccgcctcctgggttccagcagttctcctgcctcagcctccttagtactcgggactacaggcgcgcgccaccacaccctgctaattttttatttttactgcagacggggtttcagcatgttggccaggatgctctcgatctcctgaccttgtgatccacccaccttggcctccccaagtgctgggattgcaggcgtgagtcaccgcgccccgtcagcctttgggcttcttatatacagtgcatataggtaagaaactgacatttggatttgtttcattgcatcccattcaggctgaactctgccttatacacagcaaatttggtatttttattttttttgagacagggtctcattctgtcacccaggctgccgtgtagtggtgcgatcgtggctcactgcagcctcaacttcctgggctcaggtgatcctcctacctcagtgctgcaaggaactaagactacagttgtacagcaccatgcctggctgactgttaatagtttttgtagtagagatgggtttcgccatgttgcttaggctagtctcaaactcctgggatcaagtgatctacccgcgtcagccttatgaagtgctgggattacaggtgtgagccactgcactggccaaatttggcacttctataaagcagctaagcaaacaactttaaatgaagtgactggtctttttttttttttttttttttggaggaggagtcttgcttttgtcgcctaggctggagtgcaatggcgcaatcttagctcactgcaaccatcgcctcccaggttcaagcaattctcctgcctcagcctcccgagtagctgggattacaggtgcccaccaccacacccggctaatttttttgtatttttagtagagatggggttttgccatgttggtcaggctggtcttgaactcctaacctcagatgatctgcccgcctcggcctcccaaagtgctgagattataggcgtgagccatcgtgccggctgtgacgggtcattttaaacaacattctggattcttgaaaagaatgccaccgattaataatttgtaacttctcttatgcttttgacagtctgatgaaagctatgggctttctccaggtaaaagtgtgcatagttcatttgtgtgaactgagatataatatacaccttaaagtttatccatgaacttctgattaaaaacacccacctttcaccatgacatggtgaagaaaaaaataatcagaaacactcaccatctatggaacaaccaagttggtgatatacactggtttctaggttttacaaaatcataaaatatgtgtatggttcaaatacaacagaaattcatggcaactacaatttcatgttaattataatttaactagaaagagtgtagctgttgggtatggtggatgctgcgatgatcgatgcaacctaggtctctcctgattgttgaaggacttatttccccagatcgctggaagtgttatcaacagaaagccctccactttccctagagattgtcttagctaaagacaccaccttgcccgagggcaagccccctcccatggacatccagtgattgatccttatgaggtgccatggtttgaattccttccccctacttgggacaacagcttcagagctcctcgtggggttgtcagaatcctttgggacttcgtggcagctgaatcgctccctctgtacaatcctcatttttctcctcctatctactgactccgatcccaaagagcaccgtctaataaacttcttgcataataatgtctgtctcagggtctgctttccgggaaacccagtcttgggtagaatacagggtaggatatgagtgcaagtcagcatctttcaacccataaaagtagacctggcgaaaataaaaattcaatgagatgaacttgaatttaaattaaaaataagtgaaacatctcatcatatttccttcacaccttatattcaagtagtttttcagagtcttggtttctttgaatttatttgtgtctctcagtctttctttgaagaaagactccccaaatctctgaaagcttggtttgtttggttacacattatgaacttgtgaaaggtgtgggttaaataatacagttgcttacatgccccaaagaaacccctagaggttttctatgttggcaggtgaatatgataagagaatctccttttgctaagatttcttggactgtatttagaaaatatttggttttggcattatcattaaaattgtagatgtccattctaaatatatgaaaagtatggaaaagctataaaaagaaaaaaatctgtgtaaaaataaacttctcctcacttgaaattggtataatattacacttactttttggtgacctgtcttattcatgtaatagtgtataataaacaagtttttgtatccttaattctcaagaatatgaattgtaatggtataatattctttccatccagtggatagaccatatttaatttggctagccttttattgttaagtgtttaattattcccaatttttaaattattacaatacaatggatttttttaaaaaattaagcctcttgtgcctgctttagtttttaaaaaaatattggatctctcatcactaaaatgtagtgaactgagactaggctacctagacagccactgtaactgaacaacttcaagggaagccattcacatcgatgatgtgaattgagggcctcagtgaaatctcatcattgctactgccacagaaggattgccgttgtggatttatgtgccctctttgtcttttgagcaattttagcacagggaggtctgtcaattttttatatatgctgactagatagaaaaagaagggtttgagctattttccataattatctaccaggcagatcttgactggcagtgacctttggtcttaccagcttttgtgtcattgtatccagttgttctaatgcgagaggcccctagttccatgatctgtaccatgagcaaatctgtcaaggaactttctttcctaccagcaattaataaaatctacctggagcagtggactctgaaaatatattttcttaagggctataccattcctgtataattaaatttgaacagttttaaagataaaatatagtagtattctggtgaagtttattactttttaaatgttctcatcttccttagaagaatattgttatattttataattgaaagagatgttactagtcttttgttttacagttaaagtgatgagaaagattaagcaatttgctcaatgccacgtaactagtcattcattgcaataattcactccatgatctgtactatgagagaacaacacaactgacagggaaacccaaccaaggaagtgttacttgctacccgacatctttgctgggcttattgaggaccataagcagtaattgagaatactgatatgaaaacttttaaaaacccaaattgaatttaaaacattgcttagagtttcttatggttttgtcagtcttgcagcttctcatcgctggaaacaagtggagaagcaaaatttagatgtcagcaatagtctgggcaaaacattctttttttttttttttttttttttggtaaattatagttttgccttgtttgtacattttgtccgagtgtctgatggtggacaaactgttgaccagaaatcaggggacttagaacctgaaaaggaaaaattcactattaattactatagatccctctttgccaactgattatgaccagttcatccagactgtatttctgccatcaatactgaaaggtattattaaccaagaaagtaaaggtcagagcctttttgaataactgatttcatacaataaatttgatgctgatggctatttaaaagagctgtggaggcaccctcaaaaatgttcctttcccttaaatgatatttaaagtgagccaggggactgcaagaagtgttttgagctgtcttgtcctcagaactgtgtcctagaggaagtctcttctgcgtttgcccagtgatttgggcctcaaaggcagagtaatcagttccacttgactggaaataaatcacccagactgaaacatgatagctcctgacaactgggcagggctgataaaagccaaaacaaaagatgtcaataaatctgtgccaatgtggaattagtatgcagatttgatgaattcactctgtagctttgcagtcagcattagacttcctctgattttatcagtttttctttcttgttgaaataaaaattgtatgaggacaagaaagcctctatataaaataaccattttatttctgtttctttccaccctagtaaacagaactgtaccatgattacagaggtcattttaaggaataacgtcgtctttctccaaacagttaatttaaaaatgtttcttccttgggctgggtacagtgactcacatctgtaatcccaatgctttgagaggccaaggtgggaggatcacttgaggccaggagtttgagaccagcctgggcaatgttgcagtacttcatctctacaaaaattaaaaatcggctgggtgtggtggcatgcatttgtagtctcagctactccggaggctgaggctggaggattactcgtgctcaggagttcaaggatgcagtgagcagtgattacactgtcacacttcagccttggtgacagagcaagaccctgtctcaaaaacagaacaaacaaatatgtatttcttgagtttactactcaataatgataattatatatgatagtaaactgtatatataaacctgttgggtatcaccccccttctattatcattgacggcacagatgtgtagaataaatgccagttcctttgatcactacaaaattttgcttgtacagaaattgaatatatgctaataggtagtgatttctttctatgtcagggagagtttatacaaaaaaaaaacccatgggattataaaatgtatccttttctgtaacaattattttattaattttcaattttaaaactaatttatgtaacagaagaaaaaccttttaaatgttttattgtcaggtcctccttggtccgtctgtctgtaaataaactagcttcctttaaccttgaaagttaggctaaacagattatttgaataacgtcgtggtcctgaaatccttaacgtcaagcatctttggctctgcccagcagctttagtgtatggtgattagatgtatgtttcatccatgaaggatgtacttttccatttgcagtggtttggtacctcattctttgggggttcgttttattctttgcttcagtagggggtacattttaagtacatgatcgtagcaatggtatactatattaataaacactataatcataagaaatcatttatggaaagatgctttatgtgattactttttcagtttttcaccatagaacatattatttatagggtggtaattaagagtagattctggagctacactacctagtgattttcccataggcctgtagtgatgcttaaatcattgttccatataaagtccttgcatcagtacctggcatgtttttaagtgttggctgcttctgtaatctacctccccaccaccactgttagaatcgtcgttcttgttattttattttaggggttctgtggtttatagtcctaaacaatggagagtttttaaaaactggatattccgagcatatttaaaagggtatttttctgctaaacgtgattctgaacaatcatttttatctttatgttctagtatgtgcataatggatccagtttttctcttggctgttcaaagcttcttataaatcttatatttcagatcctatgggtacttgaattagtatagaatagactctctgctgaatattttataaaaatggcataatacatactgaaataatatgatatgggactatcagagtaaacagcatttataacctcaacattagcttggtgaaaaagaagagaataatgacaagaataatgtggtaacattcattcttcagctggtcagtgacacatataaactgaggtccttgatcacaacgaaagtgaggatatgtcatgggagccttcagtggggctcagctgttacccatcatgatgctgaattcagtgagtgagggctcagctgttatccatcgtgatgctgcagtcagtggggctcagctgttacccatcatgatgctggattcagtgggactcacctgttatccattgtgatgctgcattcagtggggctcagctgttacccatcatgatgctggattcagtgggggctcagctgttatccattgtgatgctgcattcagtggggctcagctgttagccatcatgatgctggataaacggaaagagaagtatttttatgggcacacatttcacccgacacacccacctcccaccccctgcgtgtttcgggtttgttcagtgcttacacagctggtttgcacctatctgtgtctatttcaggtcttcctcactgatggcagcttgcccagaggaggtaatcttagtgtccactgttctttttttattttgtgagatcctttcactatgaaatgtttgtttctcctcttttagaagtaaataagagtctgagaatagccatcccttttcactccgactcaacagtcagtctctctagagtgggtaattgaaaaagaaagtaacttgccaagaacttgctgacggcattttacctgtttcagcagcttctgcacctgagtatatcagcagaagtgtttactagcaaagaataatggattcctttaatagtttaactacatatcaggtataaaagtgaaattgttaacattttaattcctgaatttctccctagatgcagatgatggagtagaaagaagggtattatccttattatgcatgtaaggggtgtttgtatattaggtaggctcataaaacaaatctgtcttcttgtatgtaaaacttggttggttctgtgaaatttcattttaaataatgtttcttgtattgccctttcttgacaggaaagtctaatcaacagcatgaccatagcttttctttgtataagacctatatgttagcaactggaatgacctgcacagctggttaaacatgtaaacaccaaggcattgtgttctgtatatacaggtatacctcggagatattgcagattcagttccagaccaccacagtaaaacgagtcacacaaattttttggcttcccagagcatataaaaagttatgtttatactatattgtagtttattaagtatgcaatagcattatatctaaaaatgtacataatttaatttaaaaatactttattgcaaaatatgctaatgattttctgagccttcagcaactcgtaatattcttgctagtggagtgtcttgcctctgtgttggtggctgctgactgatcagggtggtagttgctgaaggttggggtggctgtggcagtttcttaaagtaagacatcagtgaagtttgctgcatcaattgactcgtcgtttcaaaaaagatttctctgaatcctgcagtgctatttgatagcattttacccacagtagaatttctttcaaaattagagtcaatcctctcaacccgtggcactgcttcatcaactaagtttattaatattctacatattttgttgtcatttcagcaatgttcacatcatcttcaccaagagtagattctgtctcaaaaaaaaaaagcaacaacaaaaaacactcttattactcattcagaagaagcagctccacatctgttcaatttttttttttttttgagacggagttttgctattgttgcccgggctggagtgcaatggcgtgatcttggttcactgcaacctctgcctcctgggttcaagtgattcttctgcctgagcctcccgagtagctggggttacaggtgcccaccaccacgcctggctaactttttgtattttcagtagagacagcgtttctccatgttggccaggctggtcttgaactcctgacctcaagtgatctgcctgcctcggcctcccaaagtgctgcgattacaggtgtgagccactgcgcctggcccatctgttcagattttatcatgaagttgcagcagttcagtcacagcgtcaggctccacttctaattctgtttctcttgctatttccacatctttagtgactacttctgctgaagtcttgagcctgtcaaagttatccgtgaggattggaatcaacttctcccaatctcctgttaatgttgatattttgacctcctattgtgaatcacaaatgtttttaatgacatcaggaatggtgaatcctttccaaaaagttttcaatttactttgcccagatccatcagaggaatcaccaactatggccttacaagatgtatttcttaactagtaagactagaaatcaaaatgactccttgatccatgaggtgcagaatggatgttatattagcaggcataagaaaaacatgaatctccttgtacctctctatcagagctctagggtgaccagatgcattgtcagtgagcagtaatattttgaaaggaatctttttttctgagcagtaggtctccacagtgggtttaatacaccaagtacaccatgttgtaaacagatgggctgtgatagaggcttcattgttccatttataaagcataggcagagtagatttaccataattccacaggccctaggattttcagaatgataaatgaacactggcctcaactttcagtcaccagctgcattatcccctaacaagagagtcatcctcttctttgaagctttgttttctttgttttttttttcttttctttttttttcctttttgagacagagtctcgcttcgttgcccaggctggagtgcagtgacatgaacttggctcactgcaacctctgccttttgggttcaagcagttctcccatctcagcctcgtgaataactgggattacaggcatggaccaccacacctggctaatgtttgaagctttgaagccagacattgacttatcctctctagctatgaaagtactagatggcatcttttgccaataaaaggctgtttcatctattaggttggtgtagaagtaacttcaatggcaaaactgccattacttttgcaccaaccaaatacattgaaaattcattgtttgttgtagccatcttcattgattgtcttagctagacctggataacatgctgcagcttctccgtcagcacttgctgctttactttacacttttatattatggagacggcttctttccttaaacctcatgaccaacctctgctagcttgaaacttttctcctttagcttcttcacctctctcaatcttcattgaaatgaagagagttagggccttgttctggattaggctttggcttgaggcatgctgtggctggtttgatcctgtatccaaaccagcaaactttttccatatcagcaataaggttgatttcttttttgtgtgttcatcggagtggcacttttgatttccttcagtaacttgactgtttggttccagaggcctagctttcagcctgtcttggcttttgacatgccttcctcactaagcttaatcttttttacttttcaaactctgcatgtagcatttgacttaatcatttctaaattttgactaaaagtgagagatgtgcaacttttccttctccctgactatttagaggccattgttgggttatgaattggcctaatttcaatgtagttgtgtttcaaggaataggaaggctgacacagagggagagagaagagggaatgattgatcagtggaacagtcagaacacatgcaacatttcttaagttcaccatctcatacgggcagagttcatggcaccccagataaattacaatagtatcatcagagatcactgatcacggatcactgtaactgatacaataatagtgaaaaagaaatgttgcaggaattaccaaaatgtgacagagacaccaagttagaaagctcttggaaagtagtgccgatagacttgctcgacgcagggttcccacaaaccttcagttagtaaaaaacccgtatctgtgaagagcaataaagcaaagcgtaagaaatccaggtatacccgtatatggagtactgaatttttgagtggcaaaattctctttactggttatgagttgacctaagtgttgatccgtatgagatttcaatagtagtgtctgattaaatcaagggaagactaatgctttccatctcggatgaactcagttcttacaataggctttggtctcttactgggcaattcagtggttcacccatacgattatctctttgttaacaagtgaaaatgtaagcttcagcatattcacataccctattctaaacttaccaaatctctttcttagcttttttgttctgcctgtcgagttcttcttgactctagagaggtaccttaaagagcttgtactaaatttattaatgtaagaaactacctgacaattggatccaggattgttttgtaattccgttattggcaggagtttttgtgaatccctgaatatagtttatggaagtccaaacttatattttattcatttattgattaatgtttactatgatctgagatgtactgtataggaaggtacaaaacagctggaggggcaggatccatgtctacttgagacatgtataaaacaaagattacatatggtttcatacactaatcagtgctataatgattgatagatagaggaatggagatatgtgatcaatatatagatacatggaagaatggaggagtgtgtatttatacataatatatacatgtatatgtatcattactggggtacagacaatgatcaggtttttctcttgggggtgagggcaacagactgttcctagaggagataatgtttatcttgcattttgaaaaccacgtagaaaaatcaggtagttctagtatcagctcaagaggagatggtgattatattctcctgcttcatttctctccatagaacttatctctgccctacactatgttgattcattcatttgttcagtcactcattccctccctccatcattcatttgtctaccttactagaatgtaagctccatgaaggcagggatttggtctgttttcattactctgtttcctcagcaactggaaaagtgcctgatctatggtgggaatttgaactcctgtgtatatagtgaatgaataaactttgtgagtagttggtttatttataattttcctttagcttattaaggatagctccttagaatttcctcatagtttgcttgattttttaattatacttgaataataatttttattgtacttgagtctccttgtacttgagtgataacatgccgcttgctgtacttgagtgataacatgctatttccacagtgttatctcatagtatgttgagtccccatcatcttacctgaactgatacaaactctaatggttttccatgtctatatgcgagtcctcttaagttttcattgaaagatcagatccttgcatgctgacactgccaacactggtactgttatttatttaaagtacagaactggccagaccacttctgtgcttaaaaatctctaagggcttccatctctctataataaaatctgtgctccttaggttggcacacaaactgttttatagcttggcttcagctgtataatgatgcattttcttaccatctcatggtagaataaaaatgagtctattcatttttctttttttttttttttttttttttttgagacggagtctcgctctgtcgcccaggctggagtgcagtggcgggatctcggctcactgcaggctccgcctcccgggttcacgccattctcctgcctcagcctcccaagtagctgggactacaggcgcccgccactacgcccggctaattttttgtatttttagtagagacggggtttcaccgttttagctgggatggtcttgatctcctgacctcgtgatctgcccgcctcggcctcccaaagtgctgggattacaggcgtgagccaccgcgcccggcctcatttttcttcatatccatagtgtctggcatgtaatacagaattcaacaaacgttttttgagtaaatgaatgcatgtaagtgtatatgaatgaatggccacaaaaatgtttgctgcttagataaaagatgatataagtaaatgaatgcatataagtatgtatgaatgaatggctaagaaaatgtttgctgcttagataaaagatggtgtaaaactaacctaacactagcctttaagaacacagtcttttctttatatagctgatttgtctttttcactgtttagctgctctatcctctgtcctccctttattctttgtgaagaaatccctcttggcatttacaatgtcattttagaagtaatcctagtcctcatggctttcctctctacatggccatctctatactggatcttttctgctagctacttttcttattttgttagggatgtgtgtgtgtgtgtgtgtgtgtgtgtgtgcgcgcacgcgtgtgcgcgcgcgcatacacatgtgtacttttttttgttttgcctacaagttcctacaaatttaatttgcctacaaatttaaggttttgcatgtaattctgaaactcttaggattaaatgatttctacagaatgcacacacacagacaaccctgagctatctgttttcaaattgaaatgattttgattgtgctattgtttttttatacatgtcctctcttttcccttaaatatttatgtacatttagattgaaaatcttcaagagcagcttagagacaaggaaaagcagatgagcagcttgaaagaacgggtcaaatccttgcaggctgacaccaccaacactgacactgccttgacaactttggaggaggcccttgcagagaaagtgagtggctggccccaactctccacacacgttttctgctttctcattaatctaagactggatatagaatacaaaagaaatccctgtgggcacaagggaaaagagctgctgtgtgctattgctgacatacgtagtgtgaagggaaacattttttttagatggagtctcactctgtgcccaggctggagtgcagtggcgtgatcttgtctcactaaattccacctcccaggttcaagcgattctcctgcctcagcctcccgagtagctgagattacaagcatgagccaccatgcccaagtaattttttgtattttttgtagagacggggttttgccatgttggccagactggttttgaactcctgacctcaagtgatccacccacctcggcctcccaaagtgttgggattacaggcatgagcccctgcacctggccaaattgctctgattttcaaacttcttgagtatctgttgacagaaagttttgatgatttctcttttctttaccttcctttatattttaagctcaatatatcaaaatctttcccattccccccttttttggtgtgtgagttgtgagttgtttccattgccttgtgggcaacatgtgaataatatatagagaagaaatatttgttagttattgtccttagggtgtatatataagcttttagttacctggaaattgaataaatggaaatattgcaaaagaatactttagtgatatcaaatactagttgagattataagaaaagaaaccttgggattcaaatgaataaacctacatccttgttatggcaagatgaataagaaggatgaattatttaaaaaatgtattctggccaggcacaatgactcacacctgtagtcttagcactttgggaggccgaggcgggtggatcatctgaggtcaggagttcaagaccagcctgaccaacgtggagaaaccctgtctctactaaaaatacaaaattagccaggcgtggtggcatgctacttgggaggctgaggcaggagaatcgcttgaacccgagaggcagaggttatggtgagccgagatcacgccattacactcgagcctaggcaacaagagcgaaactctgtctcaaaaaaaaaaaaaaagtggattctttaaaaacttaccattgtcttttgaatatagaagtttgaaattctgctaaaagcagaattacagtcatataagtgcaaaagggaatttcttcacatgttgatatattctctcatcaggagcggacaattgaacgcttaaaggagcagagggacagagatgagcgagagaagcaagaggaaattgataactacaaaaaagatcttaaagacttgaaggaaaaagtcagcctgttgcaaggcgacctttcagagaaagaggttaagctccccaaaatggaattagtttgtttgcttaatcattgcatgtgtctgtatgttggtgtttacataatgcatataaaaaagtattcgatggaaaattttcttaatattcttttagcaggcttttgttgaataccttaaggaatatttcagaaagctttgcagagacatagcggattggttcattcattttctaagtattactcactttgttttatgttggttttttacttactaatatttttatagacctaaagtaactgaagctcagatacatttggagaaatagtgtgctaaagataagaaagttgacagataaaaggaatatgcaaaaggaggaaattttatgtatagcaactatcaaagaacacaacagctattaaattaggtgacttaatatactttggtcttgtttttggagaatcctgttaatatgacctaaatagcaaagatgcctcatgctatgtaatcagatgatgataatgcatgagctttagcatctttctgtggattttctttctaatatctttaggcaatgttatggaagtttaaattcctaatagaatttttcttttaatagggaaaaatgtgattttttttttttcttttaagagactgtgtctcactctgttgcccaggctggagtgcagtggcattatcatagctcactgcagtcttgaactcctgggcccaagggatcttcctatttcagtcttccatgtagctaggactatacgtgtgcactaccatgcccagctaagttaaaaaaatttttttttgtgaagacagggtcttgctatgttgcccaggctggtcttgaactcctggcctcaagtgatccccctgtctcagcctcccaaaatgctgggtttacaggtatctggccgaaaaatgttttctgtttaagttaacgtagctactgaggtttgactacttacattcacaaagcttgatctactttggtttattttgtattgacagaactctttacatcactgttcaatgggtatttcttgagaatccatcttatttgttaagagttgaaagctagagctaatattgttttatatttcatgaatgagtttccttgtaatgggagtatgtcagcatttggtaatagaaaggaaattacagctaccatgataaatttaaaaatttaaacctctattttttttaaaattatttattctagatgtgtgttccttcttttaggcttcacttttggatctgaaagagcatgcttcttctctggcatcctcaggactgaaaaaggactcacggcttaagacactagagattgctttggagcagaagaaggaggagtgtctgaaaatggaatcacaattgaaaaaggttaaagaaaaaatttcacatttttttgctttgccttaaataagaacatagtagataaccttagcatgtttatatggaataatttaccaatggaataataatccgccaaactttaaaataccatgtatatctgaattaattatcttagcattcttatcctactttattttattcaagataatccccaaatctttaaaaattgacagttcagagaaagattaaaatatgcaactctcttgtgggtaaaatatgagaccagagtgtaaaaatctctgttacctgatatttttctcccattagaatcagacttctgccaggtgtggtaactcatgcctgtaattccagctccttgggaggttgaggtgggaggattacttgatcaggagttggacaccagcctgtgccacagagtgagaccccatctcttaaaaaaagaaaaaacggtggctcatgcctgtaatcccagcactttgggaggccgaggcgggcagatgacgaggtcaggagttcgagaccagcttgaccaacatggcgaaaccccatctctactaaaaacacaaaaaaattagccaggcttggtggcgcaggcctgtaatcctagctactcaggaggctgaggcaggagaatcacttgaacccaggaggcagaggttgcattgagccaagatcgtgccactgcactccagcctgggcgacagagcaagactccatctcacaaaaaaaaaaaaaaagaaaaaaaaaagaataagtgggagcatattttctaatttaacatatgtagtaaggtctgagactcagaataattgttaaatatcctgtttcagattttatctcattttggagaatgttaatttcctagctttttttttaaagacagggcacatattgtcagaaagttttttttatttgttatatttttaatttctcttagcaacttattgggcctagaattttattatcttcaccttctacattagggtctattttttggtttatagcttatgtgtagatttacatgaaggactatttggcgtattttcttcttggaaactattactgtattattagtgttctaatttacattttttcaaaagcctgtgcttatcattgaaattttaaaagtagatttcttctctgttttgtttggagtaggaaatgactggtcttgaggtaatgataattggagtcatttttgacctatttatagcttaagaatgtatatcctgtatctgaatattggcattccatgtcttcagcatgagataatatcctcagaatttattgaggaaaggattgaaactcaacttttgagatatcagatttttttgtctttttttctttgttttttagagacagggtcttgctctgtcgtccaggctggagtgcagtggcgtaatcatagtttactgtgacttcaaacttctaggtataagtgatcttcctgcctcatcctcttgaagagctgggactacagacccatgccacaacacctggctaagttaattttgagacagagtctcactctgtcgcccaggttggagtgcagtggcacaacctcggctcactgcaacctccgcctcccggtctcaggtgattctcctgcctcagcctccagagtagctgggtttataggcgcatgccgctgtgcccggctaatttttgtatttttagtagagatggggtttcactattttgaccaggctggtctcaaactcctgacctcatgatccacccgcctcagcctcccaaagtgctgggattacaggcatgagccaccacacctggccttttgtttttttttaaatagaggggtcttgccatgttgcctaggctggtctcaaacccctgcctcaagagatccttctgccatggcctcccaaactgctgggagcaaggccactatgctcagccttgagttatcagaattttaaaaatgcttaatgcttttttttttcccttgtagagtgaaatatttatttctatactctgatttttttattgaaggtttttttttcaccatttttttaaaccgttaattttgtttcccttgattatcttactcttaaaaccattttctgtacttttctttctttcttttctccctgatgcttcttactgtctttggcatcctggaatagtgtggagccactcatccaagccagtgagtgacctagccaagtgttgccagaaagtcccagttgatagtttcttttctgacttttgtgtgaatgacatttttatcaccctatagataaatgaatatacttaaccttctcacctctcccttcccgaaataggaactctaggttgtttttttttttttttaatttatattgaggtgactacaaaatagaaaggcttctctaagaccaaaatttttcctgagactttggaaactgtttgcatttctgctgcttttaccttgttttgttcctagtgagttaattcattcaggactgcttctctttgcttttatttccaccatgttgtggcttttagccacaccagtttagggtacagtttcgctaacacattaaaatatgtttctgccaatagagtcttttgtaaaggccatgcttagtaactgaattttgacaactgatgaaacctgaaacaaaagaaattggtagaggacttaatctcgaaagtacctctattgcttccacaaagcatttaacaaaatttacataaatgtttctcttttgctcaaagtactttgaatcagagctttcctaagtatgtgtgttttcccctttaatattttttgaaaccattttaagggactaaatatgttttgttgcttattgaataaggaaaaaaacgtgtgttagtctttactctctcattaaataggttatgtggtgaaaatgttgatttctatgggaatatgattatctgcatggttttgtaatcttacgtgttttactatgacatgtatgaaatacaaaggaacaaaatctttgcctccagtgtatgagtactgaggttttaataatgttaaaggtaggtgtttttcagtagaacaaggcctgtggatggagagcttaacctttaactcagtattttaaggaggattattcactgttacgtcagcctctcttgtccaaaggtgatattttatacaaatactgttatttcactaaagtttgcagcttttgcttctgaatgttcttgaccttttcacattctaaaagcaaggtgtatggagtatctgcatttttaaagcataggttaacgtatagttagaacttaatgggtaagaaaggggagaagaaaatgaaggcatgaaattaaacaccttcatccagaaaatacctttcatattgataccatgataagtgactatggacagaagaaatgcttacatcttgaattaaatgtcatattccacaatttagaaatccattttatcttcatttatttttttgtgacagagtctcactctgttgcccaggctggagtgcagtggcacaatctcgactcactgcagcctctacctcccaggttcaagcaattcttgtgccacagcctcccaagtagctgggattacaggtgtgcaccaccacccctggctaatttttgtactcttagtggagatggggttttgccatgttggccaggctggtcttaaactccttgcctcaggtgatccacccacctcggcctcccaaagtgatggggtgacaggcgtgagccagtcactgcacctggcttagaaatcccttttaaagggatgtttataacactgatttgaaaaatatgcctttttttgagtttgtattataatttataaagttgtaaaggtctttaaggggtttaaaattcttggaattttattttaaagtacaaattaactcagcaagaatttagatgtaaactactctgatacagaatttgttgtcataagggaagggaaggtttatagtatctttgattttttttttcctagcttgatttattttgtctttaaagattgtcatttagtattcttttattatctttatcattattattttatttttttttgtagaggcgaggtcccattgtgtttccctggcaggtcttgaactcctgggctcaaggaattctcccagcttagcctcccaaagtgctgggattagagacgtgaaccactgcacctggcctcatttgatattcttaataatattccagctacatttaatcttgcacttatatttaattactgattaatttctcttcttcccaatcatttttcttttcctaccgtttaggcctatgggctgttttaaatcaaatggaaactagcacactgcttttgcatattcattttttctacaaataattgagtttttactctgtcagttaccacactgtgcactgaggatatatagtggtggacaagacagacctgtcccttgacttatataatttatagcctctattaagaagatagacacttaaaaaggtaattgtagtaaatcacatggtgtgagggaagcttatatcaaggagaactaacttaggtcaaggtcatggagaacctcctaacaaaagcgacactttctaagctgagacctcaaagtaaggactcaccagcgtgtatgaaggcccagaatgctgatatgcagtagttatatttatatttgtggagttataataaataatttataataaattattagaaatcagaattatctcagtgacgttaaatgccagctggccttcacttttgtttacacaatcatcttttgtgcccctacatcaagctgcctcctattgcctatttcgtcaccttctttcttcgtagatactaagaattttctcagttacttctgcttttgtttgcatcttcaatctcttcgcctttgttgtcccctctctttatgtgtaatatgatcagctttctattgaaatatctcctgatcttggtactccttatggtcttcttccctctctccttttctattagatatatttatagccttctcctgcccatgaaggattgactgctacaggaatttccctcctacaattaacaactcaaaaactgggaaaccacgtgaaacaactgattttagacattggacaacattcagtgcagaacagtgctctcatcttaccttccaaacttatatgatttttgtttcttaaaatatacttcatatgtgtatcaaggttaagggttagggaagcctatatttaagacataaaagatttttttctacacatgtgaagccttaaacaaatgaacttgggaaaggacttatcttaaaagtatagctgttactttcaccaagcgtttaatacaattatataaacatttctcatttactcaaggtactttgcttcagagctttctgaaatatttcctaagaatatatattttctcctttaatattttttcaaaccattttaagggactaaatatattctgttgtctattgaataagaaaaaataaaacgtctaagcttttgtcttctcattaaacacattatacatacatggctttagagattccagaagacagctagggacttgaaaattagtttttaattattgaaactgttttgtattccaaaatgcattaacaatattagttgacttttgtaggatcctgaataaaaatttttttctcagatcttagtgtggttctttcaaaaaaatttttcttaaacaatttttttttccaatagagatggggccttgctgtgttgcccaggctggtcttcaacttatggctgcaagcagtccccctgcttgggcctcctatagtgctgggattacaggctcaagccactgagcccatccttaagtgtggttctcgatttctgaattcatttgtttgtcccatattattttgtaaattctctaatccttgcatgagggaggtacctgtgtgatggtagcagctgttttcttaacctgactcacatttttatggcatcacactcccagtatctgtttgattctagatgcccaaggccatgtgagtcacacgtgttaggtaaagcagcatataggaaatggaaatggaagttagggtctagtgggagttaggtctctgcactggtccggctatacgatcagcagtgagtccctggtgttgccttttgatattctcttggagagatcaataacaacagttcaatgactgttagtttgtctcactaaactctgaagcatcttttgccttatgatggtgtttgatttaataatattcagagatgtgttatttaaaacaactaatctacttggaacctaagataattctccatttattactaatatttgtctatataatacttaagcagataaaaaccttataaattacaaactaactggtagatatttgataattctgtacttaaattggaatataaatcattgtttgggacatggtttgcccattgccacctgtgtgtatctgataggattgaaatgcttttctttgtaggcacatgaggcagcattggaagccagagccagtccagagatgagtgaccgaatacagcacttggagagagagatcaccaggtacaaagatgaatctagcaaggcccaggcagaagttgatcgactcttagaaatcttgaaggaggtggaaaatgagaagaatgacaaagataagaagatagctgagttggaaaggtaagaaagtgaagctgattggggcttatgaggttaaagtatggttttaaaagtatgcttttggggacatactttttcagtgtatctaactctgaatttaggttctcgaattcttgctattactgtattagctgccttttttctaggtcagttgtacgttctttgttgaggtgtctgaaaggcaacatagaatgggaataaattgggaagctatgggctgtaacataattgattggcaaaaaagagagtattcattaatttaaaattaaagttttttttactggcaaatcaagagaggacaaatgtctactttttaatttctctatataatgatcaaatgatcctcaagcaaaggagttaatcttttatcactagtttagacctttgttgttgagctaatgctctgttgggctataaatttttagacttttcacagtttttattgttgaaaagcacgctgttacttcagtgcattagatcaaaattaggaggagagacactttgaggacaatttaggagccacggatatgtttttttatgaagctgtctctgacttggaattcttcaaaatattctgtgtttgaacagatctaggcagacaggtctcctataatttttttggtgtgttttcttattattttatgctaaaggtcaagcatgtgcctcttgacctcttcttttacaccacatatttaacataaatgtaaaactgtgcagaaacaactctgccggtagaactttgttaattacctgtattctgaacagccagaaagactgacagtgacagaaaggggtcactaatctacttggccttttgaggactgatccttaagaataatttttttttttttatgatcttgaaggctgagaagtattagagtacttccataaattttttactaagttttaaagttttggggttagtggtagacttgatactgtcctctgaaggtattattttttcctattctatagtcatagaattttaattttcaagaaaccaaaactataaagtctaaccttcacagttctccttcactgtactgaaagtgtaaataacacgggctgattacctgctcacttatttcctcttattttggtattaactctactcattttgttcagttctgaataagatatatggataaaattctttaagtcagaattttaaaattaccatagcctcaagattagattatgtacattttttatgtcttcatttttgcactgcacccttccccacaacacacacatgtacacatgtgtatataccccctcacccattacgtgcttacgtgaatacatgcctctctttgcttttggaaaggcttgaaatctgcaacagtactgcatagatacaaaaatgcggtgcttttgattgattagtgacttcccactaaatatatttcagaaaagaaattccttgaataagttttattttatggtttgatttcttattagaaatctacatttgaaattattgcttgctatttcaggcagcttgcttgaaaatgtttttgactcatttttgtcaccaatattgattttgggagatggatgtgaactgaaggagagtaagaaataggactaagtctgtacttgatatccaaagcacaccaaatagcagcttttattagccactgtatttctcacattttgagaaagagttgtaaatgatctactctttccacagaatgtaactcttataaaagttggaaaaagcactgtagagttctgtcctctggccctattgcattataatttcgttttaggattcagcacagtttcttggctactggaaaaaaaaaaaaaaggaacagctttcataactcagcttttgctaccaggtttgtagtttgctacttggtaacatagtttaagatgctgaataaacagtagaatcatggaatttgtgaaagtgatcgagcatggcattttatggaagaggaaactgaggcccagagaagtcattgctgaagtgacgtggtggttgagccagagctagtagaatgtggtttgtaaattccagatcaattttctttctgttctgccaaggctagttatgttccttttggacttcctggcaactgttatttgaagactccttacccttaggtgatttattcttttaccccatttggacccaatgtcttaagtagaagtggttatatttagtattatgacttgcttacaaactaaggtagattttagtttcacttatgcccttgaatgccatttttataaactgagctctgcttattttaggagataatcagtgcattctttgtcaaagacagttgggattatgttatacctcttgttcccagatttagtactcgtttgcatatgtgtggctgctgtgtttcttactaatcatttgcttcctatgttgccattccactatttcctatgcctgtgtctgtctccctatagtttatcatttgagattcttcatttttctttttgtcttaccatggtcctgttccattggggtttttggcgtctgtgtgtttatatgtatatgctccttctgccccttggccatggctgtttctcagaaagccagtctcgtgcaaattgtacccttcatgccaggtttctgtccctgtaccatcagggggttttgtttgggacttcctgggaaagtgagcattaagtaaggttacagtcttatactagagtgaattgctactgctgcttttgctactgctggggcttgtttggaattttgcttgatcagagttaaagaacagctgattatatgtcaagttgaactgtacctctttaggtaccctactttttgatataatcagtctgtgttcgttctggtaaacttctgatattgctagttgtgattgctttagtctttgttttactctttaaatagttcctcaactaatgtaactgtagtgccacactgtagattcagcatgtagaattaatttcttaagggtgttcagcaacccactaagtgcaaaaatgaaaggagactgttacaataattgaactcaagaaaatccttagtattctttgcattttatagtgcttcttataaaaggatctccaatattaaatggttcagattgtattatgaaggattcccaggcctgttctttgtgatctaaagaaataaataaataggtccttcccatgttggctgttacagaaaataagagttcttgtcagaagatgatttagtgttgtcctactctcttgacccactgcaattttaaaaagaagattggataagcccattaatacatctataaatataaaatattttccccaattaaatcttaagaagtagtacttctaaattcatgttccatactgtggtgcatattagttggaattcagtgagaagcagaattagtaggatacacacacacacacacacacacacatagagatagataaatacatatatacacacatatataaacacacacaagcatacatatattatgagatttatacgtatatttatatatattaatatatgcctacatatattaagagatttattacagagaatagtcttgtaaaatcgtggggctggctaagcaagactgaaatccctgtggcaggctatcaggaagagaagatcgtgagcaggatggaacctgttgcaggcacaagccaaagctgtggtccacaggcagaattccttttctctcctgggaaacctcagccctgttttaaaatctttccaaaggattcatttatgtccattgggattatctaggttagtcttttttacttaatttgattagaggctttaattatgtcagcaaactaccttcacaagcaccatctagattaatatttgatggaataactgggcactgtaacatagacaagttaatatttcaaaaaagtcatcatctgatggttctggatagtatacaaataaacaaacaaaccagagcttgaaaagtcgttagataagtaaataaatttagagtagcctcaggaaccctgaatgtaactgcaaatttctctcctaaaatgagcatattagagtttctatttagattaatagtgagtaggcttttctttgctatcatgtttaaaatacttagagtggctgggtgcagtggctcacgcctgtaatcccagcactttgagaggcctgaggcaggcggatcacctgaggtcaggagtttgagaccagcctggccaacatggtgaaaccccgtctctactaaaaacacaaaaattagccaggcatgatggcacatgcctgtagtcccagctactcaggaggctgaggcaggagaatcgcttgaactcaggaggtggaggttgcagtgagccaagatcatgccatcgccctccagcctgggtgacagagcgagactctgtctcaaaaaatgaataaaataaaataaaataaattaaataaagtacttagaagcgtactggaggctgatacaggattgcttgctgtctgctttttcactcacgctgtccatcttagctgaatgttcccatgttatagcaccaccctgggaacattgtcccctgtgccgtatattgtattgtgccttataattttgctttttaatgtgctttgttaccttttttctaataccatgactaatggattcacagagtttagtgtttgcagcagaaatactcaattttactctagtatgagattgttagattcaatatgccattcaaaacttgtattcagagaatgacaaccatctgattttcatataatttagataacagaggttgcctttggtttatcaaagttagaaattttcagtgatccaaagaataatagagtctattattgtgtgatctaaagattaataggaattgtggatttactatatttcctgatttgagggaatataagaaccgggattttaatggatatagattttttgggggcggggggcagggtgtgttttgaaattcagccaagtgattatttatgggatagtcgagaaagacctgtctgataaagttattgatatatgagcagcgatttgaaggaggggctctataagaagtccgcagaagcccctaaaaaaaccacaacaactttgaggcataatttacatacaataaaatgcacccattttaagctgattgtttgagctttgacaaatctatacacttatgtgactaccaccatgatcaagatatatagaacatttcctcatccccaaaagttcccttttgcccctttacagcaaatctcttcccaaccctagtcccagcctctgcagatctgagacctacttttaaaattaattttatacattaaacttcagtttctcccttttgccttaacatttaattttctactttcccattctaacacaaccacaagtatgtgtaattccctatttcctcagctccagaagtagattcagattttttaaagccaatcaggataatagcattctctttcttagtgactagtttcgcattgagcacatatgcattagtgattggaaggaaaaaccacagggaggcttctgggaatgattttcttataagacagacttgcaagaagaaagatgacccctttctcctgaacattatcttgtcgggatgtgatacccataattgctgcagctacttctgccaacctaagatgaagccagcgtccagagagtgacagttaacaaaacctcagcaaagcagagttggaactgaaatggactattcctgaaactgcctctgtgctgcttgttatgtgagataggacaatttctgattgtttaagccagtttgaatgaggattctccgttacttccaacccagtgcattcaaatggatataattatgtacttatttccgcccccccccccctttttttgtaatggaagcaatcattttgaaaagagttaaagttttttggtaagtcaaataaggatcaatgctgctgaaagctgggacaacacacgggccctgaccaaattggggtttctttgtctacctcataccttccaaatcaaaaaataatttccctagtattttaattactcccccaaatcaggaataacttcctcactgtgctgattttggttcttttaaaataaggtggtaatttgaaggtaatagttaaaccagtcatagattattctatgccattcttttcaaatcagcccactcaggtgtcagtcctacttttcttttgttgtagtcctctttattctcctttgtttctgcctccacctcatcccccacccaaatgcctggaacagatctcaccctttcgtcttttgagaggaatacatatagcagatttttgcctccgactaggcagctactttaaagggggatgtattttgaatctaaggaagatacccaaaaattttaatgcagtttgtttagttatatttgttcattttagctgccctgtctacatcatgactttttgggttgggggggtatgtgttggaaaggtttcttatgtaggttttttttttttttttgacagaatctcactctgttgctcaggctggagtgtagtggcgtgatgacagctcactatagcctagacctcccagcctcaagcgatcctcccacctccgtgtcttgagtaggtgggaccacaggcacacaccaccatgcccagctaactgcttaatttttttgtagggctggtgcctcactatgctgtctaggctggtcttgaactcctgggctcaagtgatccccttggcctcccaaagtgctgggattacaggcatgagccaccacacctggtgcatgtgcgcacgctatttctctctctctctctctctctctctgtctgtctctctgtctgtctctctctcactctctctctctctctctctgtctgtctgtctctctctgtctctctacacacacacacacacacacacacacacacacacacacacacacacacacacatatatatatatatattttttttttttttttttttttaagacagattttccctctgtcacccaggctggagtgcaatggtatgatctcagctcactgcaacctccacctcccgggctcaagcgattcttgtgcgtcagccttccgagtagctgggaatacaggcatacaccaccatgcccagctaatttttgtattttcagtagagatggggtttcaccatcttaaccaggatggtctcgaactcctggcctcaagtgatccgcctgccttggcctcccaaagtgctggggttacagggatgaaccattgtgcctggcctagatttttgttatacagatgtttgaggttaaacaactggtcctgcattacataagtaggtagcagagtcatgcctaacaattccagtgtctgtctctccttcctgaaaagaaatccttttcaggtgttcagttttcattaatgacctcacctcctagaagaggaggctgtagacagctagatgattcagagtctgttcacttgaggatcttactgaggccagagtctttcccacatgctggaatgcccacttacaggacaggtactgcataactggcatgtgggttgttttgctgctaggggccagtttttctacacatgtgctttttaatgcttctctcagtctggactcagttaagggatacgtctggctcaaagagactaagactccatcaatacagaagctattgtcatttcatttatagattatgctagcattggcgtttatctatagcttgtctaatagctagaaattccagtgatgaaattttagttccttaaggtctggttgagctctactggaaggtatcacttaacataccacagaggctggtcatcccagttatcatgtgcccagaatgtagtagtatcagaaagaaaggacttgttgaactttggactattttttttgttttgttttgttttgtttttgttgctttttttttttgaggcagggtctctctcatccagggtggagtgcagtggcactatcacggctcactgcagccttaacctcttgggctcaggtgatccgcccacctcaacctcctgggtagctgagactagaggtgcatgccaccatgcccaactaatttttgtattttttttgtagagatgggtttttgccagatagcctaggctggtctcgaactcctgggctcaagtgatccatctgcctctgcatcccaaagtgatacgattacagaggtgagccactgcagccagccctgaaatttggactcttaagtctttggtctttccatgttcgaagccaatattaaatgatagtagcttgggaggttatttggttggaaggctaataagtaattttggatcctaaactattaatactaatttcaggtcctccaactctagtagagagatacagaatacagagggaaaaccaaaatattgcactgctacaattattctgagaaagatagaactggagatcagttttgttgttcgtatatacataaaattcttagggctagccttgtgagtagttatgatggaggtaactttgtttttctattttgtggtggttaattttatcttctttgctaaccatcttttccatacctcattgtattagttcgttctcatgctgctataaagacatacttgagactgggtaatttataaagaaaatagttttaattggctcatgtttctgcgggctgtacaggcttctgcttctggagtagcctcaggaaacttacagtcatagcagaaggtgaaggggaagcaggcacatttacatggccggcaggagagagagagccagcaaagggggaggtgccacacactttcaaacaaccagatcttgtgagaactctgtcacaagacagcactagggggatggtgctaaaccatgacaaaccaccgtcatgatccagtcacttcccaccaggccccacctccaacactggggatcacagttcaacatgagatttgggtggggacaaaccaccgtcatgacccagtcacttcccaccaggccctacctccaacactggggatcacagttcaacatgagatttgggtggggacaaaccaccgtcatgacccagtcacttcccaccaggccccacctccaacactggggatcacaattcaacatgagatttgggtggggacaaaccaccgtcatgatccagtcacttcccaccaggccccacctccaacactggggatcacaattcaacatgagagttgggtggggacaaaccaccgtcatgatccagtcacttcccaccaggccccacctccaacactggggatcacagttcaacatgagatttgggtggggacatagagccaaaccatgtcactcatctggaactattagctcttggcttttacatcatgattaaactttaattttgtggactaccaagacaacctagtgtgtatttatagtattgtttttaagggagttatattttgatttataaacaactgactttgttaaaaaaaaaatgttatggccaggcacggtggttcacgcctgtaatcccagcactttgggaggctgaggcgggtggatcacctgaggtcaggagttcgagaccagcctgaccaacatggtgaaaccctgtctctactaaaaaataggaaaaaaaaaattagccgggcatggtggtaggcacctgtaatcccagctatttggtaggctgaggcacaagaattgcttgaacctgggaggcagaggttgcagtgagctgatactgtgccattgcacttcagcctgggcaacaagagtgaaactcccatctcagaaaagaaaaaaaaaaaaagttatgtgatctgttcataggatttgggctaaattctgagcatactaagaacacccttgattaaaaacaaaaatcaacaagattagcccaaatcctatgaacagattacataactttttttttttttggaacacaaagaatgaatgaggtcattttcctatcatgccagtagtgatttttaatctgggagtgttatttgcacatgtgtatgtgtaagagaaagagaacttttctgatggcatttgggaaaatagctgccaggcttcaacttaatgcctaaagattattgccttttgagtttttaaattttcttttaaagatttcacaactagtttctaaaatttttatacaatgaaaatggaggtttttatttttcataaatcttctaaaatgtgttggcaaacttgaactagtttataggatgatattaccaatttttggcttgatagcagtcaaattttgaagatgaatgctttttttcttatctgtcttttcttattcttttctctttgactgaaagttttgttccctttatttgtttgtgggaatctgacctattttaaatgttactttttttgaaaaagaaaactttactgacctcctttcgctagtaatctctctttcctttacttgtgcttttccagtagtaactatcacattctgtcctgtgactgtacattagagagaccaatgtatatatgttataaaagagaagtagcactcttttctcattctgctatctaatcatctcacatttccttttctttttttttttctgaggcggagtctctctctgtcgcccaggctggagtgcagtggcacgatctcggctcactgcaagctccgcctcccgggttcacaccattctcctgcctcaccctcctgagtagctgggactacaggcgcccgccaccacagccggctagttttttgtatttttagtagagatggggtttcaccgtgttagccaggatggtctcgatctcctgacctcgtgatccgcccgcctcggcctcccaaagtgctgggatttcaggcgtgagccactgcacccggcccacatttccttttcttaccattgcccataatattcagaccctttaggagttaaaaagagagattcagtagtctcccataccttgatattatattgaaaatatttttatatttcttttatatgtacatagtatgtttacacatgtacatgtttatatatgcatacatatatatttgcacgtttttccttctgtaaaaatgtaagtacattcatctgcctatattcttatacaatttaatataattcagttgaattacttttagatttgtagattaaacaaaagtgtagataactttccctttctcctttttgtcacaatgaaatgccatttctgaccttgtttttgtattttaacatctctgaaattgggatacacgtacaagtaaatggcatggtataatctaattggtataactttttttctttctcagtaatataaaatactttttactatgatgtgtcttctatccttggtgaattgatgttaagaatgcattcaaagagtgaataaaattgttttgttgaatgtgggagtaggagaaagtagtatttctaaattaatattattttgtcatatatttcattttaaatgtacgtgtagtaaccaagtgaatgtatttactagtataaattgtaaattagatatttgacgggtttacctatatgctgagtttgtttatttaggttgaccaaaaacggtttcttttggaccatctccttggcaaaatgggctttatgatattactttatgttagtatcccattatattcaggcatctgttgcatagtgtaacccggaaatgtaaacctaggtatttagtctttattctggtaaatatttttccttaaattttgaattgatagtcatttactgtgtcttcaaagatctaccatatagaaattaagccgtatgcaagattgacataaactgctatataattcatgaggaaagtgtctctttagagaaaaatattcttacttttaaatttatggatatgcatcttcaatccatgaagtatagtgtcagagaatatgctcttaatgtggttagagtggaagagagatgactggggctgcggatggtggctcagagtaattatataatatgtgttcttgcttgagggagaatggtctgtgtttaaaaaatgaaaaaactgaaaaggaaaagaaagataccagcatattacaactgaagatgactggttctttatctgatcctgcttgcttcagcttgctttctggggaagctgcttgtttctttcttcttcctccttgatgaatatcatagacttcctttaaaaggagagtaagttacaaagctttttgtagtcagttctgttaggttatcttcccaaagtttcctgtgggcacagcaccttatagtttgttactgtggtcttacaggaatctgtgtttaatggctactgtagtgtttcacctaaaagtataaagattaggattacatataattcgatgtacagattttttctcctgaagttatttcccaagagttacagtttagccggacgtggtggctcatgcttgtaatcctagcactttgggaggtgaaagtgggtggattgcttgagtccaggagttcgagaccagcttaggcaagtggcgaaacctcgtctctacaaaaaatacaaatattagccagttgtggtggtgtttgtctatagtcccagctatttgggaggctgaggtgggaggatcacttgagtctgggaagtagagtttgcagtgagccaagattgcgccactgcactctagcctaggtgacaggtgaaaccctgtctcaaaaaggaaaaaaaaagagttgtaatttgatgctaaagtgaaatatgattcatgaataataaagtaggtaaaaattaaattaataattaaagttgctctctggcaggaatgcattccattttttcccatggatttacccgtgtgttatgtaaaaacttgcatacaaagaagactcagttaatgtccttgttcatctaaaattattttgacttcctgtgtcacaaccaatgagatagaaggatcattgggaacaatcatttagagatcggcttctttctgcctttgaacattgtctgcattttacacagcgttatagatgctaaacgttcatggagttttatagactcctaaggaagcatcataaaacagataaattatgcccaggtgagatgtcagcagacctacattcttactctttttgagacggagtcttgctctgttgcccaggctggagtgcagtggcacaatctcggctcactgcagcctccacctccctggttcaaccgattcttgtgcctcagcctcctgagtacctgggactacaggcgtgtgccaccacgcctggctaatttttgtatttttagtagagatggggtttcaccgtgttggctaggctggtctcaaactcctgacctcaggtgatctgcttgcctcggcctcccaaagtgctgggattacaggcgtgagccactgcgcctgcccggctgctacattcttattctgtatctgccactcaggcaccatgtgattgccagcaagtcgttttgtttctgtttttcatctcttcatgttacaaggtaacaaatcttgtccttcttatctgtttttattctcacaatgactttttaaaacttgtaagtactgaattatacttttgcaagacatcactaagtcttagaaaacattaaagtataaatggaaatggtgcttgcattcaagaaatagatattttgtttcagattcttaaggtacaatttagaccatgaagctaatccagatgatactggtcgttagaagccctaactatttggaggatcatactaattacagtgaaactgattactttttgaaaagagaaaaactgcttgttgttgtaaaagacagtaatgaactgtaagggctacatgctgtgcaggaatattaagcatgactgctttatatctcctactgctaagcagcattggaactgaattgatgtaaacaagcctgtgtattcttgttcattattgcttttagattgcaccatttgaggattgtggtagatttggagtgagaagtactagttgttattaggagaaaattatgttttaacatttgagaaaattatttcaagtacattaaagttctgtattctacagaagctgtgtttttctgcttttgcttttagataacttggattctcttaatggaatggggtggttaaggcgtagttagttataaggtgggtgtctataaaactaagcagactaaaattgtgcagttacttaaagccaactctgactacttaaatgagaatgagatggctaaccttctctatttttcttagtgtttaagaaattgttttttttttcctgccccaggaaatggtaaattttagacaacttttttttttttgagaaactttcattaaaatacaatggtgtaatctaataagaaagtaaatttgttgagagttgaaaatctgaaataattcttttttagtgactgtatagaatttgtgactccttcccttctctaatcctgcattttatgatgtccatgaataatatttctgaatattgtccttattaattctttctaactttctttttcacattttcttcctggatttcctgtttccttcagtctcacctcaaggtcagtatgcttgcactaaaacaaagatgatgtgattgagcgttgtttgcgaatattgtcttgaattcttacagggaactgaacatatttcaggagagggatatctagaaatctagctgtgaggataaaatgtcaagggtattgggtttatcagaagagtgtgttcagatttttgtgctttgaaaaggtagtgtgagtagtcagagagcaagaaccagatggccaggttttgactgagagagaagtggagatgaaaagagcattacgaggaaagaggaggggaaaaagaattgtgttaatgtaattgaacattcagtggagacattctggctattaaacggggtaaagtgccgcaaaaatgatggagggaaagtcacaactgcctatagctttatagaagaaaccttgaattatttactgagacgaactttcagacacacacacacccacatcctttaaattttggtttcattttgtgactctgctgggtggtagaactagtgataacaaaaacagcaacgattactgctatttatatgtgccagaggcactgtagcggaacatattttgtttcagttgatcttagcaactatgaagagagatttattattttgattttttagttgaaaaagcacaagtgcagagaccattaagtaacttgcccatcttcattagtaagtaaatagtgagagaagcggcacaaaacaaaaatctgcatttaaaaagttacttattttgcatatgagccatgacaatataaagtgtgaggatttctgataggattcagaaatgagcctgttaatatcatatgtgttttacctagcagctgcctaataataatagcgattatatatatgtgtgtgtgtgtatatatatatatatatctgtgtgtgtgtgtgtgtatatatatatatatagatatatatttgctgtttataaaagcacctctttgactcaacagctagcatatgggttacactgggataagtgttaaaagagttagcccgccaaaaaagaaaataaattgaaaaaaatttatgccccctgcccattttgagtaagctgtattcattacagaaggaatcttaaagtgtttgtaataaaaatagcaaacacaaatactgcatttaaaaaatagattttcccgtttctaatctaaacattttctccacatattgtagtagaacagtatgggtaccacttaagtaattccaattaggtggcaaaatctgaaagcagttgagttttagtataaaaatttcatgaagtgttttgccttgtgtttagagaactttcatctctaacttaagcttcaagctgactcattttagtgggaagttttatcatttgtcccatagttagtcctttgcacgactggttttgctctcagtctctctaaatgaaaccctgggaaaagcttcagaagaatttgaccgtgaagccattggtatatacataattcactgagttacaggttatattaattgtaatattgttagctggtttattttagttaacttttacccagcagcaaatgccattaaatcatacttatttctaaataagtttattttccaaggaatacaaaataaaatagtcattgttttttcagtggcaaagatcatcttagctgtagtatgcaaaagtttaaagtctctcttcattccagattatgatttagtgcagtattttttttctagatagaaacattttaccattttaattgtggttttgccaagtccagttgaataggtcataaagagagtataatttattactgctttgatactggattgtttgggtgacttcattatatgaccttgggcaagatacttaacctttccatgtttattttaaccacttgttttgtgttaatagtgatgcttagctgtagtatttgtattttagtgtctccactaaacatttctattttgcagaggtttatttttattcctctcttctcccttgtcttcttcccctgccctgctctcctctgtcttcctttgcattcagtacagagtagtgagattttatttagagtgatactgactgaagactcacattttctatcttcagacatacacatctttttatttcctgttcaatgacattagcaccagagagtgaatacaaagaaattattccatgtatagatgaaaatatatgatttggttcagaattcttcttttggctaacggtcattcagagatgagagctataaatgtcatctctattctcattaacacttaggtctaaaattgagctcaatattattaatatctatgttttaattatcagttaccactgtagacttgtttttaaaacaaatgtttagaatatgtgtgatagttcctaacaacttcattaacccatttataccagaggttgcacattttttgtgtgtgaagaatcagagcttcgtgatgaccttgagcagtaggatataaataactaccacaagcttagcattccagtaatagaacactaggcataaaagggttaagaccagagtccctatgttgttaaaagttaaaatacttttatactttgccccccaaaaaatcccattgttatagtctcttttatatagtttgatggaaacatttcacattaatttctaaaatctaattcaaatagttatttctctgattacacactttaaaaagattttttacattattgtctgatttcattaagaaaaggcactatactagttgctaaaacctcatcataagatatatcactcacaaaaatagatgtaattgtatttttgaaagggttagtttcttatttttttagctaaagcttttttttataggccctagaaaatttctgaccccataaaatctatttacaaggagtttgacttatgggcaagagtttataacccaggagaatgatcgttattatttgcatttttagcttccacttttcattcctttcgcttttttaagcaactctattgttcaagagcgtatttcttattatttttctttcaaataatagtgcctagtgtttttgtaatagtctgcacaagcaagtgtaacatcttctctgttaaataacatctgctggtgtagtagtgtactcttttgaataactcattggtgggaaaaaaaatacgtgaatgcagacttgtgctgatcttcctaactcttctactgaaaatgatagttttatgctatcatgcattgataaatggtaaatgtttttttagatagcaattgtagatcaccacggttgtagatcaccacaaattctgtaaatcagctgaagatggcaaattcaacagagaagggaagaaagaataattttaaagttggccaaaatttgagtttttatagagttgccagatttagcaaataaaaatatggatgcccagttaaatttcatataaaccacaaatcatcttttagtatgtcttataataactattgggccatacttactctggcacccacccccccatctcagtaaaacgacagaaacacgtctgatttctgattacagtttgacactgttaaaaatgctatcaccttctttatctcacttcacctcataacaactatatgaattggatgacattttcccgtttcacagatcagaaaattgactttacagagatgagatgatttacttcgggtcatagctactaagtggcagaatctagggtacaaatctagtttgtctcatttcaagtttacttcacactttcctttcctctgtatcaagcttgtccaacccatggcccacagcccatggcctgcatgcagctcaggtcagctttgaatatggcccaacacaaatttgtaaacttacttaaaacattatcagctttttttcatgtttttaagctcatcaactattattagtgttagtgtattttatgtgtaggccgataattcttactcttccagtgtggcccagggaagtaaaaagattagacacccctgctctatatcttgttctgttatgtgtttgtgacatctagagatgacatgcaggttgtaatacctttttaaatttatgctttttagatccttggagcatgggggtgaagggttggattacttgtattatttggtttgcacagtgtccagagaagcagaatgtgtggtcttggagtggaaactgcatgcagctctatctcttatttggcagctgttggcgtgttccagttgtgtcttcttttgattatactaagcctgtcttgtatgggaaattgattaattctgaataaaataatgatattgcaatcagcaattaaattgtttttttgttttgttttgagatgagtctttctcttgttacccaggctggagtgcagtggcgcaatctcagctcactgctttcaagcaacctccgcctctcgggttcaagtgattctcctgccttagcctcccgagtagctgggattacaggcacttgccaccacgcccagctgatttttttttttttttttttttttttttttgaggtggagtcttgccctgtctcccaggctggagtgcagtgatgtgatctcagctcactgcaacctctacctcccaggttcaggcaattcccctgtctcagccttctgagtagctgggattacaggggtgtgccaccatgcccagctaatttttgtatttttagtagagacagggtttcgccacgttgctcaggctggtcttgaactcctgacctcagatgatccacccgcctcggcctcccaaagtgctgggattacaggcgtgataaactgtttttaaagcagtctcatgatggctttatttgcaagggggctattggtatgtattgttccctatgattatcaatacatttggaattcacatagttaaacaaacttatggtttcatgtagcaatgtttgggatttcttcatagcatttttttttttttttgctctaattcttaggtgagattggctagtctgtcaccatttgtagcctgttgtatgagatgttcctatagtatggactagttcattcatttgtgttgtcctatttatcaacattttctgccttgctcaagaaatgctctataacgcaacttgtatttcagatattgggtaatttgattattttataagatcctttagaacagtgcttctcaaacttaagtgtcatacaaattggatgggagcttgttaaaatagagttcttatttgatggatttggttggggcctgaatttttctacctttcgaaaagctcccagttggtactgatactgttggtctgttgagcgtgctttgactcacaagattttagtgagttaacgtttttcaaatagatttttctccttttttaaaaaattcacaaacatttaacaatatctctgttgatttatttatactagctcatatttgaacttgttataaaaatcgacctttccttgggtttaggatatcaaggtgaccgttttgcctttgttaaaggacgtctgaggttttctattggcatgggtacaagagtcaggttaagatttcaggatgttagagcaaaagcactgttttcactggcacctgttgccttgttgctttaaatgtataaaagcatattgaacagtggaacaaagtgacaagaaatttagggtgaggcaactggagaaaagagtcacaaacttcagaactattgagttggcttcttgggtatggcttatgctttcacagaaaccttccttccaacctctagtttctgttgtccatgtatgtggctttgaggtctcagaatttgagattgtgctttgggagaaacagacaaggaaatcagtggccttcactggcagctggcagacctgtaagtgatgtggtttaattgtgtgtacgtcaggattgctctgtctttaagacggtctttttaagctgcagtgtttatccactgttggcattttctttgttggtgaagttgtattcttttgttttaatcttccagctcttgtctgggttgtcaaatgtttgagcatgatagcaaagatctcaaaactagttctttttgcaagcagatctcatctttaaggtgtagtgtaatgggattcagaaacttgactcctgtcataggcaggagggaaatgtgtgtttaatttttctttacttcgctttccttcattaatatgggattgttattattattttctggtgtgtttgggatagttgctgtcaatggctacaaaagacagttttaagattctttagctagggctgggcatggtggctcacgcctgtaatcccagcattttgggaggccgaggcagatggatcacgaggtcaagaggtaaagaccagcctggccaacatggtgaaaccccgtctctactaaaaaatacaaaaattagttgggtgtggtggcatgcgcctgtagtcccagctactcaggaggctgaggcaggagagtctcttgaacccgggaggtagaggttgcagtgagctgagattgtgccatgcctagcaacagagtgagactgtgtctcaaaaaaaaaaaaaaatgtagctagctgtttggcctaggtattacaaatttcaatgtttgttattgtaagtttctatattcaaaaatcacttaagtatgttacacaactattttgaaactgttagtgaaaaataatccccttcaaatgcaatcttttaaattgatatatatatatatattttgagacagagtttcgctcttattgcccagactggagtgcaatggcacaatctcggcttaccgcaacctccgcctcctgttttcaagcgattctcctgcctcagcctctggagtagctaggattacaggcgtgcacccccatgcccggctaattttgtatttttaggagagacagggtttctccattgttggtcaggctggtctcgaattcccatctcaggtgatccacccgcctcggcctcccaaagtgctgggattacaggcgtgagccaccgtgcccggcctaagttgagatgttaaaaggaaagtactttgcagatgactttccaagaaaactagaaggaacaattggcttggggaagtgatcataatgatataacttggatataatcagaactttttgtcttttttctgagatggagtttcgcttttgtcacccaggctggagtgcaatggcgcaatcttggctcactgcaacctctgcctccagggttcaagtgattcttttgcctcagcctctctagtagctgggattacaggcactcaccaccacgcccagctaatttttttttttttttgtattttcagtagagacatggtttcgtcatgttggccaggctggtcttaaactcctgatctgaggtgatccaccatccttggcctcccaaagtgctgggattacaggtgtgagcctctgtgtccggccataatcagttctatacaatgtgttgtgagaggaaaattcaccacaggctctttaccttatttaaggaggtcaattaaatataaaccatagtagcttgcttattgtcattattagtttattgatgcaacagtagagtaagttgattctttcctacattactgcaaaagctatctaatgcttcctcctgtccactctcattatgtttccctttcagcttgttccaaattttgggaaatctgattatatcacttccttatataagtcctatatactttgggtaagctacgcattccttgcttagcatataattgtttggctttgcttacctttagctttctttttctctactctctcctccaactttaagctatagtcattctgaaccatgaggttttccccaagataacacattctccttttcctcaggtttttgttcgtagttcttctctgcctagtactggatcacctgcctagtaacttggacttaatcccttaggaaagttcagatactgtttttccaggaagcctttcctgatcatcaccaccacctccacctccagactagcttagggctctttcctgtccactctaatagcacttgttatatactgtatttccttagatgcctgggaagtatttgagagcacgaacaatttttattcatgaaattgttgcaggaatttttcttagttcagctaaagacggggtccttgtcacacagccacgaaaatttaggcttgtgtacgattcgaacgttgagtaggacagggttttattgggtgaaaaggaaaagggggaaacagggcctctctgcaggccagattccttgctagagtgcttcccgccttgcagattgactcccaggttacacccgtgaaaaggaggggccaggctcctccctgctgcacaaggtgcagatttctgtagctccatcccagtgtgctctcctcccagggcaccgctggctggagtttctctggggaccccttcctacctggctttctcaaaattgtatcctcagtgtttgatatataatggtagtatttaatgaaatatttgtctatttaatgagtagtgaatatgtaaaaaacttagcaggctgtcaaagcttagataaatgtgatcctcttacatcccagagcctattttctcctgggcaatgcctaaagcttattttttagttgtctagtaatcccgattctgccctttgtgaggttagtcttcttcacctttacctgtaacctagcatttagtctagttttctgacctaccggtattttttttctagatgtaaaattatttcctgactctttctgcctaaatcttttggcttccattttgactattcacataaagagggaaaaaccccatagtgtcttacatttatttagtacctagtagcttaaagtgcactttcacattcaccatctaatgtgagtgaagagacagattctgtggaagaactaaactcatctggtcatactcatcatttcaagtgggaagaaagtggtagctttgaaaaggaagagtgcgtagaaatactgttgtagagtcgaaacttgctttcagaggagttgagttttaagaccgggtgcggtggctcatgcctgtaatgccagcactttgggaggtcgaggtgggcggatcactcaagcttaggagtttgagactagcagggccaacatggtgaaaccccatctctactaaaaatacagaaactgcctggttgtggtggtgggcacctgtggtcttagctacttgggaggctgaggcaggagaatctcatgaacccaggaggcagaggttgcagtgagccgagatcactgccactgcactccaccctaggcgacatagcaagactccatctcaaaaaaaaaaaaaaaaaattgccacgcatggtggtgcatgcctataatcccagctactcgggaggcagaggcacaagagtcacttgaacccaggaggcggaggttgcagtgagccgagatcacgccactgcactcagccttggtgacagaatgagactctgtctccaaaaaaaaagaaaaaaaataaggaaaagttgagtttttaaaaaaggaaatgaatccatatgagaatgccagggtacttacatcattggatatgctgcacttttggaaagaaaaaagacactgaaagatgaaatttcctaagaacagaggaatacatgctgttaaccatggtaatagaatcctggtaaggtaacaactctgtagagcagtgggtttctgccttctgatttatgtactatgtacaccatcttcatttcatatttggtatcagagatctcccaggtaaacagtatttgcttataatttctatagtagagaggttaaaagtatcgtagttacagtcagacagacctgagtttgagtactagttctaggatgtttaaaactgattttgggtaatgatttaattttattgaaggtttgctcttttcatttttagtgtggagttaataaaacctcataaaacattttgaataagatgataaatatgctgtgataaacattaaggtccttggtatataataagtacttgtaagggttattatggtattatatttagcatagcgctagagttagatataaacatataacacataacttcaatagtatcctccttccctccactccccgcctcccggcctcccctcaaagagtgaagaagaagcatattccatgtttgtttggatcttaatgaaagggcaaatttagatatttaaatttatatattaacatataaaacataaatatgcgtgtgtgtatacatacacacacacacacacacacacacacacacacacacatatgtttggggtgaggagaaaaaggatatgttagtaacctcttgcagtgtgccaaatcttacgctaagcattttccatgcattattttatttacttctcacagttctataagagatgggcattattcccatgtcataaataaaaaagataagaacactctgaagcttagagaggctaaagatcatatagataatgaatagtgaaccagcatttaacctagagctctttagcccttaaaacttttgcttttaaccactctaccatttgtattcctgttaggagtctcctcacatcccttgggagaccttgaacatattctgagatttacaagttaccatgttaattttatgattttgtattttcatttcaatgacaataaaaaagtttatatacatattctggatcacctgggtgactgtcttacaatgaaataccctatgtagtttcatttatatttatggatatcatctcattgtcttcaggtattactgttataattgtcatgggccaatgagaaaagaacagtggtgggcctaatccatactgttgctttttatccaagcagagttcaaatgatgtcataatgtactataagcagcaaactttttttaaaaagtaatttgacaaaatttctgagacagttggatcatcttacagctcaaaacaaaacaacttggacaatagtaataagtaccatgagtgcactgtgagcagcaatttaacagcatattcaattaatactggtactttgcactatgtcttttggtttgaattgcattcaatttgggaactctagatctaatatttgcattttttacagtattacaatttatcagtggatctagaaaatattttcttttataattatactatattatactatcatctagatacagaccctttagctcatggagatgaaggaatcagttctgtttaggggagtgctggaaagctttgccaagatactgccatttaagcttcttcttgcagaatgagtgcatgtatgctcttatgctcggcaaagacagggtaagggaaagggcagggacatgaagacatctgaaaaggcaaaaaaacaaaagaatcttttcctcatgcttactgcatgagggaatattaaaaatataggttattgttaaagacctttagtgctaattaagggaatatggattttattacgtaattagtgtgaatccaaaaaaagcaaaaagtgtgggaatataaacaacttttataattcaattgtgtgcatatggaatctttgtaaattaagtcatgttttacataaaaccagaatcttattggttaaagactatttggaaatggaatgtaaatgtttttgtatgaaaataaattgtccccaaattttcagatttacaagttaccttttttttggtctccccctctccttccttctttccgttcttttcctctaggcgcatcctttaataatgaaatcagaaactcgtaactttattcttctctcccatctcactgggatattttagcgattaatagtattctacccatttgatttaatgatttttattttattttaactaacatttattgagaaaactacatatgagattttctgatcactaatatttatttgcacagaaaaaggtgttactatcatttacttaatagatctgcttttattaatgattttatgccttgatttcccacagttagcctccagctgttacttctgtattatgcatgttagagtgaaatgtccaaattaaattagtttttaagctgagccctgtgaaatcaccaggtggagaaatacggatggcatattattcctgcatatgcattttcatatgctattggtgcagtgtaattcaactgtagcattcacaactttcatcattgacatagccttggtggggtcggggaggagggatggggggtggggggcggggggagtaaatggaatgatatgtacaaaaacacttttcagctgggaagagtgaaacaagttaataggaaataaaaggccatattgtctattcagactagtacgttacttttccagagtcatggggctagcaaccactatatgtctgacttctaccaagaagggttgaatccctggttgatcctgtgaggcctgaggcatataaacaagaaacatgaaagggagaggaaaattaaatgaagtgggagtgttgcagaataataatacaattaagggagaaaataatagaggtagaggaagaggttatatacacttatttctcttactatgaacattttacttagaagtgtaaggttgtatgtcttgtttgatacagtgataaaaattatgataatgcttaacagaaatgggtgctttgctccataaaagtgctccgtgctttcctctgtcattatgaattaatcagcaagaaatccagaagtgaacaacataaaagtattccctctcctcctttttttaaacagtgaaaaaagttgacaatatatttattctgtcatagatccaaaaagccaagcctgcgttttaaggcagggttttctttggttttctatttctcagccacaccttcagatttcttggcacagtacagtcatagcattgtgtcatatccttggtctgttttatcagactttataaattgattctgactgtaccagcagtactagattcttatctttacacagtttgggaaatggacaatgactcttttggaaaaacagctctataaattgtgctgtggtatgtgagaatgggttctctgctttgcttttcctctagcctgctgccattcctagacagtgtcatttctctgatttagggcattgtgtagctgttctgggtagagtaaacctgcctctaaatgtggaacagattgttacccgtcagaattctccaccttggaatggtgacactgaaagatacaattcagctctggccaacacctcctgtcttcccagttcacttactctcgtctccactccaattattgcatctaattaggaccttgaaacaacaacctactacttttttttgtttgttttgaacctcgtatggcctcacacttccttccttacccgggtcagatttcatggtccagcagtataattactcccttctaaatccccttgacttacttgcttttctcttttgtcacacttgcttgcaaaacctcaatcctgatttaaagcaagtgtcttcctacactgcctctgccctgagcagctttatgttaccgggcaagaagagtcacaaagctttgcagactggtctcacattgaatttatggccacagatctcaaattgctcctaattctgcaggcagtcctaattaagaggactattagatttgatttcccatcctcagaggtgactgtatcattctgttctcttatcaaatctgcaaatccttcgcctccactcaaagtttctggcttcacttgatatttctttgagaaaattaaaataattggatgctacccagtttgtctcctcatcaaatctaccagcctacttgcatctatacctggagcctttgcctgaatagtgccactattcctgaattcacctctgctgccttttctgttaatcctatcccagttgcccaacctaaagatgcttctccctcattatccttctccctcctttcaaatttttgctttctccttgttcacaagtgtactaacctgcctttagagttccacttaatgtcttaaaaaaaatcgttctcttgatgtgatgtcttattctagttgccaccctgtttctctcttcccttctcagcaaatcttatttaaaaaattgactgtagttgctatctgcctttccttacctttcttcaagtttgtttaatcaggctcctatttttagtagtcttacgaaactgctcttgtcaagttatcataaatatccatgttaccaaatacagaaatcacttccatggccccatcttaactttacctttcagcatcattctacacatttccttccttgaaacactgttttcttctggtatctctgataccagtgtctccttattttctccctctttcacctgtcattccttttgtggtgtttctgattctgccactttcctctagacctctaaaaggctccactctcagtcctattctcatatatatatatatacacacacacacacacacacacatatatatatatattctcagacttttcttttttttgagatggagtctcactctgtcgcccaggctggagggtaatggtgccatctcagctcactgcaacctctgcctcccaggttcaagcaattctcctgcctcagcctcctgagtagctgggattacaggcatgcaccaccacgcctggctaatttttatatttttagtggagacaggatttcaccatattggccaggctggtcttgaactactgacctcaggtgatccacccgccttggcctcccaaagtgctggaattacaggcatgagccaccatgcctggcctcagacttcttcaagtctaaggcattcattatcaaaaacacagcaatagctaccaaattaataatatacaaggtgctccagaatactctacttattacctacacaatgtctttagttaaatatcaaatttagttttactcagaacagatctcttgatctggcccacctttttcaaaacctcttcttccccagtttcccaccctcaataaatggtactaccattcactcattgtgcaggcaataaatcaccaagcaatccttgatttttcttactccctacgttaaatctattagtaagcccgatcacacctcaaaaatgtatctttaattcaatgattccattcgattctctctatgaaccattatccgttgctcaaattactgcagctgttttccaatggctatctgcttctatatcacttctgtactagtcccatctctgtagcaatcagactgaactctctttttttttttttcttttttgagacagggtctcactgttacccgggctagagtagcctggcgtaatctcggctcactgcaacctctgcctcccaggctcaagccatcctcccacctcagcctcccaagtagctgggactacaggtgcacaccaaccatgcctggctaatttttgtgttttttgtagagacagggttttgccaaagagcagggagtacaggcatgagccaccgcacctggcctgaactgaactcttagacattgtcaccccttgggttaaaaccttcctgtgttctcccatcatacacagtgaaacccaagctccttccacagcttaggctctgtatcctatggcttcttgccacccctgtaaccccaccacaacctccccttccatatactccacctatcagcttttttgttgttgttaaaacaagctaagcattttctatcctcaaagcctttgtagttatgattctctgtgcctcttctcctagatcattatatgtctcttccctgaccattgtagctgaaatacactgtttgtcacatccagtgtctccattacattgcttgttttaatttttttcttagcacatgtcactgtgctatgacatacttttttgttagtttatgttcccgcctcccccttttaaaaataagttcaatatgtttgttgagggtggggacattgtattcttttttcttccttagctgtatttaactcttggcaggcattcagtaaatatttgctgaatagatgtgcgagggctggctcttttctgaaaaagttgacagttgagaatgcatgctagttttaaattatggacaaatatgtggctttacatcagttgagagaaacttgaatgtttattaggttactgttatttttatttgtgtttttgagcaattcttttgtactttgtgataacaagtaattgcttccaaatgaaaaagacttttccagtgacctgcaaagctcttcagcagggattggcaaactacagctcatctggcacctatttttgtaaaacctgcaagctaagaatgggttttacatttttcaagggtaacaaaaaagaaaaatatatgagacagattttacatgattcacaaaatgtgaaatatttgctctctgatcctttacaagggaagtttgctaacccttgctggaggcggtggccctcattacctgccttcctcattagtggcctgctgcatctgtctgcttcacctgggcctcgtgcccattcgcatttgctgtttccttcgtgaggaacactcaggctcactcccttacttccttcacatctttgcttagctgttgcctttgcagtggagcctttcctgagcacttaatttaaattccaatcccgccacccattcctacacaccttatctcctttcttcttttatttttcccattggacttatcactgtctgacataccatgtatttttcttatgttctctttctttccagtggacagtaaactcagtgagggctgagatttttgtccgttttgttcacggccatattttcgaagatagcacctggcccatagaagcttttattaaatatttgttgaattaatggtcatagattaaagttatcttgagaaccagcattaaaaaaagtcaaaacacttcagtaaacattgattaattgccataaaacagtcctcatctcagatctatggagttgtataaaatcgggtccttgtcttcaaagaaattagtgtagtagtgagaataagcatagaaataaaagacactaaatgtaagatgagactaattatcctgcagtttccttgctgattaaaaaaatgttgaattgatcatttaaagtatttttgcagaagttaaaagtgtttatgtaaaactccaagtaattaacacttttacgttctgtattgatatcttttctccttttcatcatgacttgttttctttagacagttaggaatatggttccgtgaaaataaaacccatatttaaaatggcttttaaatagtcaaaagcattttaattagataaataacaagtgaaactattagcattttatttttagttttttggttactctttgggcaggtattttttaaagcacaattagatatttaagtagtattataaaattttatgtcttaatttttatgttaactgtgagtggagctctttggaagaaggtaaaatgagagagagtgtgtgtatgtgtgtgcacgtgtgcaatatatatagtcatgagtcattgaataattgggatgataggttctgagaaacatcactatgtggtatcattgtacaaatatcatagcgtatactaacacaaacatagatggtctagcctactgcacagccaggctgtaaggtatagactgttgctcctaggctataatcctgtacagcatgttaccgtactgaatactgtaggcagcattacacagtggcatttgtgtacctaaacatgtaaacatcagtaacaatccagtattataatcttatatgcatctgcatacaagatgcagtctattattgaccaaagcattatcatcatgtgctgtaggactattatgagtgtacatattctctttttttttttttcttttttgaggagacagggtctcgctctgtcacccagactggagagcagtggcgcgatcttggctcactgcaacctccgtttcctgggttcaagcaattcttgtgcctcagactcctgagtagctgggattacaggtgccaccatgcccagctaatttttgtatttttggcagatacggggttttgaggctggtctcaaactcctgatctcaagtgatccacccatcttgtccccccaaagtgctgggattacaggcgtgagccaccacacctggcccatattctctatatgtaacattttataaatattatagatgtttatatgtaatatacacagtgctttagcaatgtcattttatttttaattattgtctatttaagccctagcttaagcttctcttcttgagtgaaaacacaaataccttagtgaaatttgattgataatattttttttaatttgacaatagaagcatcctattttttcttaaatttgtgtgggagattttatggtatagtaacgtataacactaactatatgtaacttcctttttggtaaagcaaaacagccagtagaattgtagcctctggcaaatgttgttagtttcttaataggaaggagtaagttaaagacagataataaaaattcctttaccaattaattttgctaggtgtttaagatacaaggaagatatttattttttagtaattccattgttttagagcttcaaacaaactgtattttccctcagagttttgttttgggtggatttgtcagtagggtatgattagtttcctttttacgcatttgttcaacaaatgtttaatgagcacctataaaccacaaggaactgtactaggaattgtggattttgaaaatatatcagaggaggactttaacctctaggaaggcatgttcataaagtacagtaaaacaggtatgtagactccctccctaatgtggagaacaagtcaacatgtcataagatagattcagttaaagtggtatgggagttaggagcatccataatagttgtgatctaatagatttacctaaatttgagtttggattttaagagacagaggcttagagcagcaataacaaagtaaatatgggcaaagcctgcctggcatagtctgcattgactgttgtttcttaacattgtgcatttagtgtgtattcatatcccctgggaacctcgttaaagtgcagattctgatttaataggtctggcgtcaacctgagattgggtgtttctaccaaacactaaggtgatattcatgatataagttcatggatcacactttagatagcaagatggtggaccacattttgtaaaacttctggtggcagagacaagtaaaaattcaactactattttctttcccatcttcgtttttctgtcttcttacacttttgtttgcttacatctgtgtgctggtggagagagttaaatcttttattcatcatttcactgtttattataatagttgggagcttagcaattgtgaatctaattttaaagcattaatttatttatgaattgctctaatttgtcctcttcctgcttgaagaatggtaaaacatctatgttcactatgaattaaattcagattagttcaggcaaaacagcagttgagagagttttaataaatttactaaaccattaaatccatggcacctcacgataggaatttactaacatctgggttttcttgagaatttagattcaaatcaaactagatgttaatctacttataaggaaaaagaaggaaattcctcatttcacaagttctgttatgtctcagaatgttttttcctaaatatacattccagaaataccctccttttactcttttaacttatatttagatgatactccctcttatatctcttcccagagaaacagtattgaaaaggataataatgaggcaagaaaatcattgtgtgttttcatcttttccagttaattcatgaattcagaactatgcatacattcataaaaccatgtgcatgcacacacacacgtacacagacagacacgcatacacaggacgagaaggtgggggtaggcaagagattgatttaattgtctcacaattttctatacttttcttggttgcctatcatagataaaaccattttatcttgatagtcatcctttagcctatagagtgaaggtgaagaaataatagtggtgaaactaaagataggagatttaaaatatgaaaagaaaatggattaagaaaatcaaagaccaaaaacttaaaagaatcaaagaccaaaaaaatgtgccatactgtactactttgtatatctagtctgatataggcaaacaacctattttgagatacaaccatatctctttttagaaacaacttttaaagaaaattttaaaatattttatgtctgaagtagaaaatttagaaactgtaaaaaaatgataaaaaagaaaaaaaaataggctgggcgctgtagctcactcctgtgatcccagcactttgggaggctgaggctggaggattgcttaagcccaggagtttgagaccagcctgggcaacatagtgagacctcatctctacaaaaaataaacagcaataacaaaattagccaggcatggtggcatacgtctatagtcccggctacttgggaggctgacataggacgatcatttgagcctgggaaatgagctatgattgtgccactgcagtttagcctaggtgagtaagtgagaccttgtctaaaaagaaagaaagaaagaaaagaaaagaaaatgaattttcaaaaaacaaaaagaaaaaaacatgcttaatttgtccatcttaatattcttcattatatgtgtgtatatacatacatttgggatcatgctctgtattccttagttagcattttattatgtctttttggagttgatggaggtagtcattagtatgtctgtgagccaggtggaatgctcacacctgtaatctcagcaactcaggagtctgagacgagaggatcacttggggccaggagttcaagaccagcctgggcaacatagcaaggtgctgtctctacaaaaattagctgagcatggtgatgtgtgcctatagtcccagctacttgggaggctgaggcaggaggatcaattgagcccaggagttcaaggctgtagtgagctatgatcacgccactctactacagccaggacaacaaaatgaggctgtctcttacacacacacacacacacacacacacacacacacacacacacacggagtggttgattggataggatgagggtaatgaatttcttgaattgttttttctgaaacacgactaaaaacaccataacctagttttatgatttgtaggtaaagtaggatttttaaaatcacttactcttcgatataattgtgatggaaagtgctgaggaatgaaattggctttgattggattaaatatctaccttctaaccaaaacatagtctagtagttttaattcagttatttattccacatgtcataatgccccaaataaccaggctactgctattggcattaaaggttgccagcaccatctggaataattcacaaatgcaaggtgaaaggaatttctgcaccatttaaatttttttctctctcttaaaacagagcaaaatttttgcatctagtaaatgaatgttaggaggaacttaattttgagaaaaagcaatttgattcataaaaacagaatttttctccatttgtttgtcttctctaatgccaggagccagtctgctttttccattagttaatataattgatatcagattgttaaaatgagaaataaaaaattatagagtaaggagaataaatataaacattatttttctttttatttcctctagtgataactgattttattatattgtctgtggctgaattcttctgtagatattgaagatggccaaaaatggagatctaaaatgtaacttcttagtgtgcattttcaatggagaatgaattatctcatcatctgtgtcattaattcatgattttatcttgaataatttttcccagctttattgagctataaattgataaaatagcatgcatttaagtacggtgtaccacatgatctgatacatgtatacattgtgaaggattagcacaatcaagctaattaacacctttatcacctcacatagttaccacttgttgtgtgtgttgttagaacccttaagatctgctcttagcaaatttcaagtgcgccgaacagtattattaattatagtctaccatgctgtacactggatcttcagaacttactcatcttctgtaactgaaagtttatgccctttgacaaacatcttccacgatctccccctttcccaaccctctagaaaccaccgttctactttctctgagttctgtgaatttgatgtttttaggttcattcatatcacaagtggcagtatttcccttttgttcttgtttcgaaacagtctcactctgtcacccaggctggagtgcagtggcgtagtctcggctcactgcagcctccacctcctgagctcaagcaatttttctgcctcagcctcttgagtagctgggattacaggtgtgtaccaccaggcctggctaatttttctgtttttagtagagatggggttgcgccatgttggccaggctggcctcaaacttctggcctcaagtgatccacctgcctcggcctcccaaagtgttgggattacaggcgtgagccactgtgcctggcctcctttttgttttatggctgataaatattccatttgattatatatgccacattttctttatccattcatctgatgcacacttatgttgtttcacattttggctatcgtgactaatactgcagtgatatgggagtgcagatcctgatttcagttgtttttgatgtgtagcagaagtgacattgctgagtcatatggtagttctgtttctaatgtttagaggaaccttcttaccgttttccataatggctgtgccagtttacactcccaccaacagtgtaccaggattctcttttctccacatccttgccaatacttgttatcttttgtctttttcatagtatccattctaactggtatgaggtgatatctcattgtggttttgatttgcatcttcctgtgatgttgagcgtattttcacatttagctatcctttggcctgttgagcatttttccatatacctggtgaccatttggccatttaaagtcttctttcgagaaatgtctattcagatcctttgcccattttaaaatcaggttgttttcttgctattgagttatctagacattttgaatattaactccttatcagataggtttgcaagcattttttcccattctttaagttgtctctttactctgttgattgcttgcattgctgtgcagaagccttttagtttgacgcagtcccatttgtctattcttgcttttgttgcctgtgcttttggggtcatgtccaaaaaatcattgtgcagacccacatcaggaagctttctttccccagtgttttcttctactagttttaaagttttaggtcttatgtttaagtctaatccattttgagtcaatttctgtgtatggtcagggataagggtccaatttcattctcctgcatgtagatatccagtttccccaacaccatttattgaagagattatactttccccaatgtgtgttcttggcatctttatcaaagaccaattaactgtaaatgcatgcatttatttctgggttttctattctgttccattggtatagatgtctgttttcatgctggtaccatagtgtttagatttgtaacatagtttgaaatccgaaagtgtgatgactccagctttgttcttcttactcacaattggctattcacggtcttttatggttccatacgaagtttaggattcttttttctgtttttgtgaaacaatgccattggtattttgatagaggctgcattgaatccatagattgctttgagtagtatggacattttaacaacattaattgtttcaattcatgaacagattatctttccatttgtatgtatctttttcaattcctttgtcttctagtttttagtgtacaaatctttcagccagttgtatacaaaaatatacaactaatttttgtatattttatattctgcaactttactgaacttactataatagtttttaacaatttttttatgcaggctttagggttttctatgtatgaggtcatgtcatttgcaaatagagacagtttatcttgtattttccagtttgtgtgccatttagttctttttcttgcctaattgactaggacttcgaatattctgttgaagaggtggtgagagtggactcccttttcttgttcctgatgttaggggaaaagctttcaacttttcaccgttagatttatcggctgtgggctaatcatatatggcctttattgttgtgttgaggtacattccttctttacctaatttattgagagtctttatcatgaaaggatatttaattttgtcaaatactttttcagatgattgtgtgatttttatcgttcattctgttagtgtggtgtatgacgtttattaatttgtgtattttgaactatccttgcaaataaccacttgattatagtgaatggtccttttaatgtgctgttgaattcagtttcctagtattttgttgaaagttttgcgtctagtttcatcagtactattgacctgtaattttcttttcttatagtatccttatctggccttggtataagggcaatactggccttttaaaatgagtttggaagtgttcctgcctctttaattctttggatgaatttgagaagaattggtactagcttgtgcttaagtgtttggtggaaatcagctatgaagccatctggtcctcagcttttctttgttgggaggtttttgactactgctttagtcttctttcttgttattggtctgttcagctattaatatgtcttcacttgtccaggtacagtgtgtaatcccagcattttgggaggccaaggtgggaggatcacttgagaccaggagttggagaccaaactgggtaacatagcaagactggtctctacaaaaaaataaaaaattaactagttgcagcggtgcatgcctgtggttgcagcaacttgagaggctgaggcaggaggatcctttgaccccagaattttgatgaactatgatggtgtcactgtgccccagcctggacaacaaagcaagaatgaatctcttttaaaaaaaaagtcttcaattttgttgttgttgttgttttaatgattcagtctttagggtatatgtttctagaaatttattcatttcttctaggttatccaagttgttggtgtattaattttcataatattctccttgtactcctgtggatcagttgtaatgtcttctctttcatgtctgattttctttatttgaattctctttctcagttattctagctcaaagcttgtcaattttgattatcttttgacaaacaactattatgttgattttttagaattttctttctggtctcccatttatttctttattatttccttactttagctaactttgggcttaggttgttcttttttctatttttttgaggtgtaaggttaagttgtttgagatctttattttcttaaagtttattgccataaacttgtctctttgaactgctttgctgtattctgtaggttttagaatgctgtgttttcattttatttgcctgaagatactttttgactcttttttttttttttttttttgagttggagtctcactgtgtcacccaggctagagtgcaatggcacaatcttggctcactgcaaccaccgcctcccgggttcaagcgattctcctgcctcagcctcctgagtagctgggattacaggcatgtgccaccacgcctggctaattcttaatacagatggggtttcaccatgttggccaggctagtctcaaacccctgacctcaagtgatccgcccacctcagtctcccaaagtgctgggattaaaggcgtgagccaccgcgcttggcctgactttttgactctccttttgatttcttctttgacccattggttttgtcaggagtatattgtttactttccatgtatttgtgaatttttaaatttccctcctattattgatttctaattttataccattgtagttgaaaaacatgcttgatatgattttaacatagttggatttaacacttaattttgtggcctaacatatgttatattctggggaatgctctatgtgtacttgagaaggatatgttttctgctgctgttggatggatgtttcatatagtctgttatttgctctatactcttattcaggtctaatgttttcttattgacagactgtttgacctatccattgttaaaagtggggtagtaaagtcctctcttgttattgtattgctgtctgtttctcccttcagttctgttagtatttgctttatatttttaggtgctctaaggttggatgcatatatattaatacatttacaattgtaatattctcttgatgaattgacccatttattgttgtataataaccttgtctcttgtgactgaaagtctattgtgtctgatataagtaagcccatttctattcttttttggttaccatttccatggaatatctttttctatccttttgttttcagcctgtgtgtgtccttacagctaaagtgagtctcttgtagccaacatattgttggatacttaaaaaagtctgttagccactctgtatcttttgattggagaatttaatccatttaaagtaattattgatagttaaggccattttgttgttctctgttttgtaggtcctttgttcctttctctcttgctgccttcctttctgatttgatttttttttttgtaattgtatgcttaattcctttctatcttttatatgttactggaggttagttttctttgtggttactatgagggttacataagatatcttaggctgttttaaggttgtaataactaaactttaattacctacaaaaattctgcaattttatgtctccctccttcacagtttatgctattgatgtcacactttacatctttttatatttgtgtacccattgacaaattattgtagctatagttatttttatacttttgtcttttaacttttatgctagttaaaattgatttatgtaccacgattacagcattgcagtattctgaatttgactgtatatttatttttaccagtgagttttatactttaatgtgttttcatgtttttatttagtgtcctttagtttcaactcagctccctttagcatttcttataaggcaggtctagtgcgatgaactctgtcagcttttgtttgtctggaaatgtctttatctcatctttatttctgaagaacaactttttttttttttccctctgatggcacctctgactccttgatattgtattatttgtttctcagagaagtaaagcaattttttttttgagacggagtctcgctctgttgcccaggcaggagtgcagtggcatgttcttggctcactgcaatctctgcctcccgggttctagcgattctcctgcctccgcctcccaagtagctgggactacaggcgcccgccaccacgcccagctaatttttgtatttttagtagagatggggtttcactgtgttagccaggatagtcttcgatctcctgacctcatgatccacccacctcagcctcctaaagtgctgggattacaggcatgaaccactgtgcccagcaacaactttcttatgtataatattcttggctggcagtttttgtctattagcactttgactatatcatctcattccctcctgatctgcaaggtttctgctgagaaatccactgattgccttggtggtggtggtaatggtggtgtgtatgtgtgttgcgggtttccttgtattataggttgcttttctcctgctgctttcaaaatttcctctttgcctttgatttttcagaattcaattataatgtgtttcagtgtaattttctttgacttgagcttttgagcttcatgaatctagatgtctgtatttctttcaagatttgagagattctcaggcaacagacattcatttacgtgagctaggtatttcttctattctcctgttgggaccttggtaatgcacatgctcattcatttaatgctgcatcggagcttctgtatgcttttgtcgtttttaattcacttttctctttagtttctctaactggataattttaaacgatgtgtgtttgagttccctgatgctttcttctgcataactgagtttcctattgaagctattaattttttttttcagttgtcagtgtattcttcagtttcaagatttctgtttggttctttagagtttctattcctttattaaactgtttgttttgttcatgtattgttttcctaatttttgttgagtttcctgatttttgtttctgggttctcttgagtctcattgagcttctttaggatgattatctttaatgccatcagtcatttcatgtatctccattcctttgtgatcagtcataagggctttattggtttacttcggtgatgtgttatataactgtaaaccgaatacatggaaaaataaaaaaaaaacaatagaaaaataattagaattagcaagagcgtttaacaggttttctagatagaatacccatataggggaatcatgttcctgtttatatgccagcaaatagccactagaaaatgtaattttaaaaagttactaaaataatttattcaggaaaagttcattagtgcatggagccattaggtgaaaggttgataaaaggtgaactctacacacagaagagaccaggctgtcactgccttgatgcactagttaatcttagcctctttaagagtgagaaaaccaaggaccaggcacagtggctcatgcctgtaatcccagcactttgggaggctgaggcgggtgggtcacttgaggccaggagtttgagaccagcttggcccacatggtgaaaccccttctctactaaaaatacaaaaattagccaggtgtggtgttgcatgcctgtaatcctagctacttgggaggctgagacaccagaatggcttgaacccaagaggtggaggttgcagtcagccaacattgcgccactgcactccagcctgggcaacagagtgagaccctgtctcaaaaaaaaaaaaaaaaaaaaaaagagtaagaaaaccagacattatattatatgctgtcagatgtgaggcaatgtcagttatacaacaccattaattattatttttacctaaaaatgaaaattgaatatattcaagtctttaaagctaatattcagtatcaaaacaaacaaaaagcaagagatatagagaaacaagttgaatttcatcatgaagaagcaaacatacaatccagaatgtgagtcgttgtatggaataattgatttcctttttaaaaaaatcactggcattcaaaaagggtacattggaggaggtaagagacttttctctagattagtagggatttgaaggatctgacaataagcacaatgtatgggcgttttttgtattttgattcaaataaagtagccgtaagaaataaactttgattcaaatggggaaatttgaatatggactatatattatactgatattgaggaattgttaattttgttacaatttacgttgttaaacatgctcttttttggagatgcatcaggaagcatgtataagggtataatgacatgatatctggaattttaaatgatggcaaaacgtataatgtacatagaaataaaatatatacacattttttatggaggaaaatataatgctttgttagccttttaaggagacctaaacaaatagataaacacactgaccagttttcaacctaacgatagtgcaaaagtgatacacgttcagtaaaaccacactttgaattttgatcttttcctgtgctattggtatgtaatatgatactctcttgtgatgctggacagtggcagtgagccacagatcccagttagccacacaaccaggagagtaaacaactgctactttccagattaggtgttttaaatgcattttggacttaggatattttcaacttatggtgggtttattgggatatagcccaatggtaagttgaggagcatctgtagtatgttaatgaattgaaagatccaaaagcatgaagtttttcccaaactgacattgcttcaatgtgattggaatcaaaatcccagaggctgctgttgggttttttgttgctgtagttggttggttggtttggtggaacttgacgggctagttctgaaatttctatgagaagcgtaaagcgccaagaacagccaagagagttttgaagaagaaaaaggtagggagccttgccttgctaattactttttgtaaaggtatagtaattaaggtggtatagatctggcacagaaatatacaaacatagccacaaaacaggtacacatgcatatagaaactttgtacacaccagaagtggcaatgcatgtaaatattcctgggaaaattcattataaatacatgtaaaaaatgaaatattattatgttataccaaaccccccaaaatggaagtatgtttttacctcataacatatgcaacctcggtttcagatggattaatgactgcaacgtgaaagacaaagttaacgtcgttttaggggaatatctttatgaactttgatggacaagattttgtggaaatgtcacaaaattgtatattataaaggagaagattgatacatttgaaacaattaaaagttttaggctggacatggtgactcatgcctgtaatcccaacactgggaggcagaggccagtggattgcttgagtccaggagttcaagaccagcataggcaacatagtgaaacctcatctctactacaaattagctgggtgtggtggcatgtgcctgtaattccagctgttcaggaggctgaggtgggagaatcacctgagcctggggggtcaaggctgcagtgagcggagattgtgccactgcacactagccttggcgactgagtgagatcccatctcggaagaaaaataaaattgaattctatcgatgaaaagatgtaaagaaatcatagactagaagaaaatacttacataacatataacggataaagtattattatctataatgtataaagaatacctataagtcattaagaaaaagatatgttaatttaaaaagtggagaaagacacaaatagctatttcacagaagtggaaacaggaatggccaaatactgtatgataagatattcagcctaggtggttagaaacatgcattgtaaaactataatgaggtactattttttttctaccctattggaaacatttagaaagtcagtaccatgtattaatggatgtggagaggtataatggccaacagttgtgcacagctagcaagagtataaattaatatagcttcttggaaaataaaataaaataaggtgtacctactgtatttcctagcaattcagttcctaggcctataccttagagatattcctgcccaggtatatcagagtgcacctagcagcattatttaaaatggcaagaagatggaaacaatgcaattgtcatcttctggggagtagattaaagtaattgccatatattatttcatacctcagtgaaagtggagaagattaaaagatacattacactctgaatggtctaagtctcgaaacctattgaaagggaataatattgaatatcattctgtactaaaaagaaaaatgaataattatttatctttataaagctcaaaaacatgtaaactataaatgaacagttcatatatatatatgtagcaaaacaataataaaagcaaagggattttaaacataaattttgagatataggttgttcttattaatggaggatagaccaatagtagagagagacacaatagggagcttcagaagtaaatatgatgttccatttcttaagctaggtttatggatttttatgtcattattttcatatacatctacattatatacagtgtattgaatgtttgaaatatttaataatggtaaaattagagttgttttacaaagctttctttttctatcagccattctaatatttcagtgcgtcgatgtcaaaaatactgcttccgtatttccaaaatctctgacttggtttctttttagtcatttcaaatgatcccgtgcctttcttttgttttatgatttcattgttcttcgtagaatacatgctgaaatacatgttctttatgggaaaacttatttttgtaaacgaatgtgctaccattgagaggaacgaatttggaattgttgaaaaatttcgcagcatgtatttattcgttggttttcagccattccttattgtcactggtgtaagtctctagataaacatatttgtttctatacatacatatgcaaagcttgatttttctccttctgtcattaggcaagtgaaagaccagaataagaaggtagcaaatctgaagcacaaggaacaggtggaaaaaaagaagagtgcacaaatgttagaggaggcgcgacgacgggaggacaatctcaacgacagctctcagcagctacaggttagaacacaaggagaatctgaaaggatcgggtgaagacatttgatccgtaatcgcatgttgtttttctcttcatctttatcctcctcttttttctctttctaaccctgcttgctgccttcctctcagaccaactgtttagcaatgaaggaatggctttaagtagaaaatgcaagttttattccacagctttatgaggacacctcagcataggagaaagttcatcttgcttcaagttgatcacacttaattggtaagttcaatgacagtttaatgagtgggttatattaggcttcagggttgtcagtatacctctttgccagttccattcattaaaatggattgctaatcttggtttgtgtctttcttccttttttctattcttcctttctcttttccttctacctctctaacctccctctatctttccttcctttcctctttttaaatattcagtttagtaagaatattttacagtcatacagaatgtgacatataaactgtattttttcacttcagtggagtgataattgatgcctaaacctaattattcacagattaattaaaccaggctcaacaacagcagtagcagctaccatattataagtgccagttaggtcctcagtatttgaaactaggctctggtcattcattttgttctaaccttcacagtaatccaagtggagcaggtggtattgtatacattttgcaccgggggaaatagattcagagacattgtgttacttacgtaaatgcacacagcttctaaatggctcagccatgattttaactgggacttcctgaatctgtagactgtcctctttgtcttgatcataatgcttcagaatgaaggtgtagattatagggaagaataccataaatgtgctggagtctctgaaagccatgctaagactaagccactgccagattgtttttctctagttaacaatttctaattgggtctgatactgtgtatatgccgcaattacaatctttactggagagatttggagggtttactatgtagaagccattctgaggctttacaacaaattcttttaacatatgaagaagactctactttttacttctttttctcattcctcttttatgtaacttttactgattatgtttatagaaaaagtataaatttcctcaaatgcaccaaattttgcaaaaagcagcatgcccgtttttcctcatccttgccaataacagttaatattggcagttttctcatctttctgttcttcctcctttttttttttttttaacaaaatacaaatctgatgagtggtaaatatttcattctgtgttaatttatatttctctgattaccaatgacattgttttttcaagtcttgaattttcttttgcttgttaatgtaatttaaatctctcttccattgttaggttttcctcccatggattttttgcttagtttatccacattttgagagtatatatttacacataaatacttttaagttgttctgtgctttcatatttttgcctttactttttaattcattttgtggtatttgtgtggtgaggatattttttctttattgctaacaacttcacaagaatgtttatagggaattatttcattgctcacaaacttgaattgatgtctttatatttcatgaaattaatgatgagtctgtttctaggatttcagtttaacctcccttcttgaactatggccacattgttgtttaattctagaaagtatttattttatgataaggcaagcctctctttatgttagcactttaactgtttcatttgtctttcttaccctgctcatcatttaatgttttctattagcagtctctctctataaaccaaagatactcttctaatcttctctcagttgttataacaccaaaagtgctttcatatgtaatctcttatttcctttttatataaactaaaagataaataagatagattatattatttatattttacctatagggaaaactaatttagagtggatgactggcttccccaaggtgtctaagtaaatgatagataccaaagttatgaaaaagatagctgatggccatgtgcaaattacacagagatgtaattcattcaaataccgtgaaaagagcactggactacaagttaggatacttaggatctgatctcagttcttttactaactactcagttacttaagtatatttctgtttgtttatttatttatttacttatttgacagacagtcttactctgtcacctaggccggagtgcagttgtgtgatcctcctgtctcagcctcccaagtagctgggactgcaggcttgtaattttttaattttttgtagagacaaagtctcactatgttgccttaggctgttctcgaactcctggctccacacgaacctcctgcatcagcctcccaaagtgctaggactataggcgtgagccactgtgcctggccctatggatcatatttagagattgcaatctgggtgttaggggtactccccaccactgcgttgtcatttacaacaacataatgaagaaatacagccggccatcgtggcttatgctaatcctagcgactcgggaggtgagatgaaggatcacttgagaccagagttcaagaccagcctgagcaacatagaccctgcctctaaaaaaatttaagaaattagcctggcaggatggtgtacacgtacggtcccagctactgtagaggctgagactggagaattgctttatcccaggagttcagggttgcagtgagctgtgattgtgccactatactccagcgtatgtgacagggcaaggccctgtctctaaaataaattaaatgaaaataaaagaagttaggaattcttggagaagttactcattccaggattagagcaagaaatgtacaagacaaacctaaattagtggttctcaaacttgtgtgcgttggagttacatggagggctattagaaaagtagattgctgtctcctgtccctaggggttttgattcagtaagtttggggaaagccccatgaatttgcattctaataagttcctgggtgatgataaaattcctggaccaggaaccacattttgaaaaatcactgcgctatagcatcatgcgatatgaaaaattaagaacctatcaaagactactggggtcatataaggatggacagaggagcaagaatgaaggggctatcactggcctaggatagacagtttgagcataagaaagactaatgagcacagttgtttaaaacaaagtatttttaaatccggaaacttcattgtgagactataaaaataatttggagattgctgggacaccagtgccctaacactgggatttactttttaaaattccaatggtagtaggggaaacattggccattttttgatagtttattgaagctgagtggtggtgacatggggtgtatgatattatctttcctatacttttgcatgtttgaaattgtccctaataaaatgctggaaaagaaagatatcacttaaccacttgaaactttcgtatctgtaaaatgagtcttaagacagataagacttcactcttagactttagtgtgtctttcagttctaaactagctttttaaccatatttgcgtagccctggagtggagcctgtgactctgggttcatttcttagccaagctccttatttgtgttttccctttacttgagaaatattttccgtattttccaagtaactcttttttcatatctttgcttgaatttcatggagttggtttcttctgtttttaaactgaaggtcatatagctttggtcgtatacctttgcttttgtctaaaaattataaattttaattaacatactagaaaaattaatccataatatatatttgtttatatccctctacattttcttttaaactttaattttacttatttgtaatactaatatatatacactcttccgtattttgctttttaaaaactttatatcatttaaacatttccatgagttatgtgtttcataatgatgcttgtacttactattttcagttgaatccagagttcagtagctttatacacgttcctctttttctggacatttcttaattttcaattttcacagagcaaatttgtacagataaattgtacccaatttggtgatttcctttggctattcctcagagcaaacttactcaaagtatatgaagtgttgtagcttttcttaaatttttgttaccaaagatgaactaatttatagtacttccagcagtttgcaggcattctgttttccctatagccactttggttctatttaattttttgctcattttacatataatggcgtcttcaagttgttatatttcatttcttcagtgacactgtccgtttttcacatgtaatgatctattatctgaaatttccgtgtcaaattttaattacatttgctacctatcatgaagatcttttcatatcacctcctttgaattgatatgttatgaattacattgaggaatgatgattgttacatattttttctttttcagtcatttttcttttgaaatttattagattttgttgtttaaacatcttttcaaaaaaatcttttaaattgcttatcttgtcctttcaaggcaattttttcacttaatctccatttgcaacagagtcaagcatactagtttcttttagttctttagctgtgtgtatgtgtttgtttcttgtaaatgttcattgctttaatgcatgtggaatttatttaacttaacttacaaaacatagatttaaagtactctttctttaccctgatacccagttctcctggtagcacttagtaaataggtattctttaaaaaaattttaaatctacctaatcatatgctacataatcacacagaagtttccatttcattctagattcattgttttgtctttaatccaattttttgcatttcttcttcttctttttttttttttttttttttttttttgggatggagtctcttgccctgtccccaaggctggagtgcagtggtgtgatctcggtttgctgcaaccttcacctcctgggttcaagtgattctcctgcctcagcctcccgagaagctgggattacacacctggctaatttttttgaatttttagtagagtcggggtttcaccattttggccaggctggtctggaactcctgacctcaggtgattcagccacctcggcctcccaaagtgctgggattataggcgtaagcccagcctttttgcatttcttttgccctttgtttacaaagtcagtaggtcatcttcaacgtcattaactttatctcaaaactttttttctaggtaaatttatcagttttttcaacaacctttgaaacatcatttgagtgtctttagtttgttaaattatactaataacttaaagaatattatcacttgtaatttatttagtcatctccagccaggaactaaattcattcctctttattcctatttatgtttattatttatcatgttaaaaaagatttaaggaatataaaatattttctaaagaaagctaatatccagattacaaccaaattattaaagatttgtggtagataatagagaagaaaaaggcaaatgaaacttcaagccataaaaagatgaaaaaagtattagcaaatgctctttattgtattcacctataaaataacctttcttcttatgaaaacggagtcaaattccttacagagctcctgtctctaaaggttgtgagcattaatgagatgatacatgtaaaagcttctataagagcaaatgttaacaggattggactaggtagtagtaacataacaggtacagtgggtcctccatatccataggttctgcatttttggattcagccaacggtggattgacaatattatggaaaaaaacaccaataaaacagaataatacaacaataaaaaataaatagaaaataatatagtgtaacagctatttacatagtgtttacattgtattgggtattagaagaaatcgaggccgggcgcggtggctcacgcctgtaatcccagcactttgggaggccgaggcgggtggatcatgaggtcaggagatcgagaccatcctggctaacaaggtgaaaccccgtctctactaaaaatacaaaaaattagccaggcgcggtggcgggcgcctgtagtcccagctactcgggaggctgaggcaggagaatggcgtgaacccgggaagcggagcttgcagtgagctgagattgcgccactgcagtccgcagtccggcctgggcgacagagcgagactccgtctcaaaaaaaaaaaaagaaaaaaaaaaaagaaatcgagagatgatttaaaatatatgcgaagatgtgcatagattatctgcaaatacgacagcattttatatcagggacttgcgcatctgtggattttcatattccaggggagtgttagaaccaatccccagaagatactgaggtgctatgtagggatgtaatgaaacgtgagagatactgaggtgctatgtagggatgtaatgaaacgtgagagatactgaggtgctatgtagggatgtaatgaaacgtgagagatactgaggtcctactgtagggatgtaatgaaacgtgagagatgctataattttcttgtaaaaggaggcactcacttcattaggagagaacttttaatttttccggtaggattttgtgagaaatttgcctcgtgttacttcatttagagcagtggttctcaagtaaggctcagttttggcgctaaggaatctttggcactgtctggggacatttgcaacttgaggggtgctaccggcatctagtgagtagagtgctgggtgctgctaaacgtcctgtagttctccggatagcccccacggcaaagaatttctcggcccacactgcaaatagtgctgaagtttgaaaccacgtttagaaacactttgaatgccagttctttatccgaagtgttactgtggatgaagttttcatgaatagctttggaaacctaatacgtatggccatatttatatttttttctatgtagagctaagaccaaagctgttaagttaaaactctgtagtggcagtgccacagtacccagtaatatcgcctaggtacatagttttctggtaccgtactctaatttgatgtgaaataatgctaggagagttgtggtgagtgagtaatttacataacatacacaataaccatcattctcgggcacataattccagattgaagttaatataccacgtgattgaagtattctgtattattgttaatgaagacttggtactctagaagtatttaataattgtcacacaatcgtaatcgaatgactggttatatttttggtgtgtcatagaatagtagaatagcaattaattatgtcttcttattttaatcatttttatcacaatgttttgtgttttaaatttctggctatttaggtgatctcttgatgttttcatgaaataggagaagtaaagggaaacactactaccttatttctgttttttgaaggaattattttagtatttctacgttaagtataataattctagtattaaaatattcattaagtgttttgtacttaatggtttgtttgtttgtttgtttgtttgtttgtttgtttgtgttttaagacagggtcttgctctatgacccaggcaggagtgcagtggtgtgatctcagctcactgcagcctccttctaccggattcaagtgattctcatgcctcagccacccgagtagctgggattccaggcgtgtgccaccatgcctggctaattttgtgtgtctgtttttattagagacggggtttcaccatgttggccaggctggtcctagcatcatgtgatctgcctgcctcggcctctacaagtgctgggattacaggtgtgaaccagcacacctggccttatacttaatgttttgaatagtttatgtttaatctttatcagatgccgttttgatattcaaaggtcagttttgctagttacgttaaaaagcacgtagtaaatttattttatttgtgaagattaacacttgacctgcagggttcattttcactttttgttattcagcgactgccacttgtgatgttaagttcatcactggcttcactgttccaggtagaagttacagtttgccagagagcagtagtactacttttctattttttctcttttttaactctgaaaaataaaatacatttttaaagtatgcacatgcacatgtagatgtgccgtgtaaagaatacttataacatgatcatctcgagaaattggagtattgttggcatcccagaaatcatatgtgtatttctttgctatcatttttctcttctgttcctctagagattactattctgacttttcttcttctttgcttttctttatgacctgcacatatatcaaaaagtataatttagttttgtatattttgtacttcaataaatggaattactgtatttattcttttgtcacttcttttgttgatcattatttgtgagattcatttgtattagttatatgtagcatccattcctttattgtccttgtactgtgtttatttaattcagaattccacatttatattgaaagtgctctgaaaagatgattcatttcttttcaattttccattctttgaatacttcagatagtaccaaaagtaattccttttggcagaaagtgagtttagaagtaagtggttactttgctttttgtttttggttcaacacattaaaaatgttctgattggattaaacactgtcttacatgtgaaatgaaaatgatacctgaaaaactaagagaatctgaggatcccagagattctaaacacttttttgtcatttatcatggccttagatatgaatactcttccttacgatgtcatggtgccactcagttgtatcctatttctacctttgtgttttggacagttaattactgtgatttatagtaacttatctcatactttttggtctcagaagcctctttgcatttaaacattattaaagttcccaaagtgatttttttttctttttttaaatagagactgagtcttaactatgttgcccaggctggtctcgaactcctggcctcaagtgatgctctcaccttggcctcccagggtgctgggattataggcgtgagccactgcaccaggcctcaaagtgatttttttatatgggttatatatgatatacatgtgcagatcttttgacccagctatcccatgtcgtagatttatatgcatatacatgtccaaaaatataaaaatacatatgtacaaggtgacttataacattattcgtaattgcaaaattttgaaaacctaattgcctataggtgggagagtgcttaaattcaccatggtgaatctacacaaaggagactggcagttttaaaaaagaaatgaaacgtgagcaaaagaaaaaaaaaagatagtattttaatcgtgaatgaaatacatatccatgagtttatgctgatataaataagtaatcaaatacataaataaatggcatatggacagacggctctttctcatagaagaatttcagttaataagtatagatggaaatagaccaaaagaaaatcaccatgagacaaactgatggttgtgaaagttagtgtgtgaaagtttgaggttaaacatggctttcatagtctcaaaatgttttctctaaggtgtttatttattttaacagaagactaacttttcagtgaagaaacctaccaggacaccttaacaaagtgtttagagttaacattaccagtaataaagagacattgacctcatgaaccccttgatacaaggcactgagagggacacaatatcatttctgtgttattctttccaaaaatgtgtagcctcattccagtaatgagaaaatgccagacaaatgcaaattctgggacattttacgacataactgagcagtacactttaaatatgtcaagatgatgaaagacaaggaaagactgagcagttacagatgtattcgaggggaaatgtcagctaaatgaattgtgggatcttggattaaagcagatttcaggaaaaggaacagaaaattagctgggtatagtggtgcatacctatagtcccagctacttgggaggctgaagagggaggatcacttgagcccaggagtttgaggttgcagtgagcccaggagtttgaggttgcagtgagcccaggagtttgaggttgcagtgagcccaggagtttgaggttgcagtgagcccaggagtttgaggttgcagtaagccctgtttgcgccactgcgcttcagcctgcaagacagagtgagaccctgtctcaaaaaaagaaaaaaaaaatccggaaagaaaggacattggtggaaaaacaatgaaaggacattggtggaaaaacaatgaaagtaaggttctcaggttggtaaatagcattgtaccagtgttaatttcccagttttgatcatcttactatggttatgtaaaccataaacattacaggagcctgtataaggagcagatgggcactgttctgtttttgcagcttttctgtatgttcataattaattcagaataaaagttttatttaacaaatgtattgacactatatttctcagcacttttaatcacccagttcactttgccatctctttgaaataagtatgctttggaatttaaaaatgtcttactaccaaaattaacataacaggttagttagctcaggcatttttcctgaatttaggaatgcagatattatgttctcatattgttgacttcgtaaacccgtagtttaattaggaatgtagctgatcaggccgggcacggtggctcatgcctgtaatcccagtactttgggaggctgaggtgggtggatcacctgaggtcaggagttcaagaccagcatgaccaacatggagaaaccccatctccactaaaaatagaaaagtagccgggtgtggtggcacatgcctgtaatcccagctactcaggaggctgaggcaggagaatcgcttgaacctgggaggtggaggttgcggtgagccgagatcatgcaactgcactctagcctgggcaacaacagcaaaactgcatctcaaaaaaataaaaataaaaaggatgtagctaatcaagttgatcgttctaaagattagactcaaatcctcaagccatgatgatgtaatatggctattatcagtagagttatacctagacctagagatgaaccttgacctgtctgtatccttcaagtatagaaggtttaattttactcatttttaaacatacttgagatgtctttcattttttcaatataaatttatcgaatgctttctaagtgtcaggcactgttgctaatctttggttatacagcagtgaaaagacatgttctccgcccttctggaacattgtctcatggaaaaacaataaaactaaacaaataagtaaatatcaatcagggtaagtactacaaagaaataaacaggacactgtgatagatgatgggggagggaaatattttgggcaacaaatttaggtagtgacatcagaggagtcctcccaaaggatattgagatctgaaaaagccttataaaaagtggagaagacaaaaaattgaggttacccatatggcagtgaaaagcttggcattttcaaagtagagaataggtaagggtcaggtcaaaagggaccttataggccatgaaaagaagtttagattttacaagtagtgaaacagtctacgtgaaaagttgacaggatctgattcgcattttcaggatactgttttttgcaatatctggaggatgattggagtgggacaagagtcatacaaaagtgtttgctcactgtttcatacctttgtgtgctgtgcagttttctatgctagaaacagtaatgttgcacgagacaaacaagcttctttctcttaagaagctcacattctggtaagggctctgtgagaattgaggagagaggtttttatttatatttaaaaaaaaatttttggagacagactcgctctgtcactcaggctgcagtgcagtggcatgatcatagttcactgcagcctcaaactcctggacttaagcgattctcctgcctcagcctctggagtatctgggactataggggtgtgccaccacacctggctaattttttttttcttcttattttaagtagagactgagtcttgctgtgttgcccagtctggacttgaactcctggcctcaagcagtccttctgccttagcctccaaaatgcatggattatactttacattacttattataactttttatttctgctggctgtcaaaagatgtgttataatacaagtacaataatttcaattatagtaattgctatacgcagaactgaaattaggtaaattccagcaacagcaagaacctttcaaataaaacatatagaagcatagtcttagctgatttggctgttggtgaattggggattaaaaaaagctttctcttgaaagcctacccatcttttaagggtcagatgctttttcttgcgaagctgcctaaatcctcgcagttggaattaatcataccttctgttgtaatttcattagtttgtttctgcattgatttggggattattttatattactttgtattatatgctaattgtgtgctggttcttctgcatacttgagcttggggaccatgtcttggtattttacatatagttggtacttcataaatgcttattgattttaattgtatctatagatgtcaagaacgttctgtcacatgcatcttagcctggtctcttagtctatttgggctgctatagcgaaatactgtaaactggctagcttataaacaacagaaatttatttctcacagttctgtgcctggaaagtccaagatcaaggaaccagcagatttggtgtctggtacaggtccactttctggttcataggtagcaccttcttgttgtgtcctcacatggtggaaggggcaaggcagctctctgcagcctcttttataagggcatttaatgccattcatgagggctctgctctcatgacctaatgacctcccaaaagctccacctcctaataccatcacattggtgattagatttcaacgtttgaattttgggagcacacaaaattcagattctgattctgatctgatctgattcagatcattgcacctggcatttggagcctcctattaaagcaagctctgttttaacctcatcttgaggtcagatgcttggcttctctgttttacacaagctgacagtgttggtttctttgaatataacacgttgttttcctaatgtatgctcttctacttctgcagaatctttttcctgtggatttccagttttactacataaagattctgccttcaaattaacttttgttgatgaactctgcctggacttgttattgccttatccattgttccttagcctgaatgtttaatcatgctttattgtttacatacttttcaatacattgttttataattgcccctgtgtgatttaacccatttaattttcccttctcagctagtttatatctgccataagtgaagaattactttaaaatttctttttagtttttcttaaacactgttttgcataggttcattaattatagctgtacttattgagttataaataataaaatttaatttagttataatttttttggaactgaatgatattccattcagcatcctaataaatattctctaaaattctgtaggctatcctttaagagccttgtatgttttaacacaggaaatgccatcttcccttagttgagaatattaattctttgagcagtgacactcagatacacctttcagcaaggctgtaagttttagtcacgtcctaataatgcaaagtagagtggactgaaaggaggctcctatcaatagtggtttggggctttgttttcctttataacaaagataagtatctgaatttaaccttgaaagaggttgttgtgagagagattaatggaatgctgtggtgctgtgagacagctctcccgaaaccaatgaatattaagaataaagttcaaagaaagtgaaaacaatggaaatagagccggggaaaatcagctttacatatatttaagcatattctcttcttagatatatagtcaatgaaacatttgtgtttttctctgtaatttgatttaactctgtctacaaaaacagtttcttcattttgataagagattttttttcctttctgagaatgaacactacttatccttcatttttagatttgccagggggataattatttaagaaagccttttataaacattaagattgacatctttttaggaatactatttctagaaatagtatgtgatttgtcacatgctggatacatctaatatattaatgttcctgtttttgcaaaaataaattttgatttcctgtttctagaacttttccttcacctatttaaatgtttaatcctgtatcatttcttcctttttaataaaaattttttcttagtaaaacagggctttttctatatagaatattgtcgtaggtgagtttttatggtgttcttaatgaatattagagtaacggatcacaatggaaaagtgtgcatataaatcagcatctgtttttacatccctgtggatagttgctgaaattacgcatgaaaattctcttttactgcaggtgaagcacctacacaaattgttggttatgtgtgcagcttttaaaaactcctatctcaaactgggccactttttaccatttagaaagaaagcaaaaacacggcttaacattactttttaaaattctgcagtgtttgaaatggactctgtagtacttttccctctggccacatgtcagttcaatttaatagcagtgaaatttattgaaagactttattgataggactaatgtgctctccataaaatgatgaataaaattacattaggcactaaaattattaaaaactggactactaagttctcactttagtgaaatgaatggtttactcctttcctttgtgttgtgtgagctcttcttggtttgcatttggaaggaaaagtctccaatgagattcttttttttcttaaattttatttttaattataatggatacataatagttatacatatttacgaggtacacatgatgttttgatacaagcatgtaatgtgtaatgatcagatctgggtaattagggtactcatcccctcaagcatttatcatttctctgtgttaggaacgttataattctattcttttaggtattttaacatgtacaacaaagtgttgttagttatagttgccttattatgccactgaatgctaatcctgttattttttaagagaacagaagcaggtatgcaaatagtccattttctaagacctcagaagcaaaggtcagcctcttatgggccacatcagttgtctgttattttaaggaaaagatatttttgggattttttggtaaagactttgaaaaggtatgcttgttctttttataagcattacagatcaaagatttatagtgtcctaggattaggtaaactccatgtccttgcccaagtttctcatactcagctaccatgattttcaagatgagacccttcccagtctgtatgggatatttgtactctatgctctgtaaaatttattgatataaagcatcatttttatatgtgtacttttctgtttatttaatgaaatacatctgcttttgttttgactttggtttttaacaattggggttataacagagcaccactcttaactgaggggagacatttgaggtgttttaaggagaaggagggagagaatatttttaaattttaacccacagtattgccttaaagtagttggtgtgtaaccaaattctgtctctgtgttgtgctagctttcacttcatcagtgcatctggcttcaatttttttccccacaaagcatctgagaagttggtaaatgaattctgacatgttgaatgattttaatgaaatcttctggatgtgtatatatgcttaggggatggggaagagggaggcagaataagcagtggggttgaaggtaacaaagaattactgtctctttacgttaaggataatggataacagttaacattaatatctttcagaacaggttaaagtctgtctggtaagtggtgtttacttccaaggaagcagctcttattattaattcaaataaatgacttccattaccgtgtcagaatgagagctgggagagggaggagagaatgtgggagattgttactttggataatctttgtgaaatctgaattggccttctttctgctgcagaaaaaggcaaaagcttagggagatctaccatcatcaagtagctcttttttatgtgactatactgtagggccttgttaacaatttttgagggagatgtttgagggaacaacaaattaaattttaattgcagtttctcctctgcctttgcttttctgattgaatgtttgattggaaagaaaggcagctagctgggtgtggtggctcacacctgtaatcccagcactttgggaagccgaggcgggcagatcacctgaggtcaggagttcgagactagcctgaccaacatgtagaaaccttatctctatgaaaaatacaaaattcgccaggcgtggtggtgcatgcctgtaatcccagctactctggaggccgaggcaggagaattgcttgaacccaggaggtggaggttgtggtgagccgagatcacgccattgcactccagcctgggcaacaagagggaaactgcatctcaaagaaaaaaaaaggcagtggagggtagagtcttacagctcagtgatgtgtagcttggtgttgacagagctgacatcaagaagtaaagttctgagagatgtattgggagtggtatcatgggagttgctatagagtccagtctctccctgttaatctgcctgagtgaagctatagttaggctgtcccaacttctgccctagtctctttgaatataggagtcttcttctttaaggagatgagggattctttgaaaggtcttccttcttctccctctaccagacccctcaaagtagtcacacaaacctcctgccgtgaaccctgtactctgtgagtgaagtattcgtatttgatttcagcaaatatgtgaggctggcaaaagtaggcttcagttacataatccaatggtaggaaaaatggtctgggttcgttttggtgagtgcaaatgtggttaatagcagttgaagtaaaactctaaagatactgctttcattttaggtgatatgaactatttaaaatgataaagcatgttcctttgctatctctagatagctattaagtgagatgtctgtgacacacagtacatttctaaattttgggttgcctgaattgtttaagcagagtaaaatagccaagttagggcaggtgcatggaataaaactctctctctacttagtcttattcccctaggctgccaatttaatgcttttttctaattagtgagtgctataaaatggcttatctccaaacagtacctgtgttaatggcaaaaaccacaattactttggcaccaacctaataattcccctttgtaatttttttaaattttatttttattttattttatatatttttttgagccaaagtcttactccctctcccaggctggagtgtggtggcatagtcttggctcactgcaaccaccgcctccccggttcaggcaattctccctgcctcagcctcccgagtggctgggattaccggtgtgcatcaccacccaggataatttttgtatttttagtagagatgtggtttcaccatgttggccaggctggtcttgaactcctgacctcaggtgatccacccaccttggcttcccaaagtgctgggattacaagcttaatttttaattgacaaataataatcgtacgtatgtatggtgatgtttgaatacatgtatacattgtggaatgatcaaatcaggctaattaacatatccatcacctcacatacttgtcatttctttgtggtgagaacatctcaaatccactttttttttttttttaatactttaagttctgggtttcatgtgcagaatgtgcagttttgttacataggtatacatgtgccatggtgagttgctgcacccatcaacctgtcacctacattagctattttctcctaatgttatccctcccccagccccaaacccccccaacaggccccagtgtgtgatgttctcctccctgtgtccatgtgttctgattgttcaactcccacttatgagtgagaacatgcggtgtttggttttctgttcttgtgttagtttgctgagaattagggtttccagcttcatccatgtccctgcaaaggacatgagcttatccttctttatggctgcatagtattccatggtatatatgtgccacatttgcttaatccagtctatcgctgatggacatttaggttggttccaagtcgttgctattgtgaaccgtgccacaataaacattcgtgtgcatgtatctttattatagaatgatttataatcctttggggtatatacccagtaatgggattgccgggtcaaatggtatttctagttctagatccttgaggaatcaccacactgtcttccacaatggttgaactaatttacactcccaccaacagtataaaagcattcctgtttttccacaacctcttcagcatctgttgcttcctggcctttttttttttttttttttttttttttttgagacggagtctcattctgttgcccaggctggagtgcagtggcgtgatctcggctcactgcaagttctgcctcccgggttcacgccattctcctgcctcagcctcccgagtagctgggactacaggcacccaccaccactcctggctaatttttttttgtatttttttttagtagagacggggtttcaccatgttagccaggatggtctcaatctcctgacctcgtgatccgcccacctcaacctcccaaagtgctgggattacaggcgtgagtttaatgatcgccattctaacaggtgtgagatggtatctcattgtggttttgatttgcatttctctaatgaccagtgatgatgagcatttttcaagtctgttggctacataaatgtctccttttgagaagtgtctgttcatatcctttgcccattttttgatggggtttgcttttttcttgtaaatttgtttaagttctttgtagattctggatattagccctttgtcagatggatagattgcaaaaattttctcccattctgtaggttgcctgttcactctgatgaaatctacttctttaaaaacaattttgaaatacacagttgtaatttaaaattagactctgtttttgcctttttttttttttataactttttcccttgtctactttaagactagaagcagttataatgaaaattcatgaggaaacaggagtttaaagagggtctttattcagtgggggccaatagactctgagtatttcgttctcagactaaaaaaaaaaaaaaaaagttgattccccaaacagtcaaatgtgaggattcactcaaatgtgatgactaagcttattgataaacctccattgtatatctcttaaaacatttgcccaattttttttcagctgaactttgatgattggcctatcactgagtattcttggtgttgaactatttatgaatacgttggattactctaatttataatcatagtcacaagaaaatattttattagagttcaaatcacttgcagagtttattctgaataattcctgacataatgcatatcttgctggtttcacattcagtgaaatgctgagccatatctcaattctgtagtctccataatatctgcctttatattttaggtatgtttgggttccattttaatatagtctcataccaacagctgtgtttttataattgaggtcctgttagcctaaaaggcatttttcttggagaagaaattttgtcttcattgataatccagttttgttatactggagctacatcctcaggttctataatacccatccttcagtttgactccaagtcatccttacctcctggcgttcatgcccttgtgtagtcctctcccgcaccctgtcaggattggtctgtatgaaccgtacaagaaggcagaagtgatggcgccggcttctgaagctacatcacaaaagatactgatgcaactgccttgcactcctgaatcacttgccctggtgagagccagcctccgtgttgtaatgacactcaagcagcccggtggagaggaacagaggcctcttgccactagctgcaccaccttgccagccatgtaagtggaagcaaaggactgaatcctggttgacatcttgactaccacctcataagagaccctggcaccagaactgtttagctaagctgcttttgagttcttgacccacacaaactgtgtgagataatcagtattcactgttttcttaagctgctaagtttcgaagtaactcattaatacaacaatgaacaatgattacagatattttatatttttagtattaaggtgatctaccatagtctgatttttcccctctaaatccacagtttggttttctctgttagagtaataaatgctattttaaattgttttattcatattatcaccatggtaattatcagggttgggtaacattggagcttttgttggtgtttattacctatataactcatatttgtctgctgacagcctgtaagctgggaaaagagttacaaatgtatgtaaaacatgatgtgtcatatagccttttatagatttatttcctatgtaaaaaactgctctaactagtgccacattctccagtagaaatacaatgtgagccacacgtataattttgaattttctaatagtctcattaaaaaaactaaaaggaaacattaattttaataatgttttctttaatcaaatatatccaaaatattatttcaacatataatcaatatgaaaattattaaagaagtgttgtacctcctttttttaagactaagtttttgaaatttaggtgtgtttatagcacatctcagtttggactagccacgtttaatcacccagtagctagttgttgctagtggcttctgcattggacagtacaaatagtatattagctaaagaagaatattttcttctaagctagcggcagattaagaatgcctataaacaacaggtatgattttctcaaattaagtgtggcatgtcctatcttaatctctagctacatttagttccagtaagtcaacttcctaatttccagatgcttcagatccttcaaacctaaggaatatagggataggaggaattagggatagtacatagtatatgtagatttcttcagcattacagactcagaatggctcttactgtctcatagtttatcatgaaggttggtgaatatggactttttgaaggagaaaatgtactttagcatgtaaagcatgtattccaagcctcaggctacacatggtagaatcactcttacacttgggccaccaggaagcactttccaggggttttagcacatccccttacttcatcgatgtggtcctcagagcagaagtatgtgaagtctgttgcatttcatgattctcaagtctaatatgacatcttattggctcactcactttcaaggaagctggtgacaactgtcacttcttcaactcaaagtctggcattgacagattagagatttttaaatcttcagaatcttcaggatttatggaagaacttactgtgataatattgtcccttttaaaaaatgttgttatttagaacatcccatggttatcaaaagacttgaaaggaatttcttatcataattctgacccacttctgtaaaatattgccgtgaagaaattcataggacttttgaataaaaagctgaagagcacaatgatgtataatccatacatgttttgttctctttacctttcttttttctgatcatgagcactgcctgaagatgtgtttgcctggtctgcttttctcttttcacagtaaacagttaacttacatatttagatatcagttatctaaacaatgacacttgtaactatttccagaaggtctttagatccctattgatttcttcatagtgcaagatactcttttaacatatttttcaattttcttttgattttatatcagaactatgtattttatattatttacacaaataatacttacatgtcttagaataatagtcacttctcttattcttttctaactctgattcctcttcctctgagatgaccactttcatctcttttggttgtttctactgttgtttatttttatctttccaaatgacattcttatattattgttgtattatttttcttatttgggcgttgtctgttgacatcttatcatagatgatgaggaattagtgtttttacacaaaccaacacacacacttacttctttctgtccttccaatataattatatctaggtctacatttttaaaactgaggcacgtagtatattatgatttacattttggtctttcctagggtaccttagttttcctttttgtttttcctgtcttgggtatctctttctttctttctttttttttttttttttttttgagacggagtctcactctgttacccaggctggagtgcaatggcatgatcttggctcactgcaacctccacctcctggttcaagtgattctcctgcctcaacctcctgagtagctgggattacaggcgcccgccacaacgcccagctaatttttttgtattttcagtagagacggggtttcaccatgttggtcaggctggtctcaaactcctgacctcgtgatccacccgccttggcctcccaaagtgctgggattgcaggcgtgagccaccacgccctgctttcttgggtatctattcccagattcctttctacacccataaaattcctcctgatatcattgctactataaaaacacatcatcccttactaattgcccttggataatccatacatctgctgtttttcttggaaacattcatttcctttctctgctgtagtgtgtagttagtctctaggttgtgtcatgcttgtggttcccttcaccactcacctatggtagagctcttttttctggatcccacatcttctttccaggtttacctcttcattttcatagagtataccgtagtagcttcctgagagagtcgttgagtgagatacttttttggggggattttgcattcaactcccatatttgattggtagtttagatacagaattctagattggtaatcatttgttttcccttagagttttgaaaccattactcaaattgtcttctactttcctgtgttgcctttaaaaactccagtgtcttctgatttgttgatctgacaagtgatcatttttggcctttctaaaagttttcaagatgttttctttcctctagtgttctaaactttacagaaagagtattcatattatcatctaagcaccaaatgatggatttaatctttttgcaagagcgaggacaagaaagagtgattataaatattacctagcagtgctgttgatactctggtatttgtaggactcaagggctttcctgtttatttcttacagtggctcaacattttattaaattaaataggagattcaagctgtggttcaacacaagagaaacttcttggtttattttagcagagctctcaaaattccaaaactaaaactagtgccagattttacccactcgatagattaagtaattctggactttgtaaatgaaggtgagagagatatttgccgtcttctttctcttgtattttactatcctagtttgatacagttgcgttagagcaaatgcttccatacttagctttacatcgaaatgttatgtgacttataatatcacgtaaatattacttatcagccatttccttttatttgtagtttcacttggcttttgtttttcatccttattatcgagaaagattttgaaccaggctttgtcattaattccagaaatcttttttaaataaggctgtgaacactgagctcatggagtacactctggtttcactgccggcttcaggtaaagtcatgacatgagttttataatgaaacactatgaaacttgattctctgcattgtgacagattactaatcattttctccctaaaagttttttattgatacagccacaaagctatttttgccccacgcagatgtacaagtgaagttgtttgcttgaaatagattcctgggaagttatttggaattaactgtttgagcctcaattttagataatagaagcctctcaggagacttgcaaaaaacagtttaagagtgggataggatagaccgcacaaagacataatactgagttttccgtaagttgctaatgagaaacgttatcaactttatgtattaataatgtttctttatgcttctttatacttacagcaatctgtattttagaatcccacattactccaaaatagtcattctcattcattagagggtttgagaagactgaactaatcattgcatccatctcttagttcgtaatccttcttttatgtttagttttctttgattctgaagaaaccaccttggcctttgttttgacgggcatcgttccttgtctctgcgcgcggcgtccctttaaaaccctccactgtactgtgctgctcatggcaagtcaacagagggaaggaagagctcaacaaacaacgtttgttttcttttgttttgttttgttttgttttgtttgatacagataaactgccctacataaaacagaacctcacttatgggaatagatcacagtattttataactgtggagaaacacagttctctgagaagaatgaaaacttgtaacatgaacatcacgtacagcaccaaaatgtgaatttttttctaaatctcattttttaaaatttagaaaaacgagagaggaaaagatttatcaactgttcattaagaagaatgttaaataatagatgctgttcttccaaagtggggagaaaaatctgacttaactttgacagatttcaagttctagatttttgaaggtacagttgtcaaaaaggacttacaaaagtgggctgtggtataattgagtttcttagataaaataaaaaattcttggatatcttttcctgatatgagtactctgaaaattggagaatggtttagcaaatcttgctcttttgttttatgtatttttaaaaggaagcactttattcttaatcctctagtttcataagaagttaaagaaggaagtgcctataataacctgatgactgcagttctccatcccacttgaactcttcttcatgttgtcttcttaagatctctcctatcttacatgaactcagcgttctgtagggttttgtttgactttctgatagatcaacattcacctctccggaagctgtgttttaaacttgtgtagaacatcagggctgggaattgcttagttggctgataaaattgctcattcttagccagaccggtcacttatatccagttgtcatttttggttttctcctatgagattatgagaaaaccatacattcttgaaatactaggatgcatcacttgcttttcaatgtcttttaagaaatcgtttgctgacaattgtctatgaagaatatcatctgaaagatgatgctgcttactgcactttttcatgtaggcttaactgcagggaaagagtgttttgatattcggtcgaattactatctcatcaaagctggctttatgcttagagagtagttcaaaaacaactttgtgcttttaagtaatcaagcccttgccacctctgctgtctaacacagttttgttctctctgttacagagagcaaatttctcacatttgtcttgcttaactaacttgagcctttgctgttaatgatatacttcttcagcctccttctttcctttccttgctttctttattgtgtcctctgtgacgatatcttgttgacctggatttgcttctgatggaaagaacatttaataagcaaacagccctttcttaataaataggctctccctgggttaagtaattaatccacttcacctagtcttccatcattttctaggacagtctccgtaagaaggatgacaggattgaagagctggaagaagcactaagagaaagtgtacagataactgcagagcgggaaatggtgctagcacaagaggaatcagccaggaccaatgctgaaaaacaggtctgctattttatacagttccaagcaatgctgctggttaaccaaaaggtaacacacaaccagtatagtttaggtaaactatacatattgtatgtttatagggtttcaaaaacacttcatagaggagaagtcccaaggagttccttcatagcggtattagatacaaggatgtggtttcttttgtgtcaagtatagaaagaaagaccaactttattagcaaagctgagagagaattgatgaacattttgcagaatgagtgcctttcagtgccctgttcctagataaatgccttgtctactctttcttaaataagaattgaaataaagttgtatgagaattgactcatgttaacacagaagtccctgcattaataacttaggtctgatcccatatatatttatgtagcatgtgctaatgtattggacgagatgaaatggagcttgtctgtctgctacaagactgggcacaaccctggcttttaaacggaaagaaaaaacatgaacgtttctcttttttttcttttattattattaatttttttgagacaaaatcttgctcttgtcccccaggctggagtgcgatggtgtgatctcagctcactgcaacctctgcctcccgggttcaagtgattctcctgcctcaacctcccgagtagctgggattacaggtgcctgccagcacgcccagctaatttttgtatttttagtaaagttggggtttcaccatgttggccaggctggtctcgaactcctgacctcaggtgatccacctgccccggcttcccaaagtgctgggattacaggcgtgagccactgtgcccggccaaaaaaaaaaagatacaaacatttctgactgaaaaacgttaatttcaaatagctaatattttattcatttcataccctgcctcattgaagagaagagttaaggttgtaacaagttaaggttaacagtgagtatgaaggacatagaaaccatgcacttgagtcccagataagcagcctcggagggacttgctgaagagttctgctgtggcagtttgtgatgcttgttttacatatatcctgcatcttttaagatctccagactcttgcttttgacttttcattaggaagaataactacagatgggaaaagtgaatggaagaaatagttttaacaagtgaaggttataatcccagctcccattatgagaatgtgatttaagatttcaaacctaggccgagcgcggtggttcacgcctgtaatcccagcactttgggaggccgaggcgggcggatcacttgaggtcaggagatcgagaccatcctggctaacacggtgaaaccccgtctctactaaaaatacaaaaaattagctgggcgtggtggcgggcgcctgtagtcccagctactcgggaggctgaggcaggagaatggcgtgaacctgggaggcggagcttgcagtgagccgagatcgcaccactgcactccagcctgggcgacagagcgagactctgtctcaaacaaaaaaaaaaagatttcaaatctatctgacacagaggttcataacacttaattttgcagtagttgtttcctttccatttctttgtgggagaaatataaatgttaaacaggaaaaaaatactcaatgagagggtggcaggaatctttctaggaaccccttggtcagaccaaggtgttattttgagttaaggtagctatagtaaagaagggtatgtttccaaggcagacatagtatgtgccccagggagtcccttcatagctgtgtgagatagaaagatatggtttcttttgtgtcaagtatagaaaaaaagaccaacctcattggcaaagctgagagagaatgaactttttgcagaatgagtgcctttcagtgccctgttcctagataaataccttgtctactctttcttcaaatacattcctaatgcacagtcacatagagcttggttagtggagagcttcagagaagggatggtgacagccattgtgtcacccaagggtggagagtaatttcctttaatcttgattttaccctttttatattctctcctttatttttcaaagaaagatttttcttctgctttggcctcattatttattgacaagtattaaacatcagagatcatgcagagattttggcaattaataatcatgtcattatgggatacagacttctgttatgtattttcctttttgaggctattgtgtgaactgattataatatgctttaggggtatgttttatttatggttaatagacttcgcagtttttaggtttgcagaaaaattgagcagaaagtgcaaagagcttccatttacgcctttctctgcctcagtttcccctattattaacatgttgcgccagtgtagtatttgttaaaattaatgaaccagttttaatacattgttattaactgtgtggtccatagttgagggttcacttttcgtgacgcacagtcccgtgagttttgccaaatgtataatgacatgcatctgccattacagtattatacagagtagttgcactgcccttaaagtatcatgccccaccgatttattccttccccgtctccccagtccgtgatctttttactgcctctgtagttttgccgttttctttattggtagttggagtcatatagtatgtagcatgttcagattggcttctttcactcagcatctgcatttaaggttcttctttttgtggcttgatagctcatttctctttatctctgaatgatattccattgtatggatatgccgcagtttgttcattccttcagctgttgaaggacgtcttggtaccattcagtttttggcacttaggaacaaagctgctgtaaacattcacatgcagactttggtgtggatataagttttcagctcatttgggtaaataactgtgagtgtgattgctggattctgtggtaagatcatatggtaggagttttggaaaaagctgccaaacagtctcccaaagtggctgtatgtattttgcttttaattgtatgcttttttccttttctgttttcttgtccacctttctgctactcactgcctatctgaagctgttgcgtgaaatattgcatgagaccagttatttgaactttaagtggttcaaggtatgaagaaattgcttttatgtttatacttctgaagccttacaaccttcatctactgtcctctcctctcccattttttattattatttttatcgtttcctgtctttttttttttttttttttttttttttttttgagatggagtcttgctctgtcgcccgggctggagtgtaatggcatgatctcagctcactgcaacctctgcctccagggttcaagccattctcctgcctcagcctcccaagtagctggggctacaagcatgtgccaccacgcccagctaatttttgtatttttagtagagacggggtttcaccatgttggccaggctggtctcgaactcctgacctcaagtgatccgcccgcctcggcctctgaaagtgctgggattacaggtgtaagtcaccgtgcctggcccatcttttcctgtcttttagctctactattaattttacttatgtacgttaattatatgtactgagataatctacaaatgttcttttgaaatgccttaaatgaggcttttttgtttaggaacattatctttctcagattcaaaagttacctgtttctcacttaaatttagcttctgggaaagaatgactttttctgataaaggtaggatatctacatctcttaattcctccaagagcaaagtaaaattgtatgggagccatagctcttattaaaataagatgtagaaccttccaaagttcgagcaaggaagaactcccataagaaaacatctcttgatgccttttctttattctcacgggatccccttacagtttatttattcctaatacatgctgccccacgctgagcccatgctagaaatttagagaagttgtgtaatgacctaatgaaggaaggtgccccctaacctgtgtgagcaaattggaagatggaagtgaatgatccccacaggggagaacccaacagctcctttacttttgctttgtccctttccacgtggggattctatttctggaagctttctctgtttaacttttggtgggttttgtgctttattgaatgtgagtgtcacttttcttaaacaaggtctcctaaacaagtctcagaattgccaggggctaaggagcagtatgcttagttcagctatgatgttatgaaatttaaatttttgaattttaacattttaaaagagtgatttaaatatcttcactgggccgggatacagtggctcatgcctgtgatcccagcactttgggaggcagacgctggaggattgcttgaagccaagagttagagaccaacctgtacgacaatgcgaggcctcgtctctacaagaaaataaaaattaattagccgggcatgagggggtatgcctatattcccagctacttgagggactgaggtgagaggatcacctgagcctaggagtttgaggctgcagtgagccatgattgtaccactgcatcccagtctgggcaacagagtgagaccctgtctttaaaaataataataataacaacatatttgcacatatgaatttggttgttcttttaaaagccccatttttaacagtgatattcagtgataaacagtaatattttttcaaattgccattttgacattatttggcttataaagtataaattcttgatgttcaaggttataggattatatctgtggtttgctaggtaatgatacattaatgagcatttttaaggattacatatttttttgttgttgttaatgtataaagttcttcattggctgaaaatctcctctgtcatttatgcaacagttatcaccagaatacccaagttcattttcagaatgaacagttgccactacagaagcaaaactggtagaggggtatgtctgtagaagataatgtacactaatagaactataattgtattccttcgtctttcttattgccttttttacttttagcaatttattctttacttttataaacataattctttactggtctgaatattaagttatatttccctcattgtttattaaatggcagtgttgctctgaaaataaaattatactttcacttgtacctttttccctgctaacatttaaaaaaatcttgtgcttttccaaatgccacattaagcactgaaaatgaaaaggtaatagatacagcctctgtcttcaagaagcttgtagtttattgggaaagactgaaggatgaacttacaattatggttctgtttgacaactaccatggtagaggtcttaatacagagctttaggaacagaggaagaggggcaagcctgaaatccagatttgggaggtctgcagaaggcttcccggaggagattctatgtgtgaattaaaaaattagccaggtgtggtggcgggtacctgtagtcacagctactcgggaggctgaggcaggagaatggcgtgaatctgggaggcagagtttgcagtgagctgagatcgtgccactgcactccagcctgggcgacagagcgagactccatataaaaaagaaagaaagaaagaactaggcaaagaaatggaagatgttcaacatgttccatgtagagggagcagaagtgaaagctagaagcgtctaggaaaccaagttgtggttagtagctacagttgagtgtaaataggaatggcaagaactatgtaaagaagagaaaaagatgagagagtaagggagatcctttgtacaggtgtgcacagtcagatcatgctgaatgaagcatgttcaagcttatgttcaaggaagtagagaacctttgaacaaagaacaatagttattattagtttacttgctcatttattcattcaacagatctttataacttattcagtgggtgctgttgtagtcctggacaatacatactgataaacaaagtagctgtaatttcatgcctgagaccttacagttcagatagggacacagacactaacccaacagataacatttaattgctagttatgacaaaggaacaggttttcagaaatacacaataatttcttgaaagttggagggttagcagctattttagattaagtgctcagagagggtcctctgtgaaagcggctttgtcctgggccttgaaggctaagaagcttaccatgtgacaagtgggacagaagcagcaatcataatggtaataaggtggagaagagctgaacgtgtctaaggaagactaatatgactggcgggcaagaacagtgcaagctatgcagggccttttatataaggccattccataagaggaatggaagccattaaagagttttaaagagggcgtgacatcatctgattgatgtttttaaaagatcattctgggtgttgggtggaggatgaattagaggggggtaagattgaaagcgggaggatcagatggactattaaagtagcctaggctggatgtcttctaactgaggtatgcacacacctgaaagtgcatgaacactttcccaaaaggcacatgggcacaggctctcagcctctaaacatacgtatccctgaaattgatctgctcaaaaggcacctaaggtgtgcagattctcctttttcattttccccttcacggttctgcacccctcacttgacaactctcctgactcttactatcctctattcctcagaggtgaaaaaactttggaatgttaacaaagggacaattcagcatattggtgttaagataatggatgagtccgtcaggttgttttcaacagaattgaaataaaacctaattaagttgccagttggtagattatgataaataattttcgatgacacgttactatctggtttggggtatgtaattctgaaggaatgcaaagagttgagttatattgctacaacaaaactccttccattcctatccatttatatgatgaaggtttcttagtgcttacatctatagaagtgaaacataccgatagaattgatgctgaacccttatcttcctttttttttgagatggagtctcacttcttcacccacactggagtgcagcggtgggatcttggctcactgcaacctccacctcccgggttcaagcgattcttgggcctcagcctcccaagtagctgggactaaaggtgcccaccaccacgcctggctaatttttttgcatttttattagagacgaggtttcgtcatgttggccaggctggtctcaatcctgacctcaggtgacccacccgcctctgcctcccaaagtgctgggattacaggcgtgagccactgtgcccggtctgaacctttatctttctattaatagtaatattaacaaggggtatctaaactaataaaagtataaaagtcccattaatctcattaagataatatgtttaataagatacattttaattaaaatgtattcatgtttaataataattttcttataatatttaatatatctattggttttgattgatactatataactagtgattctaatcataactcagtgcacaagaattcttaagggttatgaccacaggaaaatattaaaatatcaaatttaaatttatataaatatttttattgagaaaagtacaagacaggatctgtgcaagccatctagcacaaagtaaattacattagtataaaattctaaggagaagtagaatggaaacaaggtcaaagagaaaaaggaaaatgtaaataataatttgtccttaacggtttttgaatagatgatgatggatatcaagtatggtatttgtattttattggatacttccttttctttaaaaaagtgatgcttttttaaaaaacagtctttaatacccaagaaattagatctttgcaactctttaaattttcgacgtaaaacatttatatatcaagttaaaatcattctgtctcagtatgtttgtgagcagaaaaaaagaagtataaaaagatacattttaaaaatcatagttgtataaactcttttaggaggtatagaagcaaaaatgtgtagagagacttttggtctatgcaagaggttgggcagatcaggcaatagctgaagagattccacagtgacagtggagataaagagaaatagatagatttaaaacgtcttttggaaatagagctaaaaggatttggtgaattacatgtatggataaaggatagaagagaaaacaaagatggccattggatttctggttggccaactgggagaatagtggtataattttttgagatgagaaagcctgagggaaaaatttgaggataagaagcaagacatggtattaaagaaatgttagctacattatcgtcagttttagaattgttatcagatatttttattattgatttagagatgagttctcgatatgttgttcaggctggactgtagtagctatttacaggcatgattatagcacactatggcctcgaactcctgggctcaagctacctttccacatagctggcactgtatgcgtgcacaatttatatttttagcccagttttctcttctgagatccaaagttatgaaatagacaacaacccatttcatatctttacaccaatatttccttgatatctcaaccagaaactaagttcaatcttttgattctcaccttccaaccagtttttcccccaggcttgctcatctcatctgagaggacttctttgtaatcttacaaagctgaaagtaggcttactgaatgtgagggaagtcgagtctgagagaggcagaagtgataggttaggtacagaaatttttacactgtggctttccagttcaaaaggtcgttccagaaccttagggaagctgtattccataatggcgaagaaggtggactctggagttagaaaccttggttggaattaggctcccatcacttagaaattatgaccttgggcaagttacttgtgggtcagttccccgagctgtaaaagaaatagttactacatctgccacattaaagagatggtatctgtataaagcacctttaacagattctgacacgtggtaaagccatagtaaacatctaccactattggtacttctgttgtcaccaccactgccctctgtggttccaaggggaggcactgctctcactggttggctgaaggccccagagaaatgtcgtatttatagaccctgtctggttgattcagcaccagcagtgacaaacttactgttaaattctaatttacatatgtcaagtgttaatactgtgactcaaggaaattcttgtcctctccccaatctggtctcatattctagaagttgtagatttgcatcaactgagaataacacagtcacctaatatgttgatcagatggacattattcttatcaccagattatttattctctgagagtctgtcttagatcaatacaggttcttaatctgtacattatttcctattttacatccatggtcttctcataaaaagagtttgagtaggccgggcgctgtggcttatacctgtaatcccagcactttgggaggctgaggcaggtggatgacgaggtcaagagttcaagaccagcctggccaagatggtgaagccccatctctactaaaaatacaaaaattagctgggcgcagtgctaggtgcccataatcccagctacttgggaggctgaagcaggagaattgcttgaacccgggcagcagaggttgcagtgagctgagatcatgccactgcactctagcctcagtgatagagtgagactccgtctaaaaaaaaaaaaaaaaaaaaaaaaaaccttgagtagctttagtaaactgctagaaatatatgctataaaatccagttctaatgctgtctttcagttttactaagccagatgttctatagtttccagaaggaagggagggaggggaaaaatactttcttagcattatttgaaactaagcattggttttagaacgttatccttagatgttattcctagaagcaggaagatacggaaattttaaaaccgtaaaaatattttaagggtttagtctttgtaatcttaaattggaatttgaaacatttgtttaaatttatgacttttttctcttaaacagtcacacatgcatttcctatgtactgcaaatacctagaaaacaaatcatcttcttagtagcaatgctcactcgtagtggtcagatacggtttctaaatactattcaatattagaaggacttgaaatctaaacaaaagttacttttttggcataaagtgaatattataagtatacatttttcttcacaagtgcttattggcttctgaaacctctgtagtctttatagcagcactgtcaaatagaacttgctaaaacagtggtaatgttttatgtctgttctaccaagatggtagcctctagccacgtttctgttgaacacttaaaatttggctagagcacctgaaaaactgatattttgcttttatttaattttaagtaaattttaatggccatatctgcctagtggctactatattggacagttcaactctatagtatgttggacagatgggtgggtggatggatggatggatggtcggtcagtcagatggacagacagatagatacatggatatctatctatctacatatacatagttagtagatactagttagtttttcctcctaagcctgacagagttgtgacactaggatattcaaatacaagcattttctgatatagttggtcattttttaaatttttgtttttggaaaaacatttgtgacataaaaccatgtttgtcaaaagtaatttttcctttaagaaataatggtggaagactagatcactttcaagggatattataattgcatgtgagtgttttcttccacattcgtgtggtagcatcatgtagatgcttaaagttatgacgtgagtgatggaattagtggaggaaaaaggagtggaatagttacagaaatgagagtcatctacattagatgtccatagtgagaacatgccaccccagcattgttaaaagtttatgtatcatccattcatttcgctgttcattcattgtttatctagatcctcctatgtgctagaaactgagaatactttactgaaccaaatgagtatggtccttttcctcatggagcttatatgttagtaggggagattgatcacagaaataaacatatactttaaaatttgatccatgcaaataaaaaaagtatagtattttataaaagtgtgtaacaggggaccttatttagagtgaatggtcagggaaagcatctcgtctattttattttattttattttatttatttatttatttatttatttattgagacagagtcttgctctgttgcccaggctggagtgcagtggtgcggtcttggcttgctgcaacctccatctcccaggttcaagcaattcttctgcttcagcctcccaggtagctgggattacaggcatgcatcaccacacccggctaatgtttgtatttttagtagagatgggattccagcatgtttttcaggctggtctcgaacttctgaacttgtgatccgcacaccttgacctcccaaggtgctaggattacaggcatgagccaccgtgcctagctggagggcatctcttaacacattgatacttaaattgagaaatgaaaatgaaaagtaagtaggaattagtgaaattaagaatggcaggtagtttacttcagcaggaaccacgtgtgtggagaccctaatgatggaaatagtttggcatagttcggaaatcaaaagaaaaccagagttcgtggagtgtactaagtcaaagtgagccggtagctctatggatagtaggtgagtgattgaataaatgagtgaatgaatggatggtgtggcatgaaactggagaggtaggcagaaaccagaatatataggatagtcatgttaatgattttaggttttatctcaaccacagtggttatcttttaagtaattttaagcagaagagcggtaagacttatttcctgttttaaaaagagtattccaggctgggcacagtggctcatacctgtaatgccagcactttgggaggctgaggcaggtcgatcacctgaggtcaggagtttgagaccagcctggccaacatggtgaaaccttgtctctactaaaaataccaaatttagctgggcgtggtggtgcacgcctgtagtcccagctactcaggaggctgaggcaggagaatcacttgagcccaggaggcagaggttgcagtgagtccagattgcgccatctcaaaaatagagtattccagcaattatatgaagaataaataggagagtaagggtagaaagggctgaggacatgttaggaaaacatataatccaaggacatgtagggtgatggcaaaggagatggagaggtctatttggagataaactcagcaagatttgctggtcaattgcatgttgatgatgagggagaggagagggaagtggcaaggttgatttctacgcttcttatcacgaggatctttaagtggatggttgtcttattccatttagtgttgctataaaggaattacctaaggctgggtaatttataaagaaaaggagtttatttggccatggttctacaaactgtacaaggagcatgatgcccgcatctgcttctggtgagggtctcaggcttccacttgtgtcagaaggcagagtaccttttattcttaatacaaactacaattcttgtagatttactgacacttactgattacctactgtctgccagtcactctggtacattctttctttataatattattcagttgttaaacaacagattctcagatatatgtaatgttttctaggtcgaaaacaagtgccagttcttgttgggtcctttttcagaagagtaaagaagggcttacatgtcttaaactacatgttccttctgagtgaagcaatctcttcaaccttaccttattcccttgtctggaaaaatcctacttcttccataaaaccttttctgaccttccaagtctgagttacatgtctctctcatgtttttgtttttctttttctttttctttttttttttttgagatggagtctctctctgttgcccaggctggagtgcagtggcgtgatctcggctcactgcaacctccgcctcccaggttcaagcaattatccctgcctcagcctcccaagtagctgggattacaggcgcccgccaccatgcccagctaattttttgttatttttagtagagacggggtttcgctatgttgaccaggctggtctcgaactcctgacctcaggtgatctgcccacctcagcctcccaaatgctgggattactggcgtgagccactgtgcccagcctctcatgtttttcaactgcacttgtacttagtcctgttttttttttttaataacactgcattattattacgtatttactacctattgctttaagagactgtctccattttgtctcctagaatgaaagctccttgagggcaggagctgtgtcttatttactgttgtatcctcagcgtctaccattgcacctggtacacaatggcattcaatgaatatttactaagtaattaaattatgagcgaataaatgaaattttgtcctgacttaatgtttgcagcatcactgtacttactaaacaatttaggatttaatggtaattttatcatatttttatacttatctaaacagtgttttgaaatgttttctttgttgcaattgcgtttccactggatttgataaactactttttcatctgaacagaagaacttaaaggtgtcagaattgtagatttaaagaattagaatagatatttatgtgaaagttatttacatttttgtgcttgattttaaagaatggtagccagagtggaaaaatacaatttagaaatcattattatccctgacctgtccttcagtggcaaaacagagggcttatatgtctcaaaaagtgaatgtgcaaaattgtaggcccactgttgttgacctcttagctagtgggaactagctgaaagtcttatgtagcagtgagccttccactcggaagtaccaggccaccatgtttatgaaaacatgtaataattcaaaacattctgcagagcaggtataaactgattagaatcatttgaaaatctttttgatcctactttatttccttttagtgggactgatgcttctgatcatcactggtaaatttgacattaggtttttcaagatttgcctcatctttcccggacttggaaataggttcataatattattaagactgattcatttcatatagtgctgtaatgggttacatttaatagtttacagaaatctcttcttaacatatcctaaattcattttctttgcttgctcttataagtcttaactgatttctgtgagacattcttgaaatgagtagctaagcagtccaaaagtgttacagatacaaacgttattcagaactatgtagaatcattctgtcttacaaaaaaaatagagtgttacgttggtaacataaacggtgcttgtaaagcagtttactggtttctgcagaagttcatcatgtttggtcaatgcacagattgtagatactgttgttcaaagatacttcatttttaaaatgtaagatgttattatggaacatgatattgataagcatatagaaagtatatttttaatgtttcaggtacctaagagatatgacagttcacgatcatcttctctttgccgttgtgtaatcagttcagtctttcaatcaaattctgtcaagaggaacctcgtaggtttcactgtagactctcgctctgctgtcaaggagtttgaatcccctttgttatggtggctggttatgaaatcagtcacttgacagaccctgaagtgagactgctggaaatacgtcatgtctgccttcatggtgacagctggttacaaaacaaaccccaccacagccattctgcaattgacaagggacttcaaaagccaacagggctgccacttcaaagagaattctgccatctctggcttgttgaaagaagttgttaaatggctgtaccctgccctaccagaaatctccatgtttagacttctccttcttttgatctttgaaagatgtatgaaatgacttaagttagaggaatgataaagtctctagtaatggcaacccagcactctgcattttgatccatttattaatggaaattacccagatatgttctaatgacaggaggtttaaaaactcaatgtctcagagaatgaatgtccaaaaaaagagttgaaatttcatagtattgttgtagccaccttaaaaaatctggaaatagtagggaagaaaatgaaactcagtgtgtttttaaaaccttccatttcttcgtgtaatttttagcccttttaatggaatcagattctgaatattgatagattagaaaacaacacaaatctttaatcataagattaaatttcatggttaaaacggacatttctccacttttagtaactctgtacttaaagtttgaagctaccttgtactatatttaaagttatattcatccctttctgctgaatacaattttaaaataattaccttgtgtttatcttaaacaataaaaaaagccttagagttttaatagaacccttaataaaaggtcagagtgctaacaatcaagggaaaaggcagcaacatgaactctttcttttagaatacggatagccctaaaagatggagtaatgtttagtatacttgaaaaagaaagcagaaaactttataaataatataacagtaaaaaaaaagtggagattttatactcaacatgaacttggagtgtaaattagttggaatttaaaatccttctaagtgaatggcatgaccttttcctaattgtatgttttctctctcatcctatgtgtataggaagataaagctaaagatctttagattcatttgccctgatctcctattttcttatttctcttaaaatatctctttacataaaatttttagaaatcgagttgacagaagctttaacgactgtaacttcctctataattttaccagatggggtcagtagataactactaaagaaattctgaagcagaactgaagcccccaggaaataaccccatgacatagtatgaccaaaaaattctctagaaacatgagtagtcgctcttcaagtaatgcatttggatttgtctttttttgttgttgttatcttagtttcttcctctagaaaaacctccagaaaatttttttgacaaagtagtacatgatattactgtcctggaagtccaggaaatatctatgcctttaaatttaggctcgagttttcattttattcagcaaaaggactgtatctgtgttttcaaaagttagagcgatgtgaaaaaattaagtccagtggaaacaaacctttggcacatccaaaattaaaccccagaaatgactgccagaagtctatggatactggttttcaaagcagacttttttttttttttaattttattttattttatttatttatttttttttgagacggagtctcgctctgtcgcccaggccggactgcggactgcagtggtgcaatctcggctcactgcaacctccgcgtcccgggttcaagcaattcttctgcctcagcttcccaagtagctgggactacaggcgtgcgccaccatgcccagctaatttttgtatttttagtaaagacgaggtttcaccatgttggccaggctggtctcgaactcctgacctcatgatccaccctcctcagcctcccaaagtcctgggatgacagatgtgagccaccgtgcccgaccagacatgtttttataccctatactctatctaaactgcagagcaacttctgtagcaggaagcactcttggagtctatgtggtggatctataccaagggatatatcgttcgcttgtaatgagttcttggggtgtttggctcttatttcttttctcctactgagaagtttgataaaccaagttattgatcatagaagcagtcatccaagatacggctgaaagtaaagccttgggagccagatggcttcccgctgatttttatatgcagtttatattctccttggctgtgtcttcctggatgtttcaatgaaagatatttttttctggagaaatgtgcacggtgggatttatcctattcaacagatagtttttgtgtgtgtcatgtcccaagccctatttggacattcaattgtcccttcctcttgtctctaccctctttaataaatgaataaagatgcattaaaattaatgtaaagtgcttcggattagaagtcaagtgacgtggattctaatccttgttctgtgtactaacagtgatttggcataagttttgtaatctctccaagtatctgtaatctcacctagatggaagaaattattatccccacaagtatccactcaccacctcacattgagataagtatttgcaagggttttagtcgcttacaaaggcagcatacaagtgttgagccttattatggccaaaatcacacacacacaccagacatgcgcaaacatacacgtatcatatatgcacatacatacacatattatacacgcacttacgtgatgtttatgagtttccctcttggtgtcctagggttaccagacataaaatcccatccttttacttttctcccttggctaatagtatacttttgataaggtcaagtaagtgtcattttatttgccaacattgtgtttctaacaactgtccagggttgtgttgaaataaattttctccacaaaatgtgtgtctaattaatgaaatgtcaactttatttatttctaggtggcagtttggtttttttcaccattgcaaatgagaagaattaaaatttccagttaaaatggcagtgaacttttatttttgttaaaaacttaaggaaagtgtttgagtctgttttactcacattatttcatttgatcttagaagaagggctgaatccctacatggtctgttttgtttgctgttttccgaataaaatgcaataaatattttctccatttgagatgatcagattatttaaactaagaaggaaatttctttccaaaacctggacaaattatatagccattcaacacttgctttattctattgtgttaactccctagcaaagcaaaaaaaaaatgccttttcagaagagaaattatcagagctcagagttctagggatggtctttgtcattccacctctattcatatttcatttcctaaattagacatttgtcacaaaccctaatgaaatattaagagctctcagacccagatgcagaagaaagcataaaatggtggttgccacatcttctttgttactactgctggaggaagaaaatgcaatctattacttagattatttctgtcctcccttcttccaggagcttatgtgtacccagtagatcattaattttttgtgttaattgattccattacaatctgttgctgaaataagcaaatcttgggagataaataatattttgctgtcaaagcatgatgtaggctgacttaaaaatagaaaaaatgaaataatattctgctgaaaagatagtttgttttcagggcattaattcaggtatttattttttagttttgatgctgtgctgtcaaagtcacctaaatagaattggcagtgatgaaacactggcccgtcttagcctctttctaacatcagtgacgcaagatactgagggtcatagcagcagggggatgtttgctttgaaaatgtgcatccacattttattgtgtcttatttttcaaaccctacttaggagtgatgagtgcttattacgggatttatcttcctaagccttctgagttgattttttttttaaataaaaggaaaattgagatggcttgaaaaagaagcatttctttcacactgatacgtttccactctcttttaaaaagagtgggaatgggaacactccccagagtgactcatgagataccattgtgggtgattttggtaaacactgatacatggtagcaaagcagcgctcagtgtgtacagcaggatggagtcggactactcagcttggaatcctagctttgctttctctgtatgacctcggacaaggcacttaaacccactaaccctgtttcttttgccataaaaatgaggataataatactttatacccaccatataggatcattttgaggctttaatgagacaatacatctaaagcacttagaacagtgtacttcaaagtagacaaataatgtaagtaattattattgcaataactatagttattccatagttataaaatactgtactgccggtatatatcttgtcaaagaattaccatgagttggcaaaaagaacgtattggaaaaaagagatttctagtgtaaatgatagcctaaagctctcttgggaaatgtaaattcaaattttcattagcaatagttgtgagatcctctaaaggaatttcctaggaaaggatgatagaatttatgtatgtaggtatatgtgtatatatgttttcactaatacttcaaaaatgctcctccactcaagagcttgttacctttttttcttcataattataaaacagtaggttttaatctggaactttgttctagtcagggaaaccagtggacttctcaagtgacaatctggcttgcatggtgactgctgaacctctggataatctttttgtaccactccctttttcttctaattgttttcttcttgtggagacttacgccttttactctcccaagagagtataacaagattttccatacgcatcttggaaactacaaaaagtgtttttctcctggttgtggaacagaagaaggtgggaaacttgaagaagcgggctttgccagcctctgaagccccctgttgtgctgctttcttaaggaaaataggtctgtggtaaagtcataatttgttcccttcttattctgagcaaaagtttattagcttgtgatttaagcaaaccatctggtcctgctggcactgcacactgtcaggccccgtgctttctgcttattatgttactgaaggcagttacatatttgagtcccagctctggcctgagcttttctgtgttttaaaacgtctgcttttgaaaattgtgctgtgacctggagtatatttttaaagtgtggataaattcttcattgtttagtataggatttatctcttcttttcttctactcatcggtctttaccctcgtttctctggctgtacccaatactgtacaactgctcagtggtaggcatgaaatggaaccaagtgattctagctggaagtgttctcctggattgtggaaacatagcagaaaatgaagtaattaaatttgactttgaaactgtttccctggcttagagccagagagcaaatcagatgattgattggaaataccaggaatgtatggtaccattcttgccttgaatactaaaatgctttagaacttacttggatatatgtataatctgaggcagaaatactttgagggtctcacactcaaatggatgggaaaattaagcaatctttaagaaaatgattttactaacagataaaaatctgaaaggtagagatttttaaattttttaacaatatgtaatagttgtacgtatttatggggtacatgtgatattttgatatatgtgtacaatgtgtaatgatcaaatctgggtaactggggtatccatcacttctaacatctattatttccttgtgttgcaacattccaaatcttctagctattttgaaattcacaataaatgatttaactatagtctccctactgtgctattgaacactacaacttactccttctatctaactgtatttttgtacccattaaccaacctcccttcatccccctctccctcctacccttcccagcctctggtaaccaccattctgttcactatctccatgaaatcaaatttcttctagctcccacgtgtgagtgagaacaagcaacatctgtctttccgtgcctggcttgtttcacttaacataatgttctccagttccattcatgttgctgcaaatgacaggatttcattctttttatggctgaatagtattcgtgtgtgtgtgtgtgtgtgtgtgtgtgtgtgtgtgtgtgtgtatacataccacattttatccattcatccactgatggacacttaggttgattccgtattttggctattgtgaacagtgccacagtaaacatgggagtgcaaatatctatttgatatactgatttcctttcttttggatatatacctagtagtgggattgctggatcatgagagagttctatttttagttgtttaaggaaacaccatactattttccatagttgctgtactaatttacattctcactaacagtgtatgagtgctctcccttctctgcatccttgccagcatttgttattttctgctttcttggtaatagccattttaactgggatgagatagtatctcattgtggggtttttttaggagtggtttgagggagagacagtgtcttgttctgttacccaggctggagcgcagtggtgtgatcatagctcactgcagctgcaaactcctgggctcaagcaaccctccagaatggccgagactacaggtgtgcactatcgtgcctggctaattttttgtagagatgaagtctcactctgtggcctaggctggcctcaaaccccttcctcctgccttggcctcctggaattacaggcatgagccaccactcccagcttcactgtggttttggtttgcgtttctttgatgattagtgatgtcaaacatttttcatataacttttggctttatttttatgtcttcttttgagaaatgtctatagagatcttttgctcatattttaatcgaatttttttttgtttgctttggaagtaagagttttgaatgaagggtaaaatgtgtccttaaacatgacagacttgatgctggggaagtaactttcacagaaacaattgaagatagtcaataaaattgcatttatatcttggcaaaaaggtaagaaattctcaggtcaggggatgaacaggtagggaattcaaaaataagtacttgataattattgaacattgggttttatatcttcataggataaaagaaaagatcaaggcagcccaagatagtcaagtgggaaaccaaatccctgtcactcttttataaaacaaatccacaaagcccaaaattcattctttgaaaacaccaagaaagtcagctggtctttggtgagactaaaagaaaaaagaaaaatggcacaatgaacaatatttattttagaatgatagagggttcacaactactagtcttgtaggtgctagaaagatataaagatatctttgccagcacatttgaaaatttagactaaatgaccaaatgccaggaaaaattgaacttagcaaagccagctaaatatgaaaaagaaaacctgagaaaaatgaggcagtaataaaaatttttcctacaaatttcaagcccagagatttatattggtaacttttggcaaatatacaaggagcaaataatttcaatcttacagacacaatttggaaatataaaagagagggaacaatcactcaacaacatatttaataaggttcacataactttatatcaaaactttacaagttaatacaggaaaagaaaagcttaggcctgtctcaatcctgaacatgtagaaaaattcctaaacataatcagaccaatccaaaattagtgtacacaaaaaagaaaaatgtgcatgagcaagttttattccaagagttcaaggttggcttaacagtagaaaactactgtaatcctggctaggcgtggttaattttttgtagagatggagtcccagcactttgggaggccaaggcaggtggatcacttgaagtcaggagttcaagaccagcctggccaacgtggcaaaaccccgtctctactaaaaacacaaaaattaaccagacgtggtggtgcatacctgtaatctcagctacttgggaagctgaggcaggagaattgcttgaactggggagatggaggttgcagtgagctgagatcactccactgcactccagcctgggcaacagggcaagactccatctcaaaaaaaaaaaaaaaaaagaaaactaattactataatccatcacagtaaaagatgatagaagaaaagttaagtgttcatctcaagaaatgcagaaaatttaacattcatttataattttcaaaaattcttaactacctagcaatacaagggaatttccttaacttaataaagggtatctattaaaaattacactacttgtagataaaacttataaaggattctttttaaagataggaataaaatagaatgcatgctatcaccatgtctgtacagcgttgtagtagtcattctagattatgcagcatggcaagtgaaagaagtgaatattataagaattacaagaaaagaaagaaaactaccatatttgtctatatagtaaacttcaaaatctgtcagtaagagcatttaagaagactgctagatacagattcaatttccgtaatctgcactgaacagaaaatttacattttttgtaaaaacgatactgtttactagaaaattaagcatataaagtacctaggaataaatattattaggatgtttaacattttaatgagaaaaattattaaactttatgaaagatattaaagttctaaaaatatatctagttcattacgtgttctagaacagtacctggcatatgataaaatctaaatatttttgcagaagttcaagaatagctaagatgctcttgaagagaacaagctgagacttattagatatcaagccttataaagtgataataattaagataatgaatgtagtattggtacaggactaggcaaaagagtggatcataatagaaagtgcagaaatatccatgcttgtgagtatacttgatatatatcaaaggttaagatagaatagatttttaaataaatggtactgcacattggctatccatatggggaaaaatgaaatcagacccctgcctcataccatatacaaaaatgaattccagatggattaaggactaaacatgaaaagcaatactttaaaactcttacaaagtttatcaatcagatattgtataacgaacaaccacaaaatatcagtagcatattgtgatggttaactttatatgttgacttgactggctacggggtgcccggatacttgctccgacagtattctgggtgtttctgtgagggtatttggggatgagactaacatttaagtcagcaaaattgagtatagtggattgccctccctgatgtgggtgggccttatccagtcagttaaaggcctgagtagaacaaaactctgatctttcccaagtgagagagaattccctctgcctgactgccttcgaactgggacattagcttttccttgcattcattcagactcagactgaaaccctggctcttcctgggtctggagcctgctcgccttcagactggagctataccattggctctcctggcttttcaagcctttggatttgggttggaactatgccactggctttcctgggtctccagcttgccagttcaccctatagatcttgtgattcatgagccagtttcttataataagtctttatttacacatatacactctgtttctctggagaattctgactaaggtacagacaataccaagcatttatttctcgttcacatacatggagggtgagcatggttggctctgagtttttttgcagaaattgacaagctgattctcaaattcacatggaaataaaaaggagccagaatagccaaaaacatcttgaaaaagacaacagctcagattttcatagagattatgttgaacctgtagatcagtatagattatggttcttatccattactgattttatgttataaaaacatagcttggtgtattatttgtacccagttttagataaaattttacatgaattaaactgataaaatggaatcaatggtatatgttcatgtaaagcttgcagatatgcaaatacatatcccagtatattacatagcaatatattctcttttttgtttgtttgtttgtttagtagagacagggttttgccatgttggccaggctagtctcgaactcctgacctcaggtgatccaccggccttggcctcccaaagtgctgagattacaggcacgagccacagcgcccggccgtaacaatatattcttatggcaactgggactgtgaggatgctgttagctgaagacatttaacttgctcacttctggaaggataaaaaaattcaggtgccaaaaaaactaaatgcatttgcttactatcattgtttaacagctgttaccaatcaacgtggaaactttgtttaggtaggaagcactaatttccaagggtcagtgaaacaactttgatttgtcatgctgatttttgactctaggtttctctgttttagtatcacacaaatggggtttatgtaggagtcaatgaatggcaaatgccccacctctacctgccctaccttctacttctgaaaagactggttattaccaagattatttcttggcaattaacaacctaacataaagtcttgtaattgatgcagttggctgtttgattacatttgcttctgaattaaaatgaacaagtttatttaaataattctgatttggtagccacctggaataagtggaaattactgataaagtacttaccttgctctcttagtttcttttccttatgttttagcattttgtctgtcttctctggtggctttttgtttgttgtttttcaggtctgttgctgtcaaggctttttttttttccccatgtcatttttaaagcattctgtctcctttctatctggtatgtacacacacacacacacacacacacacacacacacacacacacacacataactatataggtatatagggatatatttccttcctgcctatataatatatagtatatatataatatatatatatacactgcctatgtagtatataggtatatatatgcctgtatagttatataggtatatagggttatatttccttcctgccttccttaaaaaagaaaccctacctacctggatttagagcaagaaattgtctgattgaattctagcagtttctttaaaaagaaattcttcttaatgatgtaaataggaaaattttagtttagaggactaaaaattattcgtctatgtatacaggaaatctgttatttgccaagtttatgtcttttatttcctaaaatcgttctgtatatttttttatatttgtattgtattatttccatggaaatttctgggtcatttccaaagaacttccttaaaaggtattgtctgtggcagcgtgcgacttcttaaactgataacttgtatgcccttgcatgtattaagttctttctgacctaagctgaaaagaattatactgtagggatgttattatctgctatattgattcttgatatatacacacacataactgatccagaaagagtacagaattttcaatgtgttcctgcgtctcttcaattttctggacccaggagttgcgtgttacccaggtcctctgactctgattgatcaagacactctgttgttctctttcccatatttatgataggtggaggagttactgatggccatggagaaggtaaagcaggaactagaatccatgaaagcaaagctgtcctccacccagcagtctctggcagaaaaggaaactcacttgactaatcttcgggcagagagaaggaaacacttagaggaagttctggagatgaagtaagtgtttgtagtcttattcttcaagcatatgcttagtggaaatactttttctccctgcattcatcttctggctctgtgttttaccccaatacacttacttaattttagtgctaacttgtatttctcactctctagaataaatttggtcaaaggtggaacaaatcctgatcaaatagaaatatttttggttcctctttaatgatttttaaatcctctggcttatacatatctgtgtgtaattacctctctgaaattcctaaaatcttctggaaagttcaggcaaaatggcgagcttactggggaagagggctgttggttctgaggttgtatgaagactaggcaatttttaaacacattttttattgtaaacatttccaaaggtacacacaggtagagagaatgaacccccatatacctgtctccaagattcagtagttaccattttgccacactggaagccaatttttagaaaattgtcacttttagcagagctttgctatacacattttcctgcttcccccacattttgtaggttgctgagaccataatctgttgtgaagcatgtatacatctgctaatacatagtagatgtttcttttacttctcagtgaccttctgtttaaaacaaacatgtgtcttttgaaaatccagttgtaccctctcatttaccattcctaatccttccccttacctaaagaccctactgctattttactgaaaccaggtctatcctgggatccctcagttaccctcagttaccctcgttctgtgagcagttatctttatttttgttgtcttcttttctgtctcagagaataggtttttttctccttcataaggccagattcttctttctgtcacagatttcaagtccccgcctcagcagcctttcactgtcagttctttctcacgtgacccttgctcacttcttctctgcataaatgcacagtctgtctttggcctaaaataaaattttttcactccaactagtgctttaaactgacatcagtttacttttctgctactttgaactatcagtaaactttgaatacctgaataatagagctgtacagaatcttgccataataccttagcatgaattctcatgggacatgatgattgtgatattgtgactgcaacccaagaatgttgaggtgtcctctgtgctttcacgttcttgggctatagtgcaaggctacgagattctgtccttttagaaaagcattatgagtgatatgtcttggaagtaatgtgtaagtgaagccggaagtggattggcatagggggagaattaagagaggttagagttccgagtagcatcatcagaaaaaagcttgcaggtttaagtagagaaaggaaagtcctccctgtgactgttggcaatgacactagattcttcactctgtagtcactgcaggacccaccatattttaaaggtttaaattattcaattattgatcattgaacaagtgaaaagatttagtctacctagagaacttgagaggcagaaatatgaggggaatgaagtgtgcagggagactgaaacatgcgtatgtgtgactctggagctagaataagacagagtcttccctcaggaaaaggtagttggcccatttgcatagaaaattcttcagcaaagcactagaatagctttgttttctggaataatcctgacttcatcaagccaagagaaatgatttaatagctattttccattcctagcatatattaatgtaatttttgagcgtctgttacagataaatggtgaccgtaagtttggggagacgtaaaacggttcacttggtagcctgccagtggtgcattggaaacatttgcgttggttatagccagccctggagaggaggaacgttttaattggcagatcccacaatgggtcttctcttccttatgctgtggttttgttaaccattacttttttattccacttttatgttagcgtttttcccttaagaaagaaaggataaaagggagcaggggaaaaataataaaataacaactgtaataactgtaataaattttaagtatcagttgaggtcatgaggttcactgttaagaattctagatgaactagttcattcgacactgccctgcattcaaactcctcctgcaggcccaccctacattagcattcagaataaattttacaagtccattttttatttttaataaaatttttattaagctgtgaatttgactgccctgacaactggtttgttcagggaaggggtggcagagctctttggtttcattgagagtttagagctattcaataggtagcctcctatatgcaggcagttagttgtaagtcattcaaagaatgaaaccaacgagtagaagttaaatcactatactcattgggagcttaaaaaataaataaatatgatttaaaagatgatgtcaacacaggtgaaaaaggaaaaatattagaatctcctgaactgactagacagacatgtttagaagactggtcttctctggaaacaagtaaagctggcagagaaatccaaatatctctgtgttaaattatatactcatgagatgctttctggccaaaaaaaggtctcccacaaacagagaataaattttcatatgtacctaagaagagtccagtactaaattctgacatttaaaaaattattgactgttaggagagaaaagtagagtacaattgtgattaagagagctgttaacaggccgggcacggtggttcacacctgtaatcccaacactttgggaggccgaggcgggtggatcacctgaggtcaggagttctagaccagcctggccaacatggtgaaaccccgtctctactgaaaatataaaaaattggctggacgtggtggctcacgcctgtaatcccagcactttgggaggccgaggctggtggatcacaaggtcaggagtttgagaccatcctggccaacatggtgaaccctcgtctctactaaaagtacaaaaattagctgggtgtggtggcgcacactgtaatcccagctactctggaggctgaggcaggagaatcacttgaacctggaaggcggaggttgcagtgagctgagattgcaccattgcactccagcctgggtgacagagcaagactccatctcaaaaaaaaaaaaaaaaattaaccaggcatggctgggcacggtggctcatgcctataatcccagcactttgggaggctgaggcgggcagatcacgaggtcagaagattgagaccatcctggctaacacggtgaaccccgtctctactaaaaatacaaaacattagccaggcgtggtggcgggcgcctgtagtcccagctactcgggaggctgaggcgggagaatagcatcaacccaggaggcggagcttgcagtgagctgagatcgtgccactgcactccagcctgggcgacagagcaaaactccatctcaaacaacaacaacaacaacaacaacaattagccaggcgtggtggcgtgcgcctgtaatcccagctactcaggaggccgaggcaggagaatcacttgaacccaggaggcggaggttgcagtgagccgagatcgtgccattgcactcccgcctgggcaacaagagtgaaactctgtctcaaaaaaaaaaaaaaaattgtggggttgttcacattctaaaaaaatctcattagggatttatgacatggtgttccaaattaaccacaaaattgtaaatagttaaccaaattatatcctagtaacaatttaggggggaaaataaaaatgaaaatgcattctgagttacataagagcatgtttactcttcacaaagccatatttatttatacttccaccaaaagccattttttttaagtctgtagacatatgataaaggacttttagtggacttggaagcatttttcacaatgggctagaatactgaggttgaatgttatgtaggaaacccacataatataaaattattttacacttgaaaaagaaaacaatatgttgtacagtatagctataaacaaatagcattggtgggtctgggactagttaaaattatgaagcaaagtttatatctacaatcaactatcccttgggactcctcctcagttttgcttaactctctcattctgcttcccttttttctgccctgatattcagtgcttttatacggcccaccctatagacatttctttactttcttgtgacatgaattggaataaattacaaataaccctaaatgttctttgcctttctccttctttaaattttaaacttattccacattttagctttttaagatcagacataacttccaaatagaagaaaccatgtttaaaaaaaaatccatgctttttaatcattttcttatgtaaaaagcctcaagtggctggaataaggtctaagtaacaaataaagaactaaacttttcagataaaggctccgaaagtccctcttgttttcagctttcaaaattctttctctctctctatcaatatatggttcacgtgtaaaaatgtgcttacctgtgtagggatgaaattaagactgtctgtcatctactcctcacaaaaggaaggaagtgagattattgtcctactttttccttatcttttctttttttctctgttggaggtataggatcaaccctcatcccttttgttaaatataaatgaatcatttaaaaggttaattattgtaggtaggtaacctgatgcgttaacctaattgcaatacccagttgaagaaaatctgatatataatttaccagtatggcaggtttttttggttttgtttggatttttgatgttttttgttttttaattttcctttcaggaccatctttttcattgttctccagagtgtaccttataggtagctactcactctccaaataggtaaaactcccctcaagctatggatgtcaaagatagtaatctatccatttaatcataagcttttcttccagaagttactgaatgaaagaggattagaagatggtctgtgtagcaaaggatttgcttacattttgggccagtttgcttacccgtgaagcaggcatagtaagacttagacccacctcatgaagttgttgtacggatcaaatgagattttaaaaaagcacgttgaagttggtaaagctgaatgtgcttgcaaagcatgacatttacaactgaaaatccaatttgtgcttttgtgttcgtacctggagaaatcacttagcttttcaggtctgcagttttctcactcagattcgaaaggtcccccatcgatttaaaaattgtggactttggccagatgacctcctgaggtcccctgattctgtagttgtaaatgtcctgtgtaaatcagggaagtaattcatatacaagcacagtatactgaggagaagttggaagccaggtatcatgattcctggctgaggactaggctacgtgttcactgaatgagactgcccaaggcttaccagagattagatgctacagaatgagagtggaattgtaatattagagatagagccgtggggaatctggagttccaacccagtcaacatggagaaatccttgttaacttcagttatctagctgagataacacaaaagataggtttgaggaacaaggaccatgctctaatataaggcctactctagacccaggctaagactagtaaaagaaggccccaattaattcttacagggtagaccaaatttggacaatgagtctcaccgagatagagaagcctgggaaatatcctgagctttcagcagatcagcataccaaaggttaaatccaaacctatacaagttcaaggagtcaactattaactgacttatatgtactagaataaaaatcactgctcctcagaagaaattaacagaaccatatttgcaatatatcccatgttgaacttttaattaccagacatgcaaagaatcaggaacatatgatctatagagcagaaaagagcatgcagtagaaatcacctctgaggagtcctatttggtttaacagaaaaaaaaaaaaaaaacaactaaattcacccttatacattaaagaattaaagaaaaatgtcatgttgatgatggaatagataggaaatctcaacagagaaaggaaaagtattttaaaatggaaatttgacatagtgagaacctgtctctacaaaaatgtttttaaataccagccaggtgtggtggtgcacacctatagtcccaactacttgggagggtgaggtgagaggattgcttgagcctgggagattgaggctgcagtgaactttgattgtgccagcatactccggcctgggcaacaaaatgagaccctatctcaaaaaagtaataatcataaaatgaaaatggaaatttgataattgaaatagaaatgaaacatttattggatagtctttttttttttttttttttttttttttttgagatggagtgtcgctcttgtcccccaggctggagtgcagtggcgccatctcggctcactgcaacctccgcctcctgggttcaggcgatcctcctgcctcagcctcccgagtagctgggattacaggcatgcgccatcacagccagctaattttgtatttttagtagaggcgaggtttttccatgttggtcaggctggtctcaaactcccaacctcaggttggcctcccaaagtgctgggattacaggcgtcagccaccgtgcccagcctattggatagtcttaatggaaaattagagctgtcaaaagaaagagtcagtgaacttcaaaatagatcaattgaaattattcaatctgtagaacagggagtgaaaggatttttaccgaatgaacagagcctcagtgacatgtaggacaatttcaaatgggttaacatacatgtggaacactagaaggataaaagagtgagaatgaagcagatgaaagacagtttttaaaaatggccaacatatttctataatttaatttgaaaccatgaatctttgatttacaaatcccagaaactaagtgaaaccaagcaggataaatacaaaaaataaaaaaatcacaactagaaataccatagtccagttgctggaaacaaaatatgcagagaaaaataaaagcagcctaagaaaaaaggcacagtgcataaagggaaactatgatagctgagtccttatcagaaacagtgaggacctgaagacaatggaacttctttcagggtactaaaaaaaaaaaaaaaaattagcctaaaattctgtaagcaaagaaaaagatcctttaaaaactaggattaaataaagacaatttcatataaacaaatatgaaaagaattcatctctagaaagcactctagaagaaatgctaatgagtgttcttcaagctgaagggaaatgaatccagatgggagcatgaatctacaggaaggaatgaagaacaccagacatgggccgggcactgtggctcatgcctgtaatctcaacgctttgagaggccaaggtgggaggatcacttgagtccaggagtctgagaccagcctagacaacatgacgaaaccctgtttctacaaaaaaaaaaaaaaaaaaaaaattagctgaggatggtggctcatactcttgttccaattacttgggaggctgagactgaggattcctgggcccaggacacggaggctgtagtaagccaagatcacaccactgcactccagcctgggtgatagagtgagactctgtccccctgccaaaaaaaaaaaaaaaaacacagacatggtaaatcagttgatacatatagaaaatgtattttttcttctcagaattcccttaaaagacaactaaccatttaaagcaaaaataacatgatgagttggcatttataatatgtgtaaaagtgaaagatgggacaacagtatcccaaaatattaggaggtagaattgtaaggttcttacgttcgtgaagtagaaaatatgaactgttggctgggcatggtgactcatgcctgtgatcccagtgctttgggaagctgagactggaggatcacttgagcccaggattttgagtttacactgagttctgtttgtgccactgcacactagcatggttgacagagtaaaacctggtctctaacaaaaaaaagaagaaaggaaagagagaaagaaagatagattacgaagtgttcgatgtgaagtagtacaatttctaatctaaatagactttgataaggtgcatgttgttagctgtagagcaactaccaaaataataacaacaaaaattttaaaaaccctgaagagcggccaggcaccatggctcaggcctgtaatcccagcactttgggagcccaaggcgcacggatcacttgaggtcaggagtttgagaccagcttggccaacgtggtgaaacccccatctctactaaaaatacaaaaactagccgggtgtggtggcgggtgtctgttatcccagctactcgggattctgaggcaggagaattgcttgaacctgggaggcagaggttgcagtgagccaagatggcgccactgcactccagcctggacgacagaacgagactctgtcacaaaaaaaaaaaaaacaaacaaacaaagaaaaagcacctgaagagctaacagaggaaataaaatgcaatgctaaaaattgtttcatttatccaaccaataaaggcagaaaaggaacaacaaataaagaacagaaacaacaaatgaatgacataaattcaaccatatcaatatttatggcaaaatgaaatatagtaaacacaccaagtaaaggacagagatactagattagaaaaaaaaaagcaaggctcaactgtatgctgtacataagacctgtactatcataaacactggctggaattaacggaaaaaggtacttcttggaaatagtaatcctaagaaacctggcatagctatattaatatcagacaaagagtattcccagagataagaaaagaccatataataaagataaaggggacaacacatccaaatgacataataatcctaataaatatatatctaatagagcttcaaaattcatgaaggacagaccgacagaactaaaggtaaaacaaatctgtggtcaccagtcattactggggattttgacctctattccttagaaactgatagaattactaaacaaacaaaagcaatcagaaatatagaagatctaaagactattaacttgacttatttaacatttatagaatactacatctaacaactgaagaaaatatatgttttttaagtgcatatggaagtttcacagatacagaccatatgctgggccttaaaagtaagtctcagtaaatttcagaagactgagatatgctaaagttgttctctaaccacagtagaattcagttagaagttaataagatacttagaaaatgtttggaaattagataacataattctaaataccatggcttagagaagaaggaatgttaggactcgttttgaactgaatgaaaattcaaatgtgaagttttgtgtttcacagttgaaaaagtggttagaatgaaatttttacccttatatacctgtattagaaaagaagaaaagttgaaattcattgatcttagtttctacactaaggtaccagaaaaagaagcagagtaaaccacagtaagtaggataacggaaatattaaagataacagaaatcaaacacatagaagacagagaatcaacagaaaattcacaaaattcataaccgggttctttaaagaattaaaaaaaaattgataggtccctaccaaatggatcaagggaaacaggaaggcacatgaattgccaatacctggaacgagagaggggttatcactccagtttctaaagacacgtaaaaagataagacaatattttgagcaaacttataccaataaatttaatagacaaagtctttgaaaaatacaatttattaaaactggctcaagaaggaatagaaaagtgagcaggcctttatctattaaagaaattgaatttgtcatatggaaccaaaaaagagcccaaatagccaaggaaatcctaagcaaaaagaacaaagctggaggcattatgctacccaacttcaaactatactacaggactacagtaaccaaaacagcatggtagtggtagtaaagcagacacacagagcaaaggaacagaatagagaacccagaaataaggctgtacacctacaactatctgctcttccaccaacctgacaaaaacaagcaatgggggaaaggattccttattcaataaatggtcctgggataactgcctagccatatgcagaagattaaaactggactctttccttacaccatatacaaaaatcaactcaaaatggattaaagacttaaatgtaaaacccaaaactataaaaaccctggaagacaacctaggcaataccatgggcgcgggcaaggatttcatgacaaagacgccaaaagctgttgcaacaaaaacaaacaatgacaaatgggatctaattaaactatagagattctggacagcaaaagaaactaccaagagagtaaacagacaccctacagaatgggagataatttttccaaattgtgtgacaaaggtttaatatccagcatctgtagggaatttaaacaaatttacaagaaaaaaacaaccccattaaaaaatgggcaaagggcgtgaacagacacttctcaaaagaagacatacatgtggctaatgagcatatgaataaaagctcaaagtcactgattattagataaaatgcaaatcaaaaccacaatgagataccatctcatgctagttggaatggctgttattacaaagtcaaataacagatgctggtgaggttgcagagaaaaaggaactcttacacactgtcggtgggagtataaattagttcaaccattgtggaagatgatgtggcgattcctcaaagacctaaaaacaaatacagtttgatccagcaatcccatcactaggtatgtacccaaaggaatatcaattgttctatcatatatacatcatgaaatattactcagccgttaaaagtaacgaaataatgttttttgcagcaacttggatggagctggaggccattattctaagtgaagtaacacaggagttaaaaaccaaaagccttatgttctcacttataagtgggagctaagctatgagtatgtaaaggcatacagagtgatataatcgactttagagactccgagggggtgggggagggaagatatggataaaaatctatatattaggtaccacgtgtatatagtactcagttgatgggtgcactaaaatcttagaattcaccactgtataactcagtcttgtaacaaaaaaacacttaaaccccaaaagctatttgaaataaaacaagacacatgtacacatatgttcattgcagcactgttctcaataacaaagacatggaatcaacctaaatgctcatcagtggtggactggataaagaaaatgtagtgcccatacaccatggaatattgtgcagccataaaaacgaacaggatcatgtcttttataggaacatggatggagctagaggtcattatccttagcaaactaacgcaggaacagaaaaccaaataccacatgttcttacaaggggagctaaatgatggcaacacatggacccatagaggggaacaacagactctgaggtctattggagggtggagagtggagggtgggagaagggagaggatcaggaaaaatgactaatgagtactagacctaatacctgagcgatgaaatagtctgtacaacaagacttcgtgacacaagtttacctatttaacaaaccttcacatgtgcccctgaacttaaaaattaagaaaaagaaagaaaaagaaatagaatttataatcaaaaacattcctacaaagaaaactccaggccccaatggctttactgttgaattctaccaaatgtttaagcaagatgtaataccagtcttagagaaactcattcacaaaataaagaaggtattatagaaatacttaccaagtcagcttagaattgtgaccctcctgcctaaacttgacaaagacattgcaaaagaataaattacacatcagtgtcactcatgaacattgacataaaagtccctaacaaaaccttagcaatttgaattcaatataaataagaaagctaatatatcacaaccaggttggccttatttctagaatgtaaggtttgttcagtattcaaaaatgaattaattaaactcactacctgaacaaaatacagaaaaaaatcatttagtcacctgagaacattcagaaaggcttttaataaaaggcaacacccatttatgataaaatatcttagctgactagagatagaaggtaattcagcttagtaaagagcatcatgaaaaatttacagctgacatcatacctaatgatgtaagctgaaccctgagattgcaaaagagataacaatgtctatatccccctattcaatactatattggagatcctagtaatgcaagaaaagaaggagggaaaaagcataaaattcaaaagaaaattctaaaacgtatgtattcataaacatggttgtttagggcattttaggcatagtttggggatactgcaagttttgttccagactactgaaataaagtgcatattgtaataaggcgagtcacgcaaatttattggtttcccagtgcttataaaagttatatgtaagcagggtggaatgggtcacgcctgtaatcccagcactttggggccatggaaggtggattgcttgagcccaggagttcaggaccagcctgggcaacatagaacctgtcgctacaaaaaaagaaaataaatagcggggcatggtggcacacaccagtggtcccagctactcgggaggctgaggcaggaggattgcttgagcccagaaagtcaaggctgcagtgagctgtaatcgcatcactgcactccagcctgggtgataaagtgagatcttgtctcgaaaagaaaaagttatatgtacactatgctatagtctgttaaatgtgcagtagcgttgtgtcttaaaaaatgtgcatactttaaaaatgctttatttaaaaaaaattctcctgatcatcttgagccttcagggagtcatgatctttttgctggtggagggtcctgcctctatcttgatggctgctgactgagcagagtggtggttgctgaaggttcgggtagctgtagcaatttcttaaaataagacagtaataaagttgccacatcaatggactcttcctttcacaaaagatttttctgaagcatgggatgctgtttgataagcattttacccacagtagaacttctttcaaaattggagtcaatcctctcaatcttgatgctgctttaccggccgggcgccgtggctcacgcctgtaatcccagcactttgggaggccgaggcaggcggatcacaaggtcaggagatcgagaccatcctggctaacatggtgaaaccccgtctctactaaaaatacaaaaaaaaattagctgggtgtggcggcgtgcacctgtagtcccagctgctggggagactgaggcaggagaatggcatgaacccaggaggcggagcgtgcagtgagctgagatctcgccactgcactccagcctgcatgacagagcaagagtccatctcaaaaaaaaaaataaataaataaaaataattctatcggccaggcgtggtggctcacgtctgtaatcccagcactttgggaggccaaggcggggcatcacctgaggtcgggagtttgagaccagcctgaccaacatggagaaaccttgtctctactaaaaatacaaaattagctgggtgtggtggcgcatgcctgtaatcccagctactcaagaggctgaggcaggagaattgctggaacccgggggcagaggttatggtgagccaagatcacgccattgcactccagcctgggcaacaagagcaaaactccatctcagaaaaaaaaaaaaaaagaattccattagctatatccaaggtttgatatatatctagatttttttttctcatgtatgatgaagtctctggattcctgagtgtttctttttaacctatttagggtgtggtggtttcatttcataaaattgggagttgggagagaggtatttgttgtggagttcacagtattattgtattgtggtgaaaaaacatagtctataaaaggaaaacacaggaggtgtaaataccactacagtcaagattttaaaactatccactgaccagatgtactggcattgaactgttgatttttgtcctcaggctggtgtcaagtgatgccatccttttgagtgttcctaggtctcttccttagatatatgaaaatgtttctcagaagtcctgatatccagcctcccccaacagtagacttttactcacatctgttaggctagacagagtcccgtgccaagtcattgaggagggaaagtgggattatcgttcttggcctaatctaatcagcacctacctctgaggtttagagatagtctttaaggcactctgcgaaggcaagatacatgaaaaacagttggaagcacaactggttaagcagccaaaagagtcttcggttgtctctgagttgctatctttcaatatgcctgggtgtcagccaatttattggaagggagaaagaatattggttgatctggagagtctgataattggcattctgttaggagaacctctgttatgcttatttaaaggccctttaacacagttctattatttcgagtttttacaatgtgaagtcttctgtttgttgtaactcttttttttttttttttttttttttttttgagacggagtctcgctctgctgcccgggctggagtacagtggcgtgatctcggctcactgcaagctccgcctcccgggttgacgccattctcctacctcagcctcccgagtagctgggactacaggcgcccgcccccacgcccggctaattttttgtatttttagtagagacgggtttcaccgtgttggccaggatggtctcgatctccggatccacccaccttggcctcccaaagtgctgggattacaggcgtgagccactgctcccggcctgtttgttgtaactcttaaacgaggacttgttttctaatctttggtagctgtgcttctgtggagctactttccttgggagtcctgttccttcagagcagcgtccaggttctctctctggggacttagtacactcactctttctggaccagtttttatgttaatttctgtgcttgggattctgtgtgtctctcatgcatcagtgatttctaatgagtaattcttttcctacccatagcctaagagtctttgttgcttcattgggctagtaagtaaagtttttctaaaggtctctatttttacagggatagtcaacctttgtgactttctttaactttatgcagaaaggttagttccatctcctcctgagccccagtcctgggatctcctccctaaggcttataacccagtttttaacctaccgctccctcgccccacccccgtaagttatttccacttaaactcatcagctataactgaattctttgttattagcacttctcctgctttggctaaagctcaatacctaattattattttctttttatgcactatttttatgagtttggagcaagaggggagggtcatgttgggttccttcacaatatttatcacaagtacaagttccaatttaagctaatttattttcagtctgttaggatttttttctccttctctcctaatttttgtcaactgttatttttgtaatcattctttttcttcctgaagtcttcaaaatccatcagatggatttgattgttgctttttagatatatatctgttgcaaagtttttgccattgcttatgggatgggatgaattacagctctcttaaacaacagttttctgtggaaaggcagcagaaggcaatgatgaaagatgtacttcctgctcttcatctctatttctgaaatcttattttgtttcctgagtttctgtaagagttacttctgcttaaaacttctgcctttacccaaactttatggtgtcttctggaatagtttatttttccagtatactttaaagaaaaaaaaaccttcggttctcagcctgctcatgacatccagctcctgttgctttggctcagagttccattctacctcatgataaacaccttcgtatctcattatatcttaaattctctaagctctaggagcagacttacagagggagcatactgtactatttaaatgagccatgacaggcctgggagtggaacttactgctgggaagtagaccaggtggtattaaaggggcttgttccatgtggcaattgctccacccgttaatactgaagtagaaaattggaggagtaaaccacgttcagttgctaatttcctgtggagataagacagacacactgtgcttgtgtatttccatctctccatgtaaaactgtattggaaaacatttctttttatttctaggtctgatttttttgttgtagttttattttattggcagagttcatgtagctaaacccctcagtgcttcaatttaagacatcgggagatgaatgaaattgttatgttattaagtagatgctgcagctctgcttgctagggatgaaatcctattttatgaaataatatagtgtgaagctgtcagtaatttccaattgtagaagaggcctaatcagaaagttgggttttttttgttttttgttttttgttttttttagacaggcccagacagttttttgaccagacatctatacatgtttcagtgagttaattactcattttattgtaatttcatctgttagaaagtacccaaataattgcaaagtttatgtatataaacttttatggatatatcacaggcaaacaataggtgatctttggcatggttgtagttgggaggtttcagatggagatactgtgggcacatgccctcttcttcccagctggcatcctgggaagtgctgacgggctccggagcaagtgaggccctagagactgtttatgacacgtcagtgttcatttgtgtctcatctctttgatcgctaagaagatacctgttttactaaagctcagctgttgtcagtttctttggattgattgtcttaaagggaaagataaatcaactttgtttttttcctgaagatagctaatcaggtcatttaattttggaccaataagtaaaagaataactgagtttaatgagtattgcgtaaaataagttcttggtgatttgaccctgggttgacttggcatgaattttctttcttttcaactccctgctgcccactttgtggtgttgtatgaataatgagtccacaggccctgtaaacatgttaggtgaggtgtttgttgtttattagtagttgggattaaatagaagttgcacactgaaattgagtgaagtgacttttctgcagttaacttggatgtcattggtttgaaggagtttttctgttgcagctgcttgtcctactacttttagctgtgggtgcatcctttctgcgtcctgctaaaaattatattcttgttttcacttttaaaacctaagacggttccagagctgtgtttggtttttgctttaaactaatgcccgagcgcccctttagttagtcaccaatcactgtttaggtaagttgatgattcctttttgctacccaagatttttttatttaaaattgagcatttttaacttgctttttaggtcagaggatcaatgtcctctgtggtattcctcctccatctaagcttcttaaagcagtattataaatagaggctttcaacctaaaaagtactgtgtatttcattgactagaactgaactgaactgtaggctaataaaaagtaccaaatgaaaatattatggtatctcattgcactccattgtagatgtaatgtagtgtgaccagcagtagctttgattcattgtaaatcccatctgaatactgacaacagttcaaaacatcaggagataaacctcaaaggtcacatttgtgtgaatggtcattgtgcatataagacatcattttattatttgaaaactagtagtgtagctcttaagacagggcagtgtcctaacctctgacagggatagaggcgagaggagaatcagtgggctgccaaacagtcatgtgttcataggtgaggttctgtttcttctttagctgttactattgttattattattattattattatttgcatgaatggtagcagttacttcacaggcaaatttcctatgaatcccagagtattgcaacagattagcagcaaataaagacctgagataaagaaaaaaaaaatgcttttattcagttatattaaaattaggacatttcaataaaaaactaaagcagcttatgttgttctgcatgcataaattgaaagaatacttgaaaattcttcaaacttgatggtagacattatcttacagctttcttaaaggaagtcagtttcttggcagtaggacagaggttcccaacattacttggttctagcacaatcactaaatttttcgtgacttttagaccaaaataaatacttaacagttcctaacagtttgttgtgttccaacagtttgtaatcatgtcaaaaaataatagacatattagtaataataaattgaaagaaaatattttaatttcttattacttactcatcaaatgtgtgattgttgggcatggcacagttttttaaaccttggaatcagattggccactgccaacttcatttcttgttccacgctaatttctgtgcagaactgtgctgtgcttttagtcacagtgctgcggtctgaatggttatgtccccccaaaattcatgtgttgagattctgaccccaaggtgatcatattaggaggtgtggagcctttgggagtgattaggtcttgaaggtggagttcttatgaatgggattcgtgtccttgtaggagagaccccagagaactcatttgccccttccactgtgtgagaaaagctgtgagtagatgccatctgtgaaccagaaagcggactgtcaccagatactgaatcttacagcactttgattttaggctttccagcctctggaactgtgagaagtaattttttgttgtttataagctacctagtttatgatattttgttacagcggcttgaatagactaagatacaccgcaaccatcaaaaactcaatttcgaagagatggaatatcatgaacaataattttgcatgatgtcgtattgaactgtgaaataccacaagctagtaatttgcacactgtctgacagcactgtgtttctcaaaatttaaaatgctctgcagtacccctgtgagttccctggggtgctgcagtgcacaatttgggaactgtggtagtattgtagatagtaagattatctaataataagtattgatgacatcttagtttaggaataattattagtatgtcagactataggggaagtgagtaaatcatatactaggttgttatcagaatgattatgaatttcttcacccacctgtggagagacagcatggcctatttttttactctgaccccaataagaaaagtattctgtaccttcccccttctctctccctttttgtctcttcgttatctctcactcttgctctaacagacacacacatagtgaaataagtatttaacaaaacagtattctcattatgtgcactctgactttttttttttttttttttaatgtctccttaagacctactgaactgacggaaactagttaaggtcacagactcgagagactgacgactttaaaatggccttcaccatttcctgtctgtgtgactgtaagcaagttatgtaacctctcagttactcagtttcctcgtctatagagtggtaatttgtaatagtacctagtgctgaggggatttgttttcttttgttttgttttgttttgttttgttttgttttgagacagagtctcgtgctgtcgcccaggctggaatgcaatggtgcgatcttggctcgctgcaagctctgcctcccgggttcacgccattctcctgcctcagactcctgagtagctgggactacaggcacccgccaccatgcctggctaattttttgtatttttaatagagaaggggtttcaccgtgttagtgctgaggggattttaaggaagttaatacatgtaaaacactttaaacagttcttttttattttattttattttattttattttattttgaggaacagttttgctctaatctcccagactggagtgcaatgggacgatctcggctcactgcaacctctgcctcttcctcagcctcccaagtagctgggaatacaggtgcgcgccaacaggcccatctaatttttttgtatttttagtagagatggtgttttaccatgttggccaggctcgtctcgaactcctgacctcaggtgatctgcctgccttggcctcccaaagtgctggaattacaggcaggagccacaccgcgcctggccatttaaacagttcttgatcagtaattactgctttattactagaatctcaatgaataatcagaggctaaaacatttgggaaattagggagatgcagtagttctgtgctctaaagggtactgcatacagtcaaaaggcttttctgaatttctgctcttgggcagatagattgtgtatcccttgccaaagattttccgtatttatcctcttgaatctggatccagttgagtagtaaacgggagtcaaaataagggagatgaaaatactatcgtcattactgacaaagctgattagagaacatgactttatatttgcagccaagtagcttcactagtatatcactcctgccaccagcacagctgcataactgcaggcttcttactgcgtggcagagagtagaacaggatggaccttctgcataagcagccaggtctgaagaggggagagcagaaggggctgaactgagtgtgttcacctctttcttcaaaatctgccaatgatataactcacaagggagggagacaagaaacataggcacagaaatgtgaagaatgagaatatcaccttaacaaaggaaacattttataaggatacaggaggtccataatcaagttcatgttttgtaacttttagtagttaggtatcctttctggcacaaactttaaaaacagatacaccagggtttgaattctgcctgtgtcacttaattgcactggcttaggcatcctagaatttctaagagccgtaaaacagacaaaactacttggcaagaaaaattgaccactgacttctctcccctgttctgttgatacaacattaaatttatcaatgtttgtttttgtcaaacttcagtagtgttagaggtatgagatcagccttagttgattagaggtatgagatcagccttagttgattagtaaaaaggattttatatgcctaagatagcaagagagatatgcctttgatctttcttatttataggaaaataatttattaacctaatttttattgtcacttctaacctaaatacatagttgtcctattaatggggacctttttttcccgtgagcatctgaaacagtcttttttttctatgtatgtgaagtggtaatagtttttctcgtgtatcaggcaactaccaacttattttagaccagaaattcttggaaatggtaccgatccagttggcataaaatgtgcaagcactattctattgattcctcaaaaagatgcaattgctttactcatagagttatcagttatttttctggctatttcacttgaagtagccatgctttgtctttttttctatggagatacgtggccaaaactaagtcttttcaccagctggatgataggaaatttgataaaatttgagcagtataaaaactttcccattgactttatatgattgaatttccactatgtaaaattaaactaattatttcttatgctacccaatatatagtttattatttgaaaactatgtccccatttttcctcaagaacatgattttgtcttttgcatctcagtgcaggggttggacagcataatttcttctcctagaaacacattttctgctgcttgtagctactatttctattttttcatcaacagctacaggagtaagtggagttcctgacatctctgtgtaatcagtggtatgatcacataccccatattgactttttcttttgaagtttatgctgctgtctcttcagtaccttgagcttgacctctagctttaagcagtaaaggtatcaaagaaaatcagttgccagagtcagtctgtttgcttgtgtcctcctaacccactgatggcacctctgactccttgacattgtattatttgtttctcagagaagtaaagcaattttttttttcctctgtcacccaggctggaatgcagtggcgggatctcggctcactgcaaccacctcccgggtttgagtgattctcatgcctcagtttcccgagtagttgggattataggtgcctgccaccatgcctgactaatttgtgtatttttagtagagacgaggtttcaccatgtgggtcaggctcgtctcaaactcctgacctcaagtgatctgcccagtttgccctcccaaagtgctggtatcacaggcgtgaaccaccacacccggccaaagcagttttttttacatatagacatttaatatattgactttggttgattcttacctcacttccaagataattgtttctgttaaattacatgtatttttaggcttgagtcatccactatatttatgagttggtcatttctttcatgagttgagcttgtttttaaaagttctacttttaaagtccccttctgtctctcctgcagccactttcactgtaacatttatcatgttattcctggcagccagtcttcttaactctccatcattacttttggcaggttacagcagtatcacttagggttctcttagttcatttttaatgaacatccaaaagatgctcctattgcaataaaaccataagaaaagattaatagaataagggtttattctattaataggcaatttggggctgctacagtggctccatgataccaatggttctgggctctttcttttccgctatccttagtatatggccttcttcctcctgcttgcaaaatggtggcatacagaagcctttcctacatattccagaatatgaagaaagacaagggggaaaagggacgtgccaactggttaaacaacaatcaccatatcaaagacccacccactagatttcttcttcttactggccagaactttgtagcgtgcccaccctctatacacaacaggctgcaaaggaggctggaatatcacgttttagttgggcagtgactatccagtgcaaaatccagattccgttagtaaaggatgttgatggagtggatggatattaaacagagattcaactttcctgttcagaaacgtgttataactccatatattgctttaattctatctatcctagatagacttacaaggctagaataagacctttagaggcactaaccaaccaccaaaaagaggctaatcacctcccatatgtaaatcaaattgtacaaaaaattgaaaaaaatacatgtaaagaccgaaaacattttgatttatcctatgacgtttcagtatttttctggaagtattaaatattctaaaatttttttttttgcccgggtacggtggctcatgcctgtaatcccaacactttggaggccaagctgggcggatcccctgaggtcgggagttcgagaccagcctggccaacatggtgaaaccctgtctctactataatacaaaaatcagccgggcatggtggtaggtgcctataatcccagctactcgggaggctgaggcaggagaattgcttgaacctggaaggcggagtttgctgtgagcccagatcacaccattgcacttcagcctgggcaacagagtgagactctgtctaaaaacataataataataaattaaattaaattaaagtgtgtggtagtgataatgggctggagggtatggtgagtctatgttgctgacatgctaacccacatcctgtctacttcatcagtatttcctattgtattagaaagatgagaaggttccttaaatttttaactccatagaggtgattcatttactataaagccttaagaaaaatacttaccctatctgggcctctgtttctccatccatgaaatgagaacattgatcataatagaaaagtaggcaaagaatataatcaagcaattcacaaaactatacacgcagatgactaataaaattataagaaaatattaagcctcacttatgacaaaagaagattaaatttaaataaaaagttcctttctaaaaatgtaacatagtagcagagatgtaatacccagtggcaataagaatataaagaaacaagtatttgagtgtaaagatagtctgaagtagtaaacgagggcaactaggtgtatttatcaaaggttttaaaaaatgcgcaaaaacttttgaccctgcaattctactttgaggaactttcctacctgaatttttgacaagcacacaatgattgaccctggtaaattgacataaggtatttttaactccagccagtttttttctttactgtagtaatttgtgtgaagctttctaagaagtaaatatgtaatttactgtcaaagcttttttcttttagaaaatctaagccatgaacatttaatatgttttcgttttaccttatattaggaagataatggcaatcttttaaaaataaaaattatttctttgttcatatcttaatttttgtttcaatctgtctgtccattttggtcttgtctattttacctctgggctctatctttactacaaccagtcttcctaactcttctcccaactttcagaagtagttttctaactatgtcaatgaagtatttccaaatgaaacttgccaaatggtctaatgccataaagacttctgcttctgtcttcattggattttagtcagtaaattttctttcttttttatttatttgtttatttatttattgagaatggagtctcactctctctgctcactgcaacctctgcctcccgggttcaagcaattttccttcctcagcctgccaagtagctgggactacaggtgtgcaccaccacatttggctaattgtatttttagtacaggtgggatttcaccatgttgtccaggctgatcttgaactcctgacgtcaggtgatccacccacctcggccttccaaagtgctgggattatagaagtgagccactgcgcccagcccatattcagaagttttctacagtttttttgttttgttttgttttgtttttttgagatgaagccttgctctgtcacccaggctagagtgcagtggtgtgatcttggctcactgcaacctccacctcccaggttcaagctattctcctgcctcagcctcccaagtatctgggattacaggtgcccgccacaacgcctagctaatttttgtatttttagtagagacggggtttcaccatgttggccaggctggtctcgaactcctgacctcaggggatccgcacttttggaggccgaggtgggcggatctacaggattttaaaacatgaagttgtgcctcttcccaaatttattctcagacttatttttttactagttttatttctgaatggcacattagagagagagaaagccagagagagagagagcgagagagaggaaagaagagacaaggtgggaccgatggtataattgagttcatagaaagacagtgaagtgaatcatgggtgtttcatcactttacaaaactgataacaataatatcatttctagaaacgtgaatttacagtatgaaatggtaaacattttttttttttgagacggagtctcactctgtcgcccaggctggagtgcagtggtgcagccttggctcactgcaagctccacctccagtgagccattcccctgcctcagcctcccccagcagctgggactacaggtgcatgccatcacgcccgactaattttttgtatttttagtagaaatggggtttcaccgtgttaggcagatggtcttgatctcctgacctcgtgatccacccgcctcggcctcccaaagtgctgggattactggcttgagccaccgcgcccggctggtaaacatctttttatagctaatgggcacttttaggctaactgagcagtgaacactattaaatatatgagaagctttttaaaccaccttccacttaattcataactacttgtcaggttgagactttcttttctctgttaaccatgccaatttttgctcagagcatgctgaaaaagctactagattactgtcacatataccaggcatggctctgttaacctgtttagttgtattattgctgaaaagttatttattccagctattcttgatattttaattatatatttttattattataagaaaccaatgacatactcatatgaaaaaatatctctgtgaaataaagcaaaatgttttggaaaagggatgcaggtaagtcatttcaaaattgctgttgttaatgcgggagaggatttggaaaaataggaacgcttttatactgttggtgggagtgtaaattagttcaaccattgtggaagacactgtggcgattcctcaaggatctagaaccagaaataccatttgacccagcaatcccattactggatatatacccaaaggattataaatcatgctgctataaagacacatgcacacgtatgtttattgcagcactgttcacaatagcaaagacttggaaccaaaccaaatgcccatcaatgatagactggataaagaaaatgtggcacgtggccaggcatggcggctcatgcctgtaatcccagcactttgggaggccgaggcgggtggatcacctgaggtcaggagttcaagaccagcctggccaacatggtgaaaccccatctctactaaaaataccaaaaattagctgggtgtagtggcaggcacctgtaatcccagctactcaggaggctgagacaggagaatcgcttgaatccaggaggcagaggttgcagtgagccgaggtcatgccattgcactccaccctgggcaacaagagagaaactctgtctcaaaaacgaaaaaaaaaaaaaaagaaaatgtgtaacatatacaccatggaatactatgcagccataaaaaaggatgagttcatgtcctttgcagggacatggatgaagctggaaaccatcattctcagcaaactaacacaggaacagaaaaccaaacaccgcatgttctcactcataagtgggagctgaaccgtgagaacacatggacacagggaggggaacatcacacacggcctgtcgggggatcaggggctaggaaagggatagcattaggagaaatacctaatgtagatgatgggttgatgggtgcagcaaaccaccatggcacatgtatacctatgtaacaaacctgcacgttctgcacgtgtatcccagaacttaaagtataattttaaaaaaagtaaatccaaaaaaaaattgctgctgttgaattaggttaacagttactgaatattgggagactttttgaaacctcacagtttgaaattggcattgtatttcaaatgtctgcatactgactagccccactttcacacaaccagagctgaaaaggatgtgaaaaagacaatactgaacctaagtcatcagattatatggtgatctttggatctcgtctaaatgaaaaaccagcaaagcagcttcaaagcagcaaaacactctctatatactttctttattctttaagaaatattttagttaatcacctagcagacttgagtgtcacataaaggggcttcttctatagtttctcataaataatttgctgattctgggaactctaaaaggtaaatattttatgtagcatgtgtatattgtaaattatttataaaaatgttttaaaagacctaatcctgaaatagtaaataactaaaaatttacaaatactattctcaaatagtaaataagtatatatgagctttcaagttagaactaaaatttccatgatgtgatatctattttaagatttgtttatcaaggaatattgtaatttgggaggattttttaaaagcagattttattttttctgcccttcacaaaaactaaatctgagccttgggaaatcagggcagctgcatcatgatgtgacttgcctggggtttggtattttgctgagatacctgccagttggaattagaaccctatgggtataactagggtagacttaattattggcttactgtatttaaatcaaaatgaaaagctcatacaaaattttgtacccgtactctgaaaaaatgtggaactgtttttggactaaaattttatagcttttgtggctaatgaggcatgaaataaattggcaagctcaaactgttcggagtacagtggtacagtgtgcattttctaattcccagcccttgggattccagcaaaggtcacaaattaaacaaagtcaggattaatcaagactataatcaaataaaactcaatcattaatcctcttctgacttacaatagagtgattgtgtaattgtgtgagaagcactggagagggctcttttgtagtgcgtaggaaaatcaacattaaggtgtcagacagaaaagtgaaaccctgcaggtgaagctgtctctggagccaagagaaactggcaatttatgcagagttgcaagtgaagctttggagcattgaaaggctgttggcactgagctgcagagcgtgtgggtctctcggtgaggcctccacagagatcagtttacgggctgcagcaggccgtttgctgagaagctcagtgtttgggtgcagcagctccaagcaacagtctctccaagttaactgccagaaatttactgtgtaattctcagctctttgtaattttgaagaagaggttatggaaaagcatttcctctgtgggagtaattatgtgtcagaaaatgccattcctcaataaagggggaaggttcacaaagcacagaactttgtcctatttattccatgttcctgacttctgaactgatgcttgctttctgctattttatgttctatagtgatactttcttcatttttcatcccttcatctcaagtcagcgtcagttttattgctttaaaagtcaacagtgatactatccagttctgctaagagtgaaactttaagaataaaatttgattttaattcatcccttattatatgtgagtatattttttatattcgctttaaggatagtatttacctctgtttgttagctttctgctttccttcgtataccaaatagaaaaattctcattcactcacccccaaagcatgtgcctgttatcacatgattcagtttgagtttctatattacacaatttctgtttcttacattgctttttcctatttatgtactaagctctctgtatatgcaggatactgttaggtatgatatgagatatttattattttctttcaagtaaataaacaaccattatccatgcatagctggtcagtcccataaattttagtactaaaatatcacttggattattttattagcaagactttattgtaatgatgtatttcagattttgtctttccatttaggctcatatatgttacattttggtatcattattgaaacaaattcatgaattgagttcatcattagaaaatgaaagcctcagaattttggtaattgttttggaccatcacaaaaatgtgcttggcatatttaaattctgtatttttttcccttacctgtaataacttttcaaagtacctaaagctatgatagaaatggaatagcatatagaatacttgtgtgtgtgtttgtatgcaggggggcggcttcttatttttaccttttttctgattttatatatacaatgttagatatattgttctgcaatttatatttcagtggaagaatattcatggttattttttaaagtcagcataaagatctgttgcattctgtttaacaagtgctttgtgttccagtgtatagatactgcattatttatttcatcctttcttggttgaagattgtttaggttatttccagttgtgtaatattgcagataatactgtaaagaaaatcattatacttgcatcttttcacatatgtaagcatatttttctaggatagataatggagttgctgggtcaaaacataatggcgtattttattttgaaaactgttgctcaagcactcttataaaaggctctaccccacatgtgctctcacccaaatgtgtatgaaagtgtgcatctccttaattgttaggtgtagtggatactatccatcttttacatttttgctgacttttatatttgagatatctttctacaccattactcacccttttctttccagcagagtagtattccatagtattatatttaattagtcctccattaatgaacatttaagttacttctaacagtttgccattacattcaatgctacagaattttaacaaatttgtaatgcagaattttcataagtataagaataaccttattacaaaagtcatttcacatgtatgcaagtatatctgcaggataaattccaaaatgtaacaaagggagtatgtatttgtaattctagttgatagtgtttttttggtttttgttgtttttttgagacggaatctcactctgtcgcccaggctggagtgcagtggcacgatctgggctcactgcaagctctgcctcccgggttcacgtcattctcctgcctcagcctcccgagtagctgggactacaggcgcccgccaccacgcccagctaattttttgtatttttagtagagacggggtttcaccgtgttagccaggatggtcttgatctcctgacctcgtgatccgcctgcctcagcttcccaaagtactgggattacaggcatgagccaccactcccagcctctagttgatagtgttaaatggaaaaggaagatgtaaaacagtatgctaccatttgtttacaaggggaagggtataagaatatccatgtgcaggcacacatggtaacatggcgagtgcgggggaaaatgaggtttcaagttagaactaaaattaagggtacactgtgacttaggtcacaacaggacataaacatttaatttactctgagcctcagtttccacatgtatgtaaatgaagctagtaaatgcctgtttgatagtattatgagaattaaatgcaaaattgtatgtgaaattatgtgacactgtggccagcatatgatacgtgtgtgtgtgtgtgtgtatattttgctctatattgtgccatatgtggcacagatatttcttgtaaaggtagcaattgcctgttgtattcatacaatgcggagcctacttgtcaatgatgcttttatttaatcaattatacatagagttgtcagcatggaaaatgcagcttctgttttgaattatgttttacttctgagtataatttaaaggcaaaatggcttcactcctagaaactcgagacctctaaagcttgttctcttcctgatgaatgttctctttgggcacttcaaatagagtatcttactcatggctttaggtgatatactgggaaagcatgcagttgctttagaagcctttataaataatacttgagtgttcaatataaaaccaatgtttggctttcgtaaccatttcctacatctcttctataagtttattgaattcacagtacacatctacactgtgagaagcatttatctccttttgtgctaataaaattaagcaaaagacaaagttactcccaagttcatagcatattccttgaaaggaatgattataagaacaaacggggatcaatgcattacatctttagaatacaggaaggagtttttactacttcattttaaaaataaggaaatagagatgaaaagctttccatctttccataccacgttcggcagtggtaatatgttttatacccactaatcaaggcatcctctgtgttttgatgctttgataagtagtcatctgcttttaagtttgtgatagtagattgaataagtgtcctcgtgctcacgcaggattatatacttattatatacttaggcaaatttgtctttttgaaccaagttttatcacttaaaatgagcataataataactaattcataagaatgctgtaaacataaaatgagtattactaactgagaatgtacagtagatagtaggctctcactacatgctggttttccttcttcctttccattctcttaggaaaactgatactcagaatggctaagtgatctgtgcatagtcaaaaggccaatttagtgatagaactgagactggatccatcactttgattacagctagattctttccattataccaagcagcatccatagtaatttactttcatttgtacaattttctatgagaaaaaatgagcaacaactatcagtttgtcttcaatcctgataaaatctagcacttacagaaattgctaagaagtaaacatttattacacaaacccatgccagagaggggtatgttgagttctagtctaaacatctttaataatgataattccataattctcagctgtttcttttagattgaccttttctcacctgataaaattttccaattctaagctctttattctgattgaaatctgacataacttgtctcagtcatcatttttccattctgagcttgcttatattttctaaacttttaacttggttctccagcctggcgaccttaatttgtccattttagaacagccaaaatatccttgattttgctggattaattcagttatctcaaattatctctgacttcctttttcacacctgattttccttagttttgttgattaaagattaatatgagtttgtatgccctgacagtggatgatacaaaagaaaactggtctaggaattaggaaacctactttctgtttcatctctcttcttattgccaagctgtttcctcactatgatgggaaaaattatgttgtaatcttatgtcttataaaagagggctcaaattggtatagactgtatattttgtggggaattaattatgtgactattcaacatttgacaaataattttggacgtaagtgtgcaatgtctaaagcccgaataattctaattttaatgtcaacgcacttgatgagttgaagtatggtgcttgctggtaatggggaaaaaaaaaggctacaaccaaaagtattgtgttatataaaattacatgtgatttgttgtgccttcactttgaatattagctttcctgacagccaatgtaagatattagttaacatggaaaataacttcttacatttacatattgcagtttttcagggcacttctgtacacatgtggtatctatataaattatatttcagaataaagaaatggtcactgtctataattcttacactgccacaccatttgaaacaggccacagagatttattactccatgagttttgtgaatattgagactcaaatgctatgtttgtacaaggaaatcacaaatcgtaactagaatacattcacttacatattacacctagagttcgttttctcattgttcttttaagtttttttctctgagtatgggtaggtaaagtatagcaaatttgttgcagaaaattaactgtgaccacattaaagacttgaaaccacactccaaaatagaaaaggcattaggaaaatattttgcttagaaggaatgattgttcttgtcttttcaattttttcttttaaatgtgcaacatgaaactactccttaccttgaaagctgtatggctgattgttgctgcttcccaacatcttcacccgttttaccggaatttcgcctctgctattttaccttctaagctgtgaacccttgtcatcctatttgaaccaccccctgccctcccacctccctgttattagcagtacatcaaagattggtcattggtcttgtctccctgctaattcatatcttgatgttcttgaacagtatttgaacagtgcccctttagaggaatatctaatgtcagtcatttcctattctgagttaagttaattgatctgataaattacaatgagcaagtgaatatagtgggtttaaaacgtatccgtctattctggatttgcttttgctctggagaaggcaaaaaggccaggaattagtgagtgacttagtcttctctcgtcattggcagctgacagacctactgatgaggtgataatgaactccaaagtctaccctaggagcaactgggagggaaaagaacccagacagaaggcatgtctcactttggagcctgccaagatttttgctttttcatagaattcatttcgaggaggttaacaggtagactttgctggatgcatgtcagaagtgtaacttatcattcatggacaccaaagacaaatatatattttatttctctcaacgtaacaagccagaggcctcagtctcagagacggtcactggggtaatccagtcagagagggagcatccgaaacaaggcttgaatataaagttcattttttaaaataactcttccttctttccattaaaattattatccaatacatatggtatgacagattagaccttccagaattatttgctactcctgtttatttgattcctagaatgttgcttagcggtctcaaacttaattggagataatgagtatacctaaggtaaatcttccaattttgtttccagttatgaatgttggtgaatctttccttttccaaattcagtttaggcctccactgcctgtttttcttcaggtatcatgaaagtgaatgaagtattttcaagtccattcatccccacctcacatgggcagtcgcccctcatacacatatattttgtagcccacacaggaggcaacttaatgtacaaaatgttttaagttaattactggaagtgtgttaaacatagaatattagtgagtttttaaagtctctgaactttaaaaataatcaactgtttgtagaaaaaaaatgaattattgttgatgactcagcgttccttatgtaaagacttggctttagtcttcaagaagctcttcagcttccctttttcggttttaggcagaacatggactttgagaagttttaaaaattctattattcccacccatgtttccctctgtctttaagctgtaataaaacgtatcaatgttctgggagtctgtattgctgaattgtcagggcctttcttgcttagtttcgcttgatgataaatttcaaggaacccatagtgcactatttttaaccagtttcgaggttgaaaaaatgctaagagtttgtgtccagaggtttggataacattgttaattgtgccaagtatccattgagtttggctttattctttatcctgtttaactggcattttctctgctgtaagaaaacagtccttaggagccacgacaactgattttattggtaaacatatgaatgaggcatgtttcataaaactttataaatttaatattagaaggacagaagtttgaccagacagttcaataaagacaattttatatatattttaactttctttgattccattcacttttcaaattagatatttcagattgtaattcttagaattgaccatgccatttattcctctttcttgaaagacaaatagaataaacaaaaatttgtagacatctaaagagtaatctaaggactatagttttgactcatttctttcatgagtatagtttctcttttctcttttataatataagatatgcacccgtttgtctattcattcctttttgcttctccaaacctgtttgcatctttggttgtgactcatttctttatttgatcaattgttaccattgtatacagtctctttagttggatatttgctgaagtcagataaaccttactggtttcagggatatgattgtggtatgaaactgccaatcttctactttgatgttcatgattcaaaaacttcttgttcctttggagaaaatgagcctaagttagtcgtcatcctggaaataagttttgatttctttttatgaaagaatgccaggaactttcaccagtttatctttgaatctttattttccaaaagtaaggtagaaaaatcctcaccgttttactgatttgcagactggtaaagtgaacaaggtgttagaatcaagacattttactcaaagaccactaatttaaaaaggtaagtcagaatctggcccaagaccttgacctctcaaattagatttaattatgaactgcattaagtcccattatttctcctattttgcttatcaagtgataacttctagtcagactgggataatcatgaatctacagtgccgaaggcattcatgacaaagctcaccctttgaagcagaaaagcaattcatctgtgtcaaaaaaggatgcaaactaagttttgatcctgcctgatagtaccattttccagctataccttgtccagcattctttatcaaagccagaaagactatatgcaagaagaatttagaacagactaggtactataattctttgtgtttgaaaggtgatattttagacgtagagacaaaaagtctcccttgagtttttgaaagaaattgcttgtaagggcaaatgttttaggttgaaaagttgatattttttagtttccctgtttatgaatagttcacagggtaatgttgtcagtcattttaaacttattatttctccctcttggaaaggttatagattgccaacagaaagtagaactccctgtttctgcgtgtttttctctgaaatagtgtgtgacgtagtcacattactccaggctcaattatagacagtttgtgggttttttttttaataatgccaaaaatctgtggataatgtataataagctgatgtacatcctactagaactgaggtatttcagtttgtgacaaattatgtcttaacatgttacctcgttaatagtcattggttcataaatgctggggattttaaatttaactctttttatacctaatattaaaaattaacccaatttaacattatttcatctaccacattactggccttgttttgattctaaatctcatgtcctaatttacaaattaccaaattaattcaaatgtataacctctttatgatttgaggcccactctggaaaagaaaaatactagacatttctattaaagtcatgagtgatttttatgtgtcttgtggatccatcccccagagtcttgtcttatatctttatgttctaacaatgaagtttttttaacgtacttttagcaaaatatacatatatttacacaagtattttagagttacctacagtaggatttagaggtcttttattcccatgattatataacattaaacaatatgtagcccccaaataaatttttctgtgggaacttcttcacgttgtctgcacatgacagttgatcttgggttgtttcagtactttccttggttttcctcctgtgtctttagccattccctagaagtcccctttttctctcccttacaactgatggtctctatgagtccacttttagctcccttctcttcttctatactttcttcccctatattttttccaaagtaatgttatctgttcagtggcatcagccgctattaatatatgctcatgacgtccaagtacaaataaatacacaagtggtttactctagcccatatctctgttcccaactttgggcccctatcaactgccaactgcacctgacagcttgaacattccataaacgacctcaacatacctaaaatcatctcatcattttttttttttacaaatatgctcctcagtatcttcatcatcaagaaatgtcgtttactcagttgttcaagccagaaactaattaaattgttcctaacaactttttttcccttgcctctcatagctttttcaacctttgagacatatctccacatcattttgcttctctcttcacaggaattattctattttatcactttgtttttgcaacagcatcttagctaatttgtaactaattttaccctttgccagtccttttcttctgcttcttccaggttaatacttggttgtttgtttgtgtttgtttgtttgtttttcctttggagatggtgtctcattctgtcacccaggctggagtgcattggcataatcactggtcactgtaacctcaacctcccaggctcaaggaatcctcctgcctcagcctcccaagtagctgagaccacagatgcatgccatgatgtccagcttaatttttttttgttagaagtgaagcctcacttcgttgcccaggctggtctcaaacccctgagctcaagtagttctcctaccatggcctcccaaagtgctgggattacagacatgagccactgcacctgcccttaatacttttgaaaacacgtgtatggtcatgttatttcctcttaaaattttccaaaggcttcttatcctttcaggataaaatgcagactccgaagcctgacgttgaaggttccccataatctgacttctcctgttgtacgccacgcccatgtgacctcacgtttctcctttctctctctttcgcttccccctcttgcctttttcctttctcccccctccccttttctccctcagttaagatgctacttcttccatgacaaatgatgctataggaggaagtcatttctttctctgcgtttgctttgaacctctcctattgctttgtcttttttttcttaccatggattaaaatatctgtgtacatgttttctgttgaattaggagcatctaattcagtgttagacacggttctacgtgttagcagtatcatctggaataagacagcctctgttcttggggagggagggtccttgtctttttcattcttggaactttttagaggtgatttgacaaataaataaatgtctatttaaaagttactaaaaaaaaaaaaaaaaaagccttagcgaccaggcacggtggctcacgcctgtaatcccagcactttgggaggctgaggcgggcagatcacttgaggtcaggattttgagaccaacctggccaacatagtgaaaccccatctctactaaaaaatacaaaattagccaggcgtggtggcacatgcctgtaatcccagctacttgggaggctgaggcaggagaatcacttgaaccccagaggcggaggttggagtgagccaagatcacgccactgcacttcagcttgggcgacagagcaagactctgaatcaaaaaaaaaaaaaagaaagaaaagtcttagaaaaggttttttttttctaaatttttcaatatagattcatctaataatctcaaaataattttataatagcctaaataaaatcaactacacacgtattaataatgaccttctatccctatttgggatgcaaagtgaggcaataactacaacaataataatatattgttttacgttttccatgtatatattctgaaagcctcacgagcagcctgtgagaaagctgctttcattatactcgttttatagttgaggaaagtgagtaattttcccaattatactaataaatgagaaggaacagatccgtaactttggtttccttttgctatctaatgttgctcttctagatcttacctagctggggaaggggaaaatgtgaataagataccaaaataagtggatgttaaagtaattcaggcaagaaattatgaattagggttatgtcagaggtggaccatgaagaaatattgaggaggtagaatgaacagaagatttaatgacaaagggatatgtggaatttgaaggaaagggaggagttaaagatgatttaagctaaaagctcccaggacttttgaccccacttttctagtgtgcttggtttctcctttaaaaagattctggagaatagtttaacagttcccaatggaagtaaattataaaagctgagatggcaatatttaaaccctagagccagcagcagtggattcaaccctgaagtttcaagcagtatcctttgttttatggctaagaaccagtatcatctgttatttaactaggaagtacaagttcacctttacaggaccaacattttattttcttctgtgaaatgcataaacaacataatacacgacaatgggaaaagtcagatagcacagaaaggcctataaggaaaagcaacaacacatctaccttttctgtccccctttccacatcctcgagtgagtgatcctttcagctttcttcactcaaaactttgcacttgctcttagctaaggctgagaagcaatcatcactcagaactttagactcataatgttattttttattgactccttgcaacagtcagtatttagcttacttaaattgctgcctgttttccctcactccttctcccagtttttgtattattattattattattattttatgaatcctcttcgttacctttgtaactttaaatcatacacttaaaactcttaatttctctttatcatcttcccacaggctctctgcctagtgacatgtaaaataaggttatcagtacctctactcttccttccacttttcttcccctcccttcttctctcttccccttccctaacttctgacagttgaatttttatttttattcatttacacaggacatgcagccatatcttaaagttgaagactcatcttgtccttctattttggaaaattatgaacaattctcccaaatactgttttctctaatattttgttctgcaactcctagtagacttagagtctctttgtcttttttacatgtctcttaatttatcttctcttttttatctctttatgtcttttatcctttatgttccatgttttgactaaattgctagtactgtctttcaattcactgattctgtcttcagctacattcaatgtactgtcccctgcttatttagtttttgtctgtaactttactcacatatttgttaaattttttattggagtgtatactatacctctgaaagaatatgtgtactgtcagtttagttcactatatttttgcagtctgaaaaatttatgtaacctgacacccaaatcaagaaacagaatattcccaatactccagaagccctctttgtgcttccctccagtgagtaacacctcccttgagtaatcactattctgacttctgaatgcatattttaattttacctgttttgtgttatatataaatggagttatcaaataagtactcttttgtgtctgggttctttcactctgtgttgtgagttttactcatgtttttacatgtagccaatagttctttcaatcttatcccataaggtatcatattgggtgactatacaatatttatttgtctagcagttatccatctacttacttattcactgttgatggagacagagcccatttagtttggggctcttacagatagtggtaccatgagcatttccagtgaagtagtggttcttgacccagggagatagtggggctgtcacagagacccactcacagagccggtagataccttggttctgtttctgttcttgaatccatctgcttgattcgttatgccctgatcctaacaaataattagtcattgggacaggaggtgagtacacgattgcagttcctggtgttaagcgatgagcctgtatcttctataaagtgttgttagtccccctcatccaggaggagtgagagttctagctccccgaggctgctttcggatccatattcctggcaggccatggtgtattttgcagctctgttccatttatgcaccacacatacgtttaagttgtatttgagcccagctgtagctttctagatctctccttatagtcattgctatgtattttatatctcagagcatgactttaccaaaccatcttaaccagaagtatttctttgaatctgaagactcctggatttcaggatatatttatgacttctttttttcttcctttgtttaagctcagaaaacttcttgtattacttctttggtcatttcctttccttcattttcactattctcaccttctaaaacttctagttgttggatttagatttctcttaaattttttactctgtattttttatctccttttcttcatttagttcttggttgggggaacaaaatatccttgactttatcttacagtacttttgaatttttttattttgctaaagagcattttaactttcttacaattggaatgttctttttcatagcctgctgtatctgttttgtagctttagcgtcttcttggatttctcttaagaaattgattagaccttttaaaaaaatgttcttctacttcctgaattatttgtgtttcctacagccttagttgttaaactcatgtatcttctcttttatttcagaggtttttcacgtattagtcaattcttcattgtcccttcatgtttaaggagaactagattgattgtggcacatggccaaactgaaattcctttggtggtgtttgcaggtttgcttccctgctaggcctctgctctgggtgatacagctgactagcagctttgtataaccggcagaacctgtccactggtagccgtctctttaggatggatggtgtggatccactgtcaggttggaggcaccccccaaatttaagaagaaaaaggatttattctgggcaccaactgtgatataagcagtcctggatcatttcagtagtttatttagtatcatagaaaagatcatttcaggtttctctgcttacttgttacaggtggggaaaataataaactgcatgtcctatgtaagagcatagggaggtgaggaggggaaaccattgcagctattcaaaatagacttgttttaaagcttttattttaagtacaggggtacatgtgcaggtttgttatgtaggtaaacttaggtcatggaggtttgttgtacagattatttcctcgcccgggtattaagcctggtaccctttagttactttataattcgtcctgatcctcgtcctgatcctcgtcctgatcctcgtcctgatcctcgtcctgatcctcgtcctgatcctcgtcctcctctcaccccccctcctccattaggcgccagtggctgttgttcccctctatgtgtccgcgtgttctcatcatttagctaccacttacaagtgcgaacatgtggtatttggttttctgttcctgtgttgtttgttaagggtagtggtctccagctccatccatgtgcctgcaaaggacatgatctcattctttatttatggccgcatagtattccgtggtgtatatgtaccgcatttttttttttttttttttgagatggagtctcgctctgtcgccaggctggagtgcagtggcgcaacgtcggctcactgcaatctctgcctcccaggttcaagcgattctcctgcctcagcctcccgagtagctcagattacaggcacgtgccaccatgcctggctaatttttgtatttttagtagagacggggtttcaccatgttggccacggtggtctcgatctcctgacctcatgatccacccatctcagcctcccaaagtgctgggattacaggcgtgagccaccgcacccggccccacattttctttagtctatcattgatgagcatgtaggttgattctgtatctttgctattgttaatagcactgcagtgaacatacacgtgcatgtgtctttataatagaacaatttatattccttttattatgtacacaataatgggattgctgggtcaaatggtatttctgtctttagttctttgaggaatcatcatgctgtcttccacaatggttgaactaatttacactcccgccaacaatgtataagtgttcaggttccttttcccacaacctcgccagcatctgttatttttttactttttaataatagccattctgactggtgtgagataatattgtggtttcaattttttctctaatgatccctgatgttgagcttttttcatgtgcttcttggccacgtgttatgtcttcttttgaaaagcgtctgtttatgtattttgcccactttttaatggggttgtttttttcttgtttaagctctttatggatcctggatattagacctttgtcacatgcataccttgcaaaaatttcctcccattctgtaggttgtatactgttgaaagtttcttttgctgtacagaaactctctagtttacatagatcctgttcatcaatttttgcttttgttgcagttgcttttggcatcctcattataaaatctttgcccattcctgtgtcctgattggtattgactaggttgtcttccaggttttttatagttttgggttttacatttaagtgtttaatccatcttgaattaatttttgtatagggtgtaaggaagggatccagtttcaatcttctgcatatggctagccagttaccacagcatcatttagtgaatagggagtcctttccttcattgcttgcttttgtcaggtttgttgaagatcagatagttctagatgtgcaaccttattttggggctctctcttctgttccattggtctatgtgtctttgtaccagttaccaggctgttttggttactgtagccctgtagtatagtttgaagtcaggtagcgtgatgcctccaggtttattctttttgggtaggattgccttggctgttggggatcttttttggttttcatatgaattttaagatagttttctagttctgtgaagaatgtcattggtagtttgataggaacagcattaaatctataaattgctttgttcagtgtggccattaaacgatattgattcttcctatccatgagcatggaatgtttttccatttgtttgtgtcatttctgatttctttgagcagtgttttgtagttcttcttgtagagatctttcacctgcttggttagctgtattcgtaggtattttatactttttcaggcacgtgtaaatggaattacattcctgatttggctcttggcttgactgttggtgtagaggaatgctagtgatatctgtatattgatttcgtatcctgaaagtttgctgaagtttttttatcaccttacgaagattttggaccaagacgatggggttttctagatacaggattgtgtcatctgcaaacagggatagtttaatttcctctcttcccatttggataccctttatttctttcttttgcctgattgccctgtccaggaccttcaatactatgttgaataggagtggtgagagagggcatccttgtcttacaccagtttttcaaggggaatgcctccagcttttgtttattcagtatgatattggctgtggatttgtcataggtggctcttattattttgaggtatgttccttcaatacgtagtttattgagagtttttaacatgaagcaatgttgaattttatcgaaagccctttctgcatctgttgtgataatcctgtagtttttgtctttagttctgtttatgtgctgaatcacattgatttttgcatgttgaaccaaccttgcatcgtagagacaaagcctacttgatcttggtggataagccttttcatgtgcttctggattcagtttgtcaggattttgttgaggattttgcattgacgttcctcaaggatattggtctgaagttttctttttttgttttatctctgccaggttttgatatcaggatgatgccgacctcgtagaattagttggggaggagtccctcctcctcaatttatttgaaatagtttcaggggtaatggtaccagcccttctttgtacatctggtagaatttagctgtgactctatctggtactgggcttatttatttactgtttatttatttggttggttggttggttggttggttggttggctatttgtggcttcctcaatttcagagttcattatgggcctgttcagggattcagtttcttcctggttcagtcttgggagggtgtatgtgtccaggaatttatccctttcttctagatttcctagtttacatgcataaagttgttcatatattctctagtggttgtttgtatttctgtgggttcggtaataatatcctttttgttatttctaatcgtgtttgtttggattttctctcttactagcctatttagcagtttattttattaatttttttttaaaaaataaactcctggactcattgatcctttatatgggttttcatgtctcagtgtccctcagttcacctctaatttttatttcttgtcttctgctggctttgaggttggtttgctctcggttctctagttcttttagttgtgatgtaaagttgttatattgagatctttctaactctttgatgtggacatttaatgatatgaacgtccctgttaacattgtcttagctgtgtcccagagattctggtatgttgtatctttgttctcattagtttcaaagaacttcttgatttctgccttagtttcattatttatgcaaaagtcattcaggagtaggttgatcaatttccatataatggtatggtttcgagcaaaattcttagtcttgatttctaatttgatcatgctgcggtctgagagagtgtttattatttcagttcttttgcatttactgaggagtattttctgtccaattatgtggtcagttttagagtatgtgccatgcgaaggtgagaatgtatgttctgttgcttttgggtggagaattctgtagattcctgtcaagtccctttgatcctatgctgagttcaggtcctgaatatctttattaattttttttttttttgagacagtcttgctccattgcccaggctggagtgcagtgatacagtctcggctcactgcaacctccgcctcacgggttcaagcaattctcctgcctcagcttcctcagtagctgggactacaggcatgcacgagcatgctggctattttgttctgttttgttttgtttttgtatttttggtagaaacagggttttgccatgttggccaggctgatctcaaactcctaacctcaagtgatctgcccacctcagccttccaaagtgctgggattacaggcatgagccactgctcctggccttaatctttgatctaatactgttagtggggtattgaagtctcccactgttattgtgtgggagtctaagtctctctgaaggtctctaagaacttgcttcctgaatccgggtgctcctgtgtcaggtgcatatatatttaggatagttagctcttcttgttgcattgaaccccttactatttagtaatgctcttctttttcttttttttttttaatctttgttggtttaaagtctattttttctgaaattaggatgtaatcctgcttttttctgtttgcttcgtagatttttctttatttattttgagtctgtgggtgtcattgcatacgaaatgggcctcttgaagatagcacactggtgggtcttggttctttatctagcttgttgcttggtgccttttaataggggtatttagcccatttacattcaaggtttgtactgatatgtgtggatctgaacctgtcatcatgatgttagctggttattatgcagacttgtttgtgtggttgctttatagtgtcactagtgtgtttacttaaatgcgtttttgaagtggctggtaatggtctttcctttccatatttagtgcttccttaaggagctcttgtaaggcaggtttgatagtaatgaatttcctcagcatttgctggtgtgaaaaggatctgatttttccctcacttatgaaggttattttgtccagatatgaaattctggcttggaatttctttaagaatgttgattattggtgcccaatctcttctggcttgtagggtttctgctgagaggtccgctgttagtctgatggacttgcctttgtaggtgaccttaccttaccctctagctgcctttaacatttttttctttcatcttaactttcaagaaccttatgattatgtcttgaggatgttcttctcatgaaggatctcattggggttctctgcatttcttgaatttgcatattagtctctctagctagggttgggaagctctcatggatgatatcctgaaatacgttttcagttgcttacgctctccccatctctttcagggataccagtcattcatagatttggtctctttatataataccacatttcttggaggttttgtttattcctttatactctcttttctctattattgtctgacttccttatttcaaaacgtcagtcttcaagctctgagacactatcctcaccttggtctattctgctgttaatacttgtgactgcattatgaaattcttatagtgtgtttttcagctctgtcaggttgattacatgttttttctttgctggctattttgtctgtcagctcctatattgttgtactgtgattcttcgcttccttgattttgtttcagcatactcctgcatctcaacgatctgcattcctatccatattctgccttctgtttctgtcatttctgccatctcaacccggttcagaacccttgctggagtggtggtgcagtcattttgaggaaagaaggcactctggctttttgagttgtcaagagttcttggattggttctttcttatctttctggggtaatgtttgttcaatctttgaacttgctgacctttggatagttttttttttcttcttcttcttttacactatttgatgaccttcagtgtttgattgtggtataaggtggattcagccaactgactgtttctggaagactttagggggccaacactcagctctgatcttctagactgtgtgctctaactttgggggacttatattgggcaatgactttgttctctggctcctctgaggttaggagtccactgtgctggtggggccgaagtgctccacgatcactggtcactacactctaatgggtggtgtctgccaaagtgcttcatagtgtggcggcagcaggatccgtcctcatttgcacatgccagcaacagcagcagcgcagcagagtgcacgctggacaactgtgacagggtgctagcaggtgccagggtgcctgcccccatgtaggcattcaccgcagtggcagaggcagctcagctggacgactgtgacagggtgctagcaggtaccagggtgcccgcccccatgtaggcattcactgcagtggcagaggcagctcagctggacgactgtgacagggtgctagcaggtgccagggtgcctgcccccatgtaggcattcactgcagtggcagaggcagctcagctggacgactgtgacagggtgctagcaggtgccagggtgcccgcccccatgtaggcattcactgcagtggcagaggcagctcagctggacaactgtgacggggtgctagcaggtgccagggtgcccgcccccatgtaggcattcactgcagtggcagaggcagctcagctggacaactgtgacagggtgctagcaggtgcccgggtgcccgcccccatgtaggcattcactgcagtggcagaggcagctcagctggacaactgtgacagggtgctagcaggtgccagggggtgccagggtgcctgcccccatgtaggcattcactgcagtggcagaggcagctcagcctggggggccagagagcccttgctggtgactgtgcatgtgatatcactggtggttgtgttaatacggatgtgggttactggtggggacaggtctctgtgtgccccaggcaggggtggttgctcagggttggggagggtctgctgtcctctgtgcctggtttcactcctgtggcagtgttggcacaagggcagggctggctggttctgtgctcaccaaggctccaactgcagtgacggtccagcagaaggggaacaggtggtagggtgcacacacacatgcacactggcagggcaaggaaagcaaaatctgtccacgtacacatgtgctggcaaagagatgtggaggcttgctgtaggcctgggggaagctgtaatgtgtggagaaagcaggcaggcctggtgcgtggccagcgtgtgaccgtgggggccagcctgcttgagttctctgccagtcaggcatagttccccagcacaggagctataatgacagcctccggggtacccaaggctatcctgcaagcaggcacagctaggctgtggtccctagagagtccagcagaccaagaggtgctcaggttggaccagccccatctgatgggcaagacctccagagttcaggtcttgcagaggttaggtccagttgttcccctggggctaaagtctcctatgggagcaagtcaagcctagggagatgggcttccctagccatgctccactacagactctaccacaccaaaccctctgggttccacctcagctgacgcgctgcccttgcttctctaagcagctctccctgccaaatcggtgtctgtggtagatgaggggtcatcttctgctggaattccagaggcccgtagcaagaacagattactcttcgtgagtacaactcgctcattccctcagggtcgttgggggctaggaacgagtccctgtgtgcagtagcccggtgcagcgttcccagcatcctcccctttcagcctgcttctgtgtgttccctccatccactctcactgccttccctctgaaggtctgttgtgccagtcagctcggtttctcgctggcagctgttccacctggctgcttttagtaggctttagtgcccttcccctcttttttaatatagagacagagtctctccatattgccgaggctcgtttccaattcctgggctcaagcagtcctcctcccttggcctcccaaagtgctgagattacaggcatgagccactgtgtccagcctagtactctcttttaaggatgtgttttccagttcttgttattttcattctaaggggtacattgccagtatattctaccttcttccaaaggaataaatacagattggtttaaaacatagaatattaacatttctatttttccttgaatgtccacttattcttttctttttcttttttttttttttttttttttttttttttttttttttttttgaggcagagtcttactctgtcgcccaggctggagtgcagtggcgcaatctcggctcactgcagcctccgactcctgggttcaagcagttctcctgcctcagcctcctgagtagctgggactacaggcgcacgccaccaagcccggctaatctgttttgtattttcaatagagacagggtttcgccatgttcaccaagatggtctcgatctcctgaggattataaatcatgctactataaagacatgcacacatatgtttatttcggcactattcacgatagcaaagacttggaaccaacccaaatgtccatcaacgatagactggattaagaaaatgtggcacatatacatcatggaatactatgcagccataaaaaaggatgagttcatgtcctttgcaggcacatggatgaagctggaaccatcattctcagcaaattatcacaaggacagaaaaccgaacactgcatgttctcactcataggtgggaattgaacaatgagaacacatggacacagggaggggaatatcacacactggggcctgtcatggggtggggggttgggggagggatagcattaggagaaataactaatgtaaatgaagagttgatgggtgcagcaaaccaacatggcacatgtatacctgtgtatgaaacctgcctgttgtgtacacataccctagaacttaaagtataatttttaaaaaaagaaacttgaagctttgggatcagcctggaatatttttcataaattctgttgacagtttcttgctgaatcactttgaatggatattcaaaacttcgtttgaacttaagaaaaataagaatttctttttgtatttcactgaatggtaaacagtttctactctcttctgggaattcatagatgaaaggggatggtttttacctgtccaaatctatggagaaatacacaaaacaggagattatattaataatatactataataatataaaggaagtatgaacagctttcagtgggagcttgtagagagagtttttcctgaaaaagtcaagtaaagataaaattcagtaagcaaaaagttaatgcgggccgggtgcggtggctcacgcctgtaatcccagcactttgggaggccgaggctggtggatcacctgaggtcaggagtttgagaccagcctggccaatatggtgaaaccccgtctctactaaaaaaatacaaaaattagctgggcatggtggcacacgcctgtaatcccagctacttgggaaactgaggcaggagaatcgcttgaacctgggaggcagaggttgcagtgagccaagattgcgccatcgcactccagcctgggcgacaaagagcgaaactctgtctcaaaaaaaaaaaaaacaaaaaaaagataaagcaaaaaatgcagggatagagaaaccatggcaaaaggtgctaagtgctgaatttaagtgtagaacctagactcaatctgagaggacatcatcccatgtctgcctggtattgtacagaccctcctagtcttttagctagctcttaaaggataaatcagagaagagagcgttgcgcgtattcttagttgataaaatagcagatgaaaagtcacagaggtatgaaatattaatattaatgtgtatttgaggaactataagaaatttagtattgctagagcaaagaatgtttgaggagaattttgaggaaaaggctagaagggctttctatgccatgccactaatttaaattgctattctatagcaaggaagtgatgtgatccaatccatatttcaggaagatcgtgctgaccctgtaatccattacatgaatgcagacagtaacactctcaaaatttattaaacacacttaatgaaataaataccagtatctatgttatctgccttttttgcctgtcactcatgcggtcctcacaactccttccagcccctaaactaatcagtccgggcattagagagctttgaaatgtttattaagaaaacagtcctgttttgacagacaggagttagagcacctggacttaaagcaggctttacagctctactggggatctctcatgtaggcaacatgaggccagcagagccctgtgcaaacaggcatcataagcaaatgaccatttcttttccattatagacttcatccttcaaaagggagtgccattcgtcccaactagtattttccccccttttatctgtgtcactaatgctaaattagttcatgggtcattcaaattctagcagctttggtgttagtctttatatttcagttccagtgctccgctgattattttggcatgaaactatcccatacagtcatcatgctgcttttaattcaaaagattcctatgagctgcaccaggaatatcgtatctagtacaaaaactgtatgtctgttcttccctgaagcagattctcttgtaacttgagtttagttatcttagtattgatattgagttatttttagagagttctgtggtggttagtggctcggtgttttcatcagtcgttcacttaactatcctttcggaacatctgtgccacttacgctgtctcacttctcacccaagtcttagatgctttttcattcttcatattactaggaaagattaaacacatcatataatgccagtgactgcaggactttcctttaaagcttctaaactacctgccagtatgctgaaataaggtatattctgaagcttatcgtttaaattgtagatttcatatgtaaaaacattttttttttttaagacagtcttgctctgtcacccaggctggagtgcagtggcgcgatctccgctcactgtaagctccgcctttcaggttcacaccattctcctgcctcagtgtcccgtgtagctgggactacaggcacccaccactgcacccggctaattttttgtatttttagtagagacggggtttcaccgtgttagccaggatggtctcgatctcctgacctcgtgatccccccacttcggcctcccaaagtgctgggattacaggcgtgagccaccgcgcccagcctgtaaaaacattttcatctttgtttataaataaaacatctgattatacaacaatacttttatgggactcaaagaggggagtcagggttggggtggggtctgtcatttatttacttatttttaaaagatacctggcctggttctgtggcggtggcttttcttcgctaatcatgagctgtactttgagtatgcagtagattccgtcagcatctcagtgggagaaaggggggaaagaggggttttaacacagtgttctctttgcattgagtgaagaagctgttgatctctgaaggaggaaaggagagactggaaccacatgaaggcttgtgctgtgaaaccctgaaaccctgacggtgccttttgatcactgtgttttaacaaagctgacaatcctcagccacacaaatcttgggaactaaaataagtattcatttaactcttgactaaaggttaaaagatacagttaaaaagaaatctaaaacccagagtggtaattccactttttctttctctttctgttgttggaacctgagctctctaggaaaactaacatttgttaagggcctgccatgtgccagattcctgtctgtaagagaggtataattattattttacactatctcaatcttaataacaactccgttaagtttacacatttatatttccatttgacagttaaaatcaaggaagttcaggaagctgcttgtctagggtcatacaactagtaagcggcactgtccagctccagaacacatgctttttcttgtgtattttagtgctccttcagtcacttatatgatttacttatttgttattcttttataaatttaagcagtagtacaaagtagaaagaataaagaaaaaaacagcccccaagtcaattgcctagaaaataatcattatttgtagtaggtaagcaggattcctgtcatattcctatgcacatatagaaaaaaattaacatataacatgccattttaaataaaaattgaatttaattttacttgacattagcagaataaagagaatttcagtagaatatttcttctttttttttttgagacggagtctcactctgtcgcccaggctggagtgcagtggcgtgatctgggctcactgcaagctccacctcctgggttcacgccattctcctgcctcagcctcccgagtagctgggactacaggtgcccaccaccacacccggctaatttttgttctattttttagtagaaatgggatttcaccgtgttagccaggatggtctcaatctcctgatctcgtgatctgcccgcctcggcctcccaaagtgctgggattacaggcgtgagccaccacgcctggccagaatatttctttactataaaggagaattcctaagccatccttccaagtttaagaaaagagatagagattggggttatgttttacaacagcatcttttatttttattttaatcagtattaattcatgccatgctctaaaagatgaagaaattatcacttcttctcaccagtttttaatgatatagttttatatcagctttaccaaggtttataatatttacatcttattttataactcccaggctacttagtctgggagttaaattcagcacttaacaccttttgccacattttccctatccctgaattttttgctgtatcgttttgcttatttaattttatcttcacttgactatttcaggaaagactgatgctgaattctggttttcttgttttatgtttgcatgcttgatagtgtttatttgccattctacttgaagtattacttagctagttacgaaattcttaggtgtgttcttctaatgcagagtggatgaatgttcccggatgctctcttcctgccatcactgcatctgatgttgcccctctgagttagaacagaagggccaggaattgacttcagcctgcttttctataacctgggaaatgtgaggagctaggactattctcagctggatctccactgtctttgtggaaggcctggactcaagtttttgttgtttgtttgtttgtttgtttttcctgaaattttgataaatatcctgtattcatcctggtaagcatgagaaggttcagatcgtctgtgaaattctttagagattgctagaaaacagcatatcctagtaatttttcttgcctttatgaggttgccatagttaaatgttttgtcctgactcatctcttaaaccaccagtccacccttttccatctgtttttctccacatttggggatattactgggaattctcacagttttatcacctcacttctgaattgcttctgggcttagaatagggtaaagagcaacactatttttcaccaaaatttttgttgattttattacctgcagcccaacacaaaaatactgacaaacctttcatttctaggagaacaactgattgaccctaatagaaaaaatagactctatcagtcaggtattccagtgtataggaaacagcgtgttgtgacatttgtttatttaagagatgatggttttcggccgggcgcggtggctcacgcctgtaatcccagcactttgggaggccgaggcgggtggatcatgaggtcaggagatcgagaccatcctggctaacaaggtgaaaccccgtctctactaaaaatacaaaaaattagccgggcgcggtggcgggcgcctgtagtcccagctactggggaggctgaggcaggagaatggtgtgaacccgggaagcggagcttgcagtgagccgagattgcgccactgcagtccgcagtccggcctgggcgacagagcgagactccgtctcaaaaaaaaaaaaagagagagatgatggttttcaggttttttgggttttgtttgttttgatcctttgaggatggtatgttgtagtccagagaaggtatttagaattgtgacaaggtaataaaattgagacaaacacgattatttatctttgtcgagagtcactcctggcaattttcacatggaccttcgttgaaatgcatcattgaaatactagcgtacattttaggtattttactgtttcacggtatgcttattagtcagtgtaaaatgcatcctaatcaaaattaactactttgaaaagggaagttgatcgcttcttggccatttggctaagatcaactgaaaagggaagtagagataatatggtacagcaatttatttttaaaacaattagtttttttaaactgacaaataaaaattgtgtatgtccatcatgtacaacatgatgttttgaaatatgtatattttgtggaattgttaaatcaagctaattaacatatcattatctcacatgcttgtcatttttcatggtgataacacttaaaatctatactcagcaattttcaagatgtagtaatttctatatagagaaaatctgtagaactcaggattgtctattttgaaggttcttaagatgtatttccaagaaaatacagtataaattttgtgattgataccacttttcatgctagccacataaattgtcctttttgctcccaggttaagaattcaaggcttacaaaaatgaacacaaggctgggcacagttgctcaagcctgtaatcccagcacttgggagaccgagacgggcagatcacctgaggtcaggagtttaagaccagcctggccaacatggtgcaaccccgtctctactaaaaatacaaaaattagccaggggtggtggcgcatgcctatagtcccagctactcaggaggctgaagcatgagaattgcttgaagccgggaggcagaggttgcagtgagcagagatggcgccactgcactccaatctggtcaacagagttagactcggtctcaagaaaaaaaaaattataattgaaaatgaacacaggtttcttgtatgtctctccacttagttgattctctagagtgtggtacattttacaatgtgttgtctgcagtgtttatttacattgtctggcatgctacaaaggttggtagcatttgctaataaggaaccactatgtgaccagtgtaaatgatctaccagtgcctcttcctggtttcgatttctttcctagcaaaatacgggtataagaagtgaaccagacgtctttaagaaagagtatgtctgctactcttgtttccaaaagtgtttatatttattcattaaagaacttttgttactgaattctttttaggaaacttagtgaaccatacactgcctgtatggccaatgatgaagaatcagcttaaggggaaaaaatgtataatgtccagccaggcgcagtggctcacgcctgtcatctcagcactttgggaggccgaggcgggcagatcacttgaggtcaggagttcgagaccatcctggccaaaaccaacatggtgaaaccccgtctctaccaaaaatacaaaaattagctgggcgtggtggcaggcgcccatagtcccaattactcgggaggctgaggcaggagatttgcttgaacctcggaggcagagcttgcagcgagccgagattgtgccactgcactccagcccaggcaacagagtgaagactccatctaaaaaaaaaaaaaagtataatgtctcacaatataatgcaacaagatttcctactcaggacttacaaagacctgtgtctcttaaaatacacgggtcaccggaatgtaggttttttggtaagtgctgagcattcctatattcatttccttcctctgttttatgattcactggaaagcttcaagccttgaaatatttctgatttgatttttgcaatatactttttcttcccattgccatgctcgtatttctgcacacctcatgtgcttatacagtccaatcattttgatgacttggggaggtgtgaagaggctgagctagacttcatattttctcctgtcccgtgttcttattgtaaaggaatgtagtaatgcactgtgtcttttttgtgtctgttgttggctacatgtcctcaaaacatattcaacaagtagacgtctattgaaaagaaattttcctaagttgtccccaagaaaacgacgacactggagtcagttccgtgtttataacagagtcccaacacttgtttttctccagggtttctacaagaagaagcataaaacagtgttagtatgtgactgacctttggcttcaaggcttcagtaaatccgtaaagtgagattgattaggattaatagctttttgtcctagctaaaaagtgttcgagatcttggcttaaaaagagttctttttggccgggcacagtggctcacgcctgtaatcccagcactttgggaggccgaggcgggcagatcatgagatcaggagtccaagaccaccagcctgtccaatatggtgaaaccctctctactaaaaaatacaaaaattagccaggcatagtgccatacgtctgtagtcccagctactcgggaggctgaggcaggtgaatcgcttgaacccgggaggcagaggttgcagtgagccgagatcatgccactgcactccaacctggacgacagagtgagaccgtctaaaaaaaaaaaaaaaaaaaagttatttttgataccttggaatgtgttggccgttttaggtgcttccagcattttattcaaagagttgagaacataaaaggatagcttgattatacttagaccttaaaaaacttttaggagttcatcaaacacataacctttacaactggttagacttccagctttcctaaacaagagtatggcactcttgccagtgttggtttaaagtacatgtaatttacataaaatagcactgactgcagcctaggtctctaagcagagaatgctctgacaactttgtctccaggtccactctactgttccttattgaggagggaaaccaggttcacagtgttgtgctttcttcttttggcaccaaaaggggctcctcctggtttatgagttttaaaggatgagggaaaaattcatcatgggggatgttattttcctcagtgggtaagtgaagtcagggaaaaacagaaaacaatggagataagaggatgggatgcgttcagtttattctgttgttctcaccacagtaattgactcagaagggactcattctgaatttagtatctagtgttaaaagaacaggcctggggcaggcggaggccagcactgagacacagtggtgggttgagacctattgtattttttaagttgttccaaggctgtccaggtgtcctgatttaaagcctgcttcttaagtcaggaaattgtatcttgttctgaggtttactgtaataaagtacacagtcctaggggatggtacttctggctccatgaatcactttacaggctggctgtactgacccaagcctcatgatttatttatgccataccacagtaggaatggcaaatatgtaagccacacatggtctatgggatgggcctttaactgggaaactgccataaatccgtgaagtcaggtaggacagagccagcaggagctcatgtcgtgtacaagatttcttcctgttttatagggacttacagttctagagctaattaagttcatcctccttagagtgtatctgtcttagtctgttgtgtgttgttataaaagaatatctgcgcctggataatttataatgtaacaaggtttatttagctcatggttctgtgggctaagaagttcaagggcatggccctggcttctggcaagggctttcatgctgcgtcacaaaacagcagagaaggtcaaaggggaaggggacacatgcaaacaggagaacctgagggtccatcctggctttatcacaacccactctcctgggaactaatctgttccctgcaatacctaatgcagtcttgtcagagtgggaactcactcactaccacaagatcagcaccaagccattcctgaaggattcatgcccctgtgacctgaacacctcccatcaggccccacctcccaacaccatcatactgggaatcaaatttcaacatgagttttcgtggggacagacaaaccatatccacaccatagtgatatccttggactttttgtgtgctgtgtttatccagtctttgatttactgcttacaaatctaaagaatagctctgaaatatagtctagtcctattgtcactgatattttctcttcgatttatttctataaagtgttgcccatgtttttcaaataatttctatgttttgagtaaatactaaggagtgcgatggccagatcttaagagtatgtttagttgtgtacagaactgccaaactgtcttccaaagtgctgtaccattttgcgttcccaccagcggtgaatgagaattcctgttgctcagcattcttgccatcatctggtagtgtgtgttctggattttgtccattgtggtaagtgtgtagtggtatctcattgttctcatatgcatttcctgattacgtatgatgtggagcatctttttgtatgcttatgtgccatctgtatatattccttggtgaggtgtctgttaaggtctctggtgcattttcttccttttatcttgttttatttttgttttttataatattttcaatttttaattgatacaacataattgtacatatttatggggtacatagtgatgttttaatacatgcagtgtatcataaggcccattttttaatcagatcatttattttcttagtgttgaattttaagtatcttttgtattattttggataacagtcctttatcaaatgtatcttttgcaagtattttctcccattctgtgtcttattttctcattctcttaatatttgaatatttaaacacatattatttataaattaatggtacattatttataataatggttaaacggttggtaagtaaatcactgctgagtatatactgctttgaagggcccaaggatccattaggcctccagctttaacccagcacagcattctgaaatacccaattctccccagagtttcaagagtcaccaggccttaaccttcttattgcctcaaggactcttagagctcaccaggctcctcctaccacaagccttcatcatatcaccctgttcctgttgcttagggagctttctcaggatagcatttcaagattgagtacccatcctagttttctcagtgttccttgtgagccgtgtcacatagaaggcatttaataaatgtgtgctgaactgagctgaaccagcaagggcaaaagggatttaagagactgccgttttaattgaaaaggagtaaaaagacactgggaaaggcagcatgtattgggggaatatgagaaatttccaaatcactggaccatcaggctggaaaatttaggttggagccaaactgcaaatggtttgaatgtcatcatgtatagtttatgtatttatatatacttacctttctcatagaagggtgaatttttatattataatagctagaatgttcttagaatttatcttcttaattcagaaaacatcacattgagatctgtcagtaaaccccccacacacacaaataatttcttgtcctcattgaccttcggtctgagctcttaatgcagttttctctactacacttgtccatgcacatagtggtcgcagacatttgagagaatgaaaatcatgtgtttaatgagagattgttatcggagactgtagcacttgttttactttattctttctattgctttttctctttttgtttctttcaaagtacatacaaatacatattcattatatcctatgtaagggaatgtgtatttactctagaataggactactttaagtttgagatggctttttgcttttaaaaatatagatgagtgtgatttaggcatgtatattcagtcagatcttttagctctcaccttgataaaattattgggtacgagaagcaatcaagtcttcttttcttttcttttttttttttttttttctgagatggagtctcgctttatcactcaggctggagtgcagtggtgtgatctctgctcactgcaagctccgcctcccgggttcacaccattctcctgcctcagcctcccgagtagctgggactacaggcgcccgccaccacacccagctaattttttgtatttgtagtagagatggggtttcaccgtgttagccaggatggtctcgatctcctgacctcgtgatccgcctgcctcggcctcccaaagtactgggattacaggcgtgagccaccgcgcccggcctacaaataatgctttaacgctaaagagacaggagaacattttcaaatattttaaggacagttatttgaaagaatgaatttcttttatggagcttaaaggaatagaactagggttacaaagagacagctctttcagtcttaataattatgcaggataataaaaaatataaataaaacttaaaaacagagagcttttgggatcagttctataagtaatttcctaagaggttgtcaaagctggtataggcaccagctcattcaatgtgtttaaacataggctggggggccacttggcagccatgtggtgtggaacacaagcaagccgtgattttcatgaatggatctgttctgtgaggtctcttgttatgctaagagtttgtgattctggttttgttttgtgtgatcttgaaagactgatttatgatctctttccacttgtttactgctgtttactgctcagcccattgcaatatagcttctgcctccagccctgaaactaccctccaaagtagtaactttcgaaaaactaaatccgatggaaattttgtattctttatcttgacctgcctgtgaatctttaacatgttttatctcttcttatttctggaaactttctttatctttggcttccaggggaccaccttctttttgttttctttttcctctaagaccattccccctcagttcttcatagacttcttccaccagtgctgtgtgccccgcctcttatcttggtggtctcgtgtcttatcttggtggtctcatgtactcctgtgattttaattactttcagtgctgatcattcccacgtagtctttaatcgggtcctgattgcaggactgtcagtacaactgcctaccaggtatctccccagattcataaggttgatgtaaagattaaattacttagttaaggccaggtgtggtggctcatgcctgcaatcccagcactttgggaggccgaggtgggccaatcacttgaggtcaggagttcgagaccagcctagccgacacggtgaaacccctgtctactaaaattagaaaaaccagctgggcatggtggcaggcacctgtaacaccagctactcaggaggctgaggcaggagaatcatttgaacctgggaggcaggggtttcagtgagccgagattgccccgttgcattccagcctgggcgacaagagtgaaactccatcttaaaaaaaaaaaacttagttgaaggtgcctagtagaatatctggctctatagtaatcatgctggcaatgctaattatagtgagtgtttacccagttcattcatactcttgaagaatcatttatttatccttttcttgggtcagggcgcaacagagccttgctctgtcatccaggctggagtgccgaagcgcagtgtcggctcactgcaacctccgcgttctaggttcagttgattttcctgcctcagcctcccaagtagctgagactacaggagtgcgcccggctagtttttgtgtttttgtagagacggggtgtcaccaagttggccatgctggtctggaactactgacctcaggtgatccgcccacctcagcctcccaaaatcctgggattacagcagtccgcccactgatttatctttaaatcaccacttcccaaactgttttctcttgtactagtatccctcaaggtggtaagtgatgttccacccagaaaagagagaaggtggggttccatgatcagttaagtttggaaaatactttataggtagggttggaactttttcaggggccagattgtaaacttactgggctctgtgggccatttggtctctgtcacactactcaaatctcttgtagcaccagcgtagccatagaaaatatataagcaaatgagcaaggttttgttcactaaaattttatttgtggacactaaactttgaatttcatataattttcacaaaatgtaattattatatgttatatgctatattatttggggttacaaaagtattattattttcttttttttcaaccatttaaaaatggaaaagccattctttgctcatgggccatgggctggctttgaccatgagtggcagtagcttgctgattcctgctttaaaatatagccccctattaaagatatgcaacctacaccataaaaagcttttctaagttctgcagcagtgctgttatgaccagtgttcctcaaacatatttgaccgtggaaatcttttgtcatgcttatttgttactgtctcttgctgtacttctgtggaatgtgcttttgagaaatactgacctagagaatagctatgtatgccagaggtaaagtttggcctgtggagcagactgtaaataacaagagaaagcgtcttgtctttattcctcttgctctgatcgtcagctccaactggtcacagacagaatggtattttgggaaactgaattcactctacgaggtgggcaccagtgaaccactaaagctgagtcaaagattagctgaattgagggtggacatgatgaagttaattccgtcaaccagcttcagaaatgggaaaaatggctttaacgtaaggtaaaatagaggtgctctaagtgagataaaatactcggtcctggctgggtgcggtggcttacacctgtagtcctagcactttgggaggccaaggtgggtggattgcttgagctcaggaattcaagaccagcctgggcaacgtgatgaaaccctgtctctacacacacaaaaaattagccaggcctggtggcacatgcctgtggtcccagctacttgcagggctgagatgggaggatcgcttgagcctaggaggtcaaggctgcagtgagctgagatcacaccactgcactcctgcctaggtgacaaagtgagactgtcaaaaaaaaaaaaaagtgtgtgtgtgtgtgtgtgtgtgtgtgtgtgtgtttatatatttatattccgttgaggaagaagagatccagaggtcatatgcaaaatataaacagtaataggtatcaatttctatagttttgaaatctttactgctgttgttttaaaatatgcaaaagtttaaaacttaaaaaattgagtttatatataataaaattctaaaacttgctttgaaataatattttcagttgctgtttttgtgtgtgtgtgtctttgagaagtaggatgtgtgactcagtagggagtaaaggttattgctttactattttgagcatatttttccctaataaaaataatgccatagctaaggagagaaccttcaaattaaaaacaaaaacactttcattttaaaagtctacgcttcccatctttttatgtctactttaaccgtatgccccttattaaaaggaaaaattggtgtagtaagcattgtttttaaattctgtctggcatttggcaagcagctagaacctataggaggatgcagaaaagatgggaccatcccagctgatgagaatttatctacctgatgcaggcatagtcattgcccattcccacagaatttacataccaggtgtctcattccaaacctgtgtaggagaaaagggactcttatagtttttgccaacagattgatagctgatgaataataaaattgttgaatcattaatgcaagaaggtaataaattaccgggtttgttttcatccatttggccaacaaatgtttttggtgacctccaagatctcagtagccccaatgtcttcagtactctctcagcatcccagcatgcactcatatatatccctgacagctttcataagcttcctatacagctataggagtatatctcggatacttacgcattggagcagctcctactttttttgtaagtgtaccacaaatcccaaaattagatgttctatgtaacgctggctattttatgagatcaagacacagttggatcttgattttgctggaggtggagacctgagtgccctgacactgctggcattcttctagcaaacgtcatgacaaacagacgtggaatgcagcacaggctaaagaaaggcgagcaagccccctcggtagcacagtgtggacagctggtatggacatgctatccatctaaaactgggaaaggttaaataaacagtgggacagtgacaaagtgcagagattaattgccgaaagcattcaataattcttaaaacagacatctaaataagcagaagcattctggagtttgagttctgagagacaatgtaagaagactttatttacttttggagacagagacttcctaaggaaagaagacaagataaatggtgtagtccaaaagtagacatatataacaacaggtgtaccttagtttgaagggactacatcttcatatgggaagattgtattctgaaattttctgttcatattacatacactataaaacatgaagcgtaaaggacatactgttgtaaaataataaagacaaaatgagagaaaaggccaatataaatctttttatcagaccatctccagatgttactgtgaacctactacttagcttcatctcttgaggctcaagctcagcttcccctcctccaacttcatccccagatctccagcgcagatcagtgggtttaagacataattcagtagagattttgataggatttgagtaaatccctaacagaaactcccttggcttgccagctatttttaaaggcagatatgtagaaagcagaagatcctaaattcacctatctgtcttgtgatagcccttgccaggaaaataggagatttgcccaagaatatattataggatgttcttgtggtacatgcctgtagtcccagcttcttgggaggatggcttgagcccagcagtttgaggctacagtgagctgcgatcatgcctgtgaaaaaacattgcaccccaacccggacaacatagcaaggccttgtctgttcaaaaaaaaaaaaaacactaaacttttttttttttcaaataatacattagatagaaccaacccatagaagtcatctctgcataatatttctaagtccaataatgatcaacattatgagtgcctgcaatatcatgagaatttaagagtcaaaagttactttgatcattttcactatggaattgaaagattctttttatatacttattggattaggaaagtacatacaaatgctaaaaatccagtcttggcaaggatgtagggaatcagaggtatgtaataccttaatgttggtcttttaaatcagctcgtcttcctctaaaacagtggatctcaagtatagatgtccattccagaaactcagtaggtctggagtagagcacagacttccattttgaataatttctttcatgtttgagagccaccattgtaaagcaaatctgataccatgtaataagctatacaactctccacagccgctgacctatttgtgagcccttcttgggttctgcaggggaaagctgcttcccgctcatagactgaattatgtcttaaatccactgatctgtgctggagatgtggggatgaagttggaggaggggaagctgagcttgagcctcaagagatgaagctaagtagtaggttcgcactctggattgattttcatatgctaaatcatttagaatttccatatccattttcacttcaaccgttatagtttggcatgacataaatcttcttacatcgacaaagataagagtttgcttcattttttcattctggtgtttgggagtaattttctggaggaaaatgtcactgataggtctttgctctgctgccttgaagtcaggaatccaaaattgtcattagtactatattggagccctcaaaactttgaccaaggtggggaaagaaaaagcataacagcttcagggaaaagtaggctcagtcgaggctttctccctgaggatcagtaattgtagcatggtgaggggttggataatcaatcattttaggtcaaattaaacatattttctttacgagttctgtcaaaataggtagacatgaggtagaatccaggagtcacttctacactcaacagaaatagagacaactcactagaactaagactgtaaggaacagtctaagatggtcttagttcattttattgctgtaataataaagtaccacagactgagtaatttataatgaacagaaattttggcttatggttctggaagctggtaagtccaaaagcaaggaaccgacacctggcaagggtctttttgctgtgtcatcccacggtggaagggcaaagagggtaagagaaaggcggaaggcaggtaaaaggaggccacaccccgcttcctcgttaacagacctacccttacaataatggcattaatccattcatgaagacacagcggtcatggcctagcataccctaagcgttctacctattaatactgttacaaaggcagttaaatttcaacatgagtttgggagggaatagtcaaaccttggcccactcactgaattgatgttgttttcctttctgttataatgtttcaccgtaaactgtagttccctacatattatattgaaaggactattggtctgtatatatttgtgtatcacaaaagagttacgtcatctttagagtcttctaacatggagaatatatagatacattttatatacaatttgatagttaactaattctatagatgcaggcttttttttttaaagaaagatactatgtgccattattttgcaaattaatgtaaatcttaaaaatttttagtggattttattctaaacagtaaataccaaatgagcagacattgtcgtaactaggtactcccttctcctctggcatcttttttgtttgtttgtttaagaagacattctgaggcttattgtaatttcttaatttctcttctgatttttaaatttcagttatgttgtctgttttactattgacagacattgttaagtataattcaaaagtaaagaagcttagaatataaacagggatctggatgtcattcagcagaagtgctctctagtcatgaagaaaatgaagcttggctatgaagtagaagaatctttctatcaaaaaataagaacgttggaacttaggatccaatagagtcgcacaatagtcatataggtgattttacacttacttcattggggctgtcatggctcaaatatatttgtgatccttttcttggaaattgctttcagagccagtttgcaggatgcccctaaaaataaatatgcacttacacttcactgtaatccaaaacctatcactctgattcattgtgcacaagacttggtgtcaaaattaaaattcagttaataaaaagggtatttgtcataattccaaatatttaaataatgcaataaaactgtgaagcttaaagagaaatttggcagcatcactggaataaatttttgtgtaacttcccaaaattaattccctgaagaatatatctttcatttcaaatataagtacaagtatattttataaaggaagcagctagataacttttgctaaagtaacgtttaaggaaatacagggctgggtacagtggcttacacctgtaattccagcactttgggaggccaaagtgagaggatcacttgagcccaggagagcagcctgggccacatggtgaaaccccctctctaataaaaataaataaatagaatagaataagctaggtatggtgatgccagctacttggtatgtagtcccagctacttgggatgctgatgtgggagaatcaccagagtctgggaaatctaggctgcagttgttggctatgatctcaccactgcactccagcctgggtgatgggagtgaggctctgtctcaaaaaaaaaaaaaaaaaaaggtgggcatggaagatgaatggaagatactcaaagatagacccacgaaactgaggatatgctatttcagtctctggactaaaaaaaattgcctgttttcatggacacaggaaggggaacatcacacaccggggactgttgtggggtggggggagggaggagggatagcattaggagatatacctaatgctaaatgatgagttaatgggtgcagcacaccaacagggcacatgtatacatatgtaacaaacatgcacattgtgcacatgtaccctaaaacttaaagtataataattaaacataaaaaaataaaaattaaattaaaaattgcctgtttttattaaactagtaaacaatttgtagaaatgcatgatttgattaaatgagttttgggtgccaccttcataagggaagctagaactgtgcttaaataccaggagccctgctaccttcttaatcttgagcactaaaactaagacctatatctaaaaacttagcctaaattcgcattccaccgtcatgaatatggaatgaaaatctctcatgaagttggttttcatgaaagtgcctccaggaaagcaaaactctggaacattgggccacatttataagaccgtgattattcattaaaaaactgaggatgtaatatttggaaggcctttacttactatcaactcatcaacagtatgggatgaaactagcagcttgactttctgtatgaagtatgggggaaagagtggaaagaatgtcagagttcactgggaccttctttagagccatggggctgaattttatttaaaatattcattggaaaagcacctggattccaatgcttcttaaagtcattctgtttttccatgcagttcgttatttgcttttagaccttttatctccaagttgttttatttagttgctagtatttcttcaggtgtcattatcttgcatccctctagaagataagacacactattgtgtgcatgtgaaattagaattcctataaatatctcattcttgaacaaattttcagtatcaccataaatgatatttaacactaagtggccaaaaacaagtcattcacagagattctgcatcatattcagtctgacagcactgaagctgtggttgtgtatttttaactacacttaatgaaaaaggacatcaggactccagcaaagttgccagcattcaccaggtcttatgagttcttctgccctagaccttttctcatctgctctgtccatccgatcttggcactcgccagctctgccttcttagtccagcagtggctcgataagaaccgttgatcttcagagctctgtctctctctctctgtctctctctctctctctctctgtctctctctctctcgaagagctggaaaagaggactcgaggaaaaaatattcatagggtaatttgtatcttccacattatttaaatttggaagcataaaaatacattgtgcttgaatcatgctgggtgaaataagccagatacaaaaggccaaatgctgtgtgatcctacttatatgaggtacctggagtagtcagattcaaacacagaaagtagaatcgtggctgccaagggctggaaggggcagaggagggtgttagcctttcataggtgtagagtttcttttcaggaaaatgaaaaatctttggatatggatggcggtgacagttgcacagcagtatcagtgtgcttaatgccacagaaatacacactttaaaatggtttaaaatggtcaattttatgttatctgtatttgactataggttaaaaaacgtgcttatacttatcatgtttgctatatgagaacattcctcattcagaagattttatggttcttaaagtaacttgattaaggaataatataaatacaataaagtgcgaacattttagacatacattttggtgagtttgtcaagctacagtcatttccaggagcttctgtctgccctttctggtcactcgccatttcccactgcagtccctggcaacgactgatctgcctccgatccttgtggattagaatacagttcatttttatattttttaaacaaatttggaatgtacaaacttttgttttttgacaagtagagatacagatgtcgagttttttgcccatctgagaagcaggtagaggctttatagcagaggtctcaatagcacagtaaaactaagtcttctaaacttgccataatcttatgaacatgctcatttttcagaaaaggtgaaggaaaaaactgaacgcaagttttccacctacaattttgttcaatcaatgtcatttactgagctataatcaccagcagtttctgcctttataatgttaattttgatctttttcaagaacttgtgaaaaatggaagtcagtccatattgggataacttctctacccattcccttgtaagtgtatttctttccttttttttttttttttttttttttctagagacagggtcttgctctgccacctagactggaatgcaatgtggtgccatcacggctcactgcagcctcgacctcctgggctcaaaggatgctcccacctcagtcccccaggtagctgggactataggcatgcaccaccaggcccagctagttttttttattttttgcagagatgaggttccaccatgttgcgcaggctgggctcgaactcctgggctcaagtgatccacccgcctcagcctcccaaattgttgccattacaggtgtgagccaccaagcccaaccatgagtgtatttctcactgtaggtcagttcctttcccttgtttcaggagatagagaaacatgagatgagcagcaagtgagaaatcttggacattgtgctttgcacaggacttgccattgtgctgcaggagggctgtgctaggcaggaccccagcgtgcactgttggaactatgccctgaaatagtctgtatttggtgacctttgaaagtttctttgtagcatttaagcgtaaatgtgatagttattttgtgttgcatattcattgactagcatagcagtctttcatttagagtcctacctgcaattcttgaatccaagagtcagacagcagcgttttattcttcattctttaggaactgtttttgtaatataagatttttacttctaacacatctctagcagtagcatcctggcctttccccttgcagaatcttctaatctctcctcattaccttcaactcagtctttctaagaccttgctttacttctctaaaacttttggtatttctatattacgtacaaaatcaaatcacttctcattcagcatttttgtgtaccctctgcctgctgggttctggttaaaaccctcaaggatttcacattctgtttattccttaggccaccattccagaccatctctactctgatttagagctgcctcttcagcttctctgccatttcctgtccctgtagacactctctaatccagttctacgatgtgtcctcacatgtgactggtgctttcacacttgccactctgtctttcttatttctctgtcaaaatagggcccatgtcagttcccacgtccttagcctgaggtgatttctctctgctgtactacctcagcatttactgcccatacagtatatttggcacttagcatttattgtttcatctcattagttatattaaaatcttagagttgaaaaggacagtctcaccactgaaaacaaaattacttacacaatatctctgataatctgtttaaacacctagtcatgggaagatctataattttttagctttccaactctacttactaacaaatattaatacactagatgttccttttataaaccaaaatctctctcttttgcgacttcccctgctttagtaacaattgtgccctctggacaaacacagattcaatgttctgtttttgcaaaacctaccttaaaaattttggtagaaatgattgtgctatgttagtaaatctttttagattaacatagccttatataatcccactatgtcatcttcctttgataccttctacttgtgcaccccctcttaaattatgacatatagaattgaacctagtgaacctaggtgttcagttagagaaaaacacagctctttctttctttaaatgaaatgtaagttgcccaaagctcatggtttctttctagttgtggtttatgtttatcttccttacgtgctctgctcacttgcctagacgctactggcctggaaaaaaaaaaatgccttaaaagtgcagtgaaatacagcttcaggataggtgaaaacactgaacagcgggggaaccaccacaacagatagaagtgaagtcagaatcagaggtgcagttggttcaagatacattcattatgagcctactctgtgctgggaactattcttagcatttggaattcattacagaataaaacagacaaagatcctgtctttgtggagtttgtattccaactattcctaagcacaggctttgggcaaacattgaagactagcaaagtatatcagcgtattgagtatagagtatatagagtaactgcagccctaaataaaataaaacaagaaagcttaagcagtttaggctaatgcaatgcagaacatgaacaatacttgaaagcttttagttttcaagtttaggaaccaagactctcgaaggaagacattttttaaaatgtaaaaatagcagcataatacctgaaagatagacacaacccaagtgtccatgttggataaatggataaacaaaatgtggtatgtgggtgtggtggaatattactcagccttgaaaaaggagattcagccacatgctacatggatgaaccttgaaaacatcatgttaagtgaaataagccagtcacaaaaagacaaatactgtttgatttcacttatgtgaggcacctacagaagtcacattcatagagatagaaagtaaatgatgactgccagaggctgggggaggggaaaagaggagttactgttattggtatagtttcacctttgtaagatgaagagagttctggaggttggtcgcagaacaatctaaatgtactttactgaactgttcatttataaatggttatggtaaattttatgtgtgttttatcacaactaaaaaaaacctaaaagataaaagttaatgagctaataaacagaccaataaaccagaaacattaatcaattttgaagaggtaaatcataaacatactataatcagagaaacagaccctacccatgtagaagaatcaaaaaacatttacagagcaaatgcctgttaatatcatccaaactatgtaagtgctgaaaggagatgctgaatggagagaaattagcagttaagtgagtagccagattttgaaggagagaaagctacaggcatttcaggcagaggacataacataaacctaagtgaaaacacatagcagctctatgacagagagtccttggaagacagtaaggaagaaatgggttaaaaaattgtaggtgatcctgaatattaggcaaaaatatttgctatggcaagagacctaatgacgatgaccttggaaaagtaggacagtatagaatgatggagaaatcagagaagaggctttaagaataatgcaggcccaagataaaagggtgggagtgacgtgcacagacaaaacagtgggtacattaaaaactaaatgttgtcagcctgtggatccaggaatatgatggctctattaacattaaaagggtaatttgttatgttactaacatgtaaaatgttagtgttgacattttacattaaagagatatttctgggtacctaaataaacatgacctgcagaggacataagatatacagggaccaaagtttgcgagggcaggtatttcagtgaggtccacccacagaggctctcccatggactatggttttcacagagtttatttaagtagtgtatctaccatagtctctgaaacctctgcaagggaagttgaagaatctagtcattagaggatttcttcaggaaaagagatagaagagtagaagagatatattggtagtttactactcactctggatagttaattggttaaataactaggaaggtagcagaatcaaaggtttatttagtccatcagtaagttaatctagatttcagatttatcttaaaattagagtaaattaaactattcctacatgtccatgacattaaaatgtccaaagctacttatcttgttctagttttaatctggtatttttccagatgttttcagtatgatagaatgtatagaacatgattacacagtcattcaatttgacatactcagttggaggaggagcgaataataaaccttggtaacagcccttcattcatactcctctttttgtcttgcatttctgttaaacacacacacatacttaggactcattcagatttttaaccaccatatcacaacgctaattacggtctcttatttactagcaatagaagtctaatgttgtggcgttctcaaggattcaggaatgttattcaaaagcattttgagctccatttgcctttgatgtttgcctccagtttctgaaatttgcccagatgggggaaggggatagagggggtggtcttactatttcctgaagcacaaatgccgcagcagagcccttttagggacatcttgattctattagaatttgcaggtcaaagggcaggttcaactggcctggtagtttaaagcaccagggatagagtgaatagactactgtaatgacttaaagttggatttctgctgctacctactcattatgctaataatgtgcatgttggtcatgtgggcggggggattactaatactttgaaaggtttcgtgtccacattttccttttttttttttttttttttttaactctggaaaagaagggaacagaacaaggagagtaatttgacaggaaaagcattgcagttcttattttgccctgggcttgtggcatacatatattaccgttcacattttatgtgcttgtattactccctagggactcatgggaatgaagtcagaatgtgctacactagcaagcctcccctttctgtggatagtctttagttcgtaaagctcttaaagtcgatgattaattcctttgaggttcaatttctttaaaatatttatatcagtattagaataggtgatctcaaaccattgactcagattaaaagaagttataaaaaagaattacttctggtaatttttattttctttatacttttctgtatctttcagtttttcttcaatgactgtgtactacttttatcagaaaatactttttttcaaagaagcaattatattgagtagacagctattaaaataaaattttttcaatttgcttttttttccactgtgaattccattccctctgaaaagctgagtgtttttaacaacatttctgagtttagacactctcaagtgtgccatgtaaaacttaatcaggtaagtccgactataccatatggtcctttctaagagatggattagaggaacagcaattttcgtattccctaaaagtctttgctgttactgtctactagctttcacattcttccctatcctccaaatttttttcaagaggttgttctccctcatactatccacttcaaatttaccagaattgtaaccaagagaacaatactgtctttgtcccttttggaaaataaaagaaaaacctaaaagctagtatacctatcaaagatagacattactcagaattcatatgattatatgtgcaatatataatcaaaacattttattctcttgactatgaattgcccttcttaggcacctatacatgtagaaatcagtgtcaggagtatacgttgtaaatggaaagcagaaagacatgatgatctgttaggggatttttagaggatgagagccatggtcataggagagaaagtttgattctgtatagtccatagcatattatcattgcttagtaaaaaaaatagcatcaatgaaataaaatctctatttgaattgcataaaaaatacttcaaattatatatcttgttaaaaagacactattccaatggctcagactccaatgccacattcctcaaaactttgaaattagaaatctaagttgtcatctgttatttcatattgtgatttgcaaagttgacattttaccccagaggtgaactgtaccacactagctgtccaagcataccatttatgaaagagtttggaattcagtcaagaagcttcaacaatatggaattatttttactatgtcatattacaatattttccttaagcacaaaataggcctcaagtctgatcgcctttgtattttgcattcagcaaaggtgctggtatttcaatctaattaggtagagtaacttatctgtcattcacctgctgctgcttgcctgctactaaatatgtgattctgactattggtgcacagaaatgtagcacccttattgggaaagcatgctgcctcttccagcttggtcagtctttgagcttcccgaaagggaacagatgaccgcagtcaacaggaaactgcatagttagaccttcttgaactctttcacctttaagctcatttcaccacttaacatatttttttcaagtggtcagtggatatatttagactgtcattatccctttagtgttgactggatcctcgtggtataagttgcctgccatttcttagaattacgtagtgtggggacagtgcgatgagaatcttctctcctcttccagcagcaaaactagtgaaacaaatctttatttccatgatgtaaaccgagtacacatcttctatttgttagtattgctttcagagttgagtagacctacacatccagaataaaaaatatccattagaatattcagtagacagatagtcttccagtctgtggctaaactaaaactcttccatatgactgctgttgaagctcaattatcttaacaaaagacagaagcaaggttaaacttgggcaatgcattctcagattcagcatttcctcaggtcaaaagctcaggccacttatatagttcctataaatcaaatatgtcttctttcataaaagatgagctactgagaaatgcattttggattatgaaactaattgttcaccaactccattgtgattattttgtaaatttcttacatcagcttccccactaaatccacctttttttcctttggacacaaaccataaagtaattattagctaaaccacaaggaatctgtaaagtttaaattactgtttcaaagtgtgcagatcattgccagtaaagccacaactgcaaacttatttgcattcatgagatgaaaagaatgattgatgttcataatgcaccaggaatagatggctgtgtttctatatccacgttattaaagtctgcagtttgttgtacactgtatgcatgaaaatgtcttcagtgtcagtaatgcctcagatcatctggaagctacagaataattatcaaaggaataaattaaatggataaagtatgtaagttacaggattattcttaaagtaactgtttacttttcaaattcaactacaactataggaactctttttaaaatataaaatgaaatactaagttcttactaatatagttttttttaaaaggttaacaatttttatttattctttttgagatagggtctcactttgtcacccatgctggagtgcagtggcaccatctcagctcactgcaaccccacctcccaggctcaagagatcctcctaccttagtctcccgagtagtgagtagctgggaccagaagcgtgtgccaccgcacccagctaatttttgtatggttttgccatgttgcccaggctggtctcaaattcctggcctcaagtgatccacccacctcagcctcccaaagtgctgggattacaggcgcgagccaccacgcctggcctgaatattttttaaactttattttattgtagtaagaagacaacacgggatctaccctcttaatcacttaagtgtacaatgtagtatcattaattgtagagagaatgtcatacagcagatctctagaacttactcatcttacgtaacttaggctttatgcccactgatgggaactccccatttccccctctctcctctgccttgcaaccaccattctactctctgtttgcgtgagtttgactgttttagatccctcatgtaaatggaatcgtgcagtatttgtccttctgtgactggcttatttcacttagcctaatataggggaacttattaagataacaacatgataaagacaatttagagtcacattcgcctgaatgggattcctggctgtaccatttactccaggtgtgaacttgggcaagctgtgtaaactctgaaagtcttggttttattaccctcaaaatgggggtactgataatagtaacttcaaagaattgttggaaggggtgaatgatgctgttggcgtttgctttcttggttttattaccctcaaaatggcggtactgataatagtaacttcaaagaattgttggaaggggtgaatgatgctgttggcgtttgctttcttggttttattaccctcaaaatgggggtactgataatagtaacttcaaagaattgttggaaggggtgaatggcgctgttggcgtttgctttcttggttttattaccctcaaaatgggggtactggtaatagtaactccaaagaattgttggaaggggtgaatggcgctgttggcatttgctttcttttgcaggcaagaagctcttctggctgccattagtgaaaaagacgccaatatagctctcttggagctttcgtcctctaagaagaagacccaagaggaagtggctgccctgaagcgggagaaggatcgtctggtacagcagcttaagcagcaggtattattaaatgccagcaggagggtcagtggggccagctttcacaccattctccacacaggtctttgccagcttgtactttaaggtctcatgtttcatattagacatctgatcattggagctagttagtttccatcattagagactttttatctccgcaaatctgtgtctaggaaatgcagagcattcgtggtaagagggctgttttggacaatgtcacaggtcttctatgagaatgttttttaactttgtacaatggattgtagaaattattgaaattagcccatttgacatgaaaaggcttttttttttaaacatccagcaagatttctatgacagcagccactaaggatattttcatgaaaagatttccagttattcaggattgggtaagctctgaagataagaacaaaggttggcccttttcttttccagcctaaatgctctcaaaatttaatacttaatattcatgtaacaccttttgtttgtgaaaataaaagctaaaagtttcccctttgatgatggttgcacaacagtatgaatgtacctaatacacaaaaccatcaacttaaaaatcgttaaaatggtaacttttatgttagacatattttaccacaataaagaaatggagaaaaacatttcccttggaagataaggagagtgctggatgtttacatcggagccctgcttgaacggcagtgctcctcgttgagtgctcctggctgggcgcagcatccgcgtcccagcctccgtggctgtctcctgcattcccagtcacgttgtctgtacattttggctgcccaggtgtgctctttgccctcaagtaatgagaccgagaaagagcttttcaagtaaagaaatttattttcttctatttttggaggtcagtcatcaattgatggtattttggcataatgtttatattaacaagaatcaatatttaaacaacaaagttattttctctgtggatcaaattaaaactgcttagaaatagtctttatatgtatttatgttgcacactttgctgagaaaataccaaaagatgtcttttttctgcaggatggatagttgaccagcaaaaagtaacccattgcttattcacaagtgaaataaaacttttccagggtcctaaaatactttttagcaagaagaggacatcatctaatattttgactacctgttatgtaagataggaagaatgtgcttattatgaaagacatccgtccagtagttgaaaactgaaatttggctcatcaaagctgataatagcaaattggaggatattattggagaaaggagttcactgctgtgggagtttatatattcagcaatatcacttatcttaagtagttaggcttgaatacataggcctatgatttaagcagttcttgatctcttcacttaagacaccaaatagaattgaatatctagcagaccagaataccatacctcatttacagtggtttttgattagtggcctccaaagaacatatgttttcattatgtgaaaattaaggaaattggccgggcacggtggctcacgcctgtaatcccagcactttgggaggccaaggcgggtggatcatgaggtcaggaaatcgagaccatcctggccaacatggtgaaaccccgtctccactaaaaatacaaaaattagctggatgtggtggtgcacctctgtagtcccagatacttgggaggctgaggcaggagaatcacttgaatccaggaggtggagcttgcagtgagctgagatcacgccacagcactctagcctgacaagaggacgagagtccgtctcaaaagaaaaagaagaaaagaaagaaaagaaaaggaaattaattaatctctgagcttataaccttagaaggaagtagctaaacaattctcagtgtctttatatcaaaccacatgccttgaattttctgtagcgatgtgtcctgtatgaagagaaaaataataacagttctcaggagtccttcctacagtcatctcctgcctcccttttacattcctgccctttcaaagcgtatctggatgctgtgagcaagaaggaaggagtcttgccaaaggcatttgattctttaattcctccaagagtgtgtactaacttttggacaagggagaggccttttggaaagaggatatggcatcaatgttgttttaatttaaagcttctagtccatgaattgctggaatgtgcctcagtctaaaggctatttcctaacagggaagcagtcagcattgaccaggctttccagcaaatggagctgccactgcctgataggctcttggcgttcacatgtgattcctattgtcagaaagaggtgaagcaatgagggatatatagatttgggggtcaccttctaatatggtcccaatttacttaccccctctaaccaccgcccccccaccccctacagggtaacttgtctccttgactcattcatggcaaagcagcacttggagaggctgcatcagaggaaggggccagggccagtgaaaaaaataaactaaggctgtctaacaaactccagatgttctgtggtgggtgccagccagtgtgttcagaccttaagtcatgaagaagccccactgtgattgtcaggcccccgcacgagatttaatgtaaactccgatagaaccctggaaagcattaatacaatctgtttagtcacagcagttgtcacaagatggcctttctctcagcattgttttcttcttttcacctccagaattttacaacctccgtattgtgttggttgctggtgtgaaatctggctctgcccctgtgtgctctacacagatgtgttataggcaggctgggcttttcaggacaggctgggattttttttttttttttttttttctgtttttaagagtcaactataacagtataaaagtaaaggctacaaacttaaacagatttggtttgaatctagataatctcatttacaactacaattttgtaatcctgtgcattagaattaattgtcacaccatatattctttgattccagtgttttgtaggcgtgagggatacaaaagcacagtgctcgtcttaagggaactcacaggctaatgcatcaaaccctggttgttctagtcatctggcagacattctgtgtgttagtccgcttccacactgctgtaaagtactacctgagactgggtaatgtaaagacaagaggtttagctgactcacagatccacatggctggggaggcctcgggaaacttacaatcatggcggaaggtgaaggggaagcaaggcacatcttacatggtggcaggagagagagcgatcaagcgaggaactgccacacacttttcaaccatcagatcttgtgagaactcactatcttaacagcaaaggggaggtctgcccccatgatccaatcacctcccaccaggcccctcccctgacacatggggattacaattcgaggtgagatttgggtggggacgcagagccaaatcgtatcacgttctgtagaaggtaatcctggccttgccaactttttctgctgacagctttagcaggtcatccaaacattatgtaacttatttacccattcacttcagatttacctcacagagttggtgtgaaattcaataagatagcacacctgaagcgcttagagtccccccttccattccctgtcactgatagccctgttcgtggtcagaactgtgccataggtgacacacagtacattgagggaggggtagtctcagtaagcatggctcttgttccttttttttttttttttttttttgaggtggagttttgctctgttccccaggctggagtgcagtggtgcgatctcggctcactgcaacctccacctcctaggttgaagcaattctctgcctcagcctcccgagtagctgggattatgggtgcccgccaccgcgcccggctaattttttgtatttttagtagagacggggtttcaccagcttggccaggctgatcttgagctccagacctcgtgatccacctgtgtttgcctcccaaagtgctgggattacaggcgtgagccaccgtgcccggcctggctctacttcttggttgtctctagccactttatttaaatgtgcagactcacgcagtgttcagaattacacaaccagcacatggcgttccactcctctgaggaagaacgtatttctcagggcagttaggaaaaagaggtagaggtactttttatcctttcttttttccacctgttctttttaatgatatgactctcatatagaatttttaaaaaataattctaaattctaatatgtctttcttaaatcttacattttcgtcactgaagaacatttaaatgcccgtctggctgaagtcctcaacattaggaaaatgtcaactcccaagctacatcccatctcactcgccttcgagttctgtgattttccacatgttacctcccgttctgggtatccccgactagtataacttttcagaattctgtgaaaatagagcagtgacaataatggccaccacgtgccacttgactgtcgtgcgcagggcacaggggctttacatcaccgggtcttccccacagctctggagagtgtcttcattatttggggaagcgcttcagacccaaaaaggataaaactgtggctaaatttccatgaagaagactaagcggtggagctagaattagaactgattctcttctcactgtcaccatcttttgtgaagattccagatggttggtaatcagattgtattagaattagaataatacaaacaatgctattttatgtttttatgatactcatttgttccctgagacacagaaaaggggatctatttatacgccagcccttcccctctccatccgtaaagaaccagaaacaaaaaagaaacggtgcgatttgtttcccttttcactgttccaggctgagcatcacctttcggtacacgcggtctttctcccgtcatcccagcactacttccttgagatgagatgacatcaggtgatcccgttggtcttgagaatgatcccatattcttcagtcaagcattttcatacagtagttttctactgtgttatgtgtattttacttgcttaatcctccaaagaccgctttatttccctaatcactaagttcttgatgggaagagtatttcaccgttgccccaagtactttcagtaggtgtggtatgaaaaaatacctgaatcaagtgaataatattttgagtaactgtcttttattaacttccgtccactctctagtgaacagttttcagtctctcttgtggcactgcctatgatacctttgctcttgttgtttcatcggtaaagctgagtactttgacattcactgattaggttgggaaaaccagcctatgctttgaattggccgtttctgcaatctagcagacattctagcacacattcactcatctgtgaacctgcatttgtacatgctttcacacttccccatccctattagaatgccagttaccatgataacacgattcaatgctctgtccacatatcccactcagaaacaatttgtcctataatatggacttgctatctttcaattcatttatttagggttattttactcctttgttgttagcgaaaagaaaatgtatataggttaatgcctttcttattttgactttaaccttttttctcacatgatgtagagctggccattggcccacctttaaatggctgtatatcatctatcttttcctcctcgtggaaaaggctactgtctattatagaagcatggtgtactaattatgaagttgcggttgaaaagacactttatcatcactctagccacttggaactttccaaataaatcattatttggactaaaatttcccagtcttgtttatagtacaaaggtgaatacctttttgaaggttcagtaaactctctttgttaggaactgagggttatgacaacaataaaatatctgtttcagctttcagttttggtggacatgttctttgatcacagcttttatgagagaaaatgcagttttattattaattcttctctagccaaactcaaatcattttactggtttgaaatgtgtcgtctttacctatctcaaagttttgagtaaagaatataaatatattgttttgtatatgaaaaatgtgatttgttctcatttactaaaatttgggaagaactggcttaacattgatctgaagaatgtaggggtcagatacttttttaagaaaaggctcaaatttgattttcaaattcttagcccagggccctgaccgctccccgttggagcaatatttaggaccgccaagttggagacagtaaataattgattcttacatgtcagactgattgtcggctctctgcagtatacatgagttgtttttgaacgaagctaaaatcttgtgaagacgtactaataatctaatatgaacccagttagatgaaaatcaccttttgggacttattctgttctatgagaaaaaaattatacgaaaaattctcctaactagccaagaaaatagacctgtctgtagtctacttagtgatttaaagccttttccttagacatgaaatccatgatggaagcttgttgccaataagaataatggagaatcaacctttaaagccacatacatgatgtagaatttcaagttgccattattctgtattgtaatggtcagccagagagacatgtgtctagtcagttttattaactactttctacagcagtcctcccttccttttctctgtcctattttctgaaccaacagaggactaaattttcttacggagtcaggaagttaagacttaaaatttaaggaatatgagggtagagtgtaccttgttgacttacattattgcatctgaaccttcagatgacatcctgaaataaattgcatagttagggtattttatacctatgattcccattagggacttcatggttttgacaaatacactatcaaagggaagcacatcacaaagaacactacttgcaggtcaaatattgacgaatttagggaatatattgtgtgatattttggtctaatttttcactttcagtttgttgctgtaatacacatagggaatttttaaaatatatgtattttagatttatgctgtatttgtaaattcccataaatacataaaaggaccgtgctaagctgtctttggggtggccacactagtgtattttcctctcacgttttaccataagcagcaagaagaaaccaggcccccaccttcagcactttaactggaaatctacttagctagatctctgagttcattcagtacattctccactttctacacaactgtaggtgacattgttgctaaagttctggtactgcatatcaaggatcccagtaacaagttccttgcttcccttgaagatccagtggcagcctcctaaaagcccctatttcagtgaacagccaattcagggcacttgaggtttgcactagtctctcctcagaatctttccaggtcttccagtttccgcccactacccagctccaaagccacaccggcgtttgaagtttttgttacagtgttaccccattcccagttatgccaaaatctattagttatctactactgcataaaaattacccttaactgagtggcttaaagtagtaattattgtctcacacagtgactgagggtcaggaatttgcaggcagcttagcaggtggttctgacccggggtcctctgtagggttacttaggacacgagagccagcttctccagaagtgacccgagagaggaagagagcaaccaaaatggaatttgcagtgtcttccataactgaatctcagaagtgacataccatcacttctgccttattctgttcacacagaccaacccttatatagtataggaggggacagcacagtgatgcgaatacctggagacagagatccttgcaagccatcctgaaggctgactaccacagcaagtgcatgaataaacaaatttggtatgtccatgcagtgaaatgctgctcagcagtagacagaaatgaactacaaatacacacaacaggttggatgaatcgcaaagacacaccgagcaaaaatggagacacagaaaagtacatactgtatgattccaccatactatacagtgtaagaaagcagatcagacaacaaagcagaacttattcatcgtttcttcccctcgtcagctcacttgagaggcctgcagggggaaagggacaagttccattctctttcactcctctgccttcttcatcttctgatgctgcttctctggccaacattgtttcctttggggtggagcagcagccaaaagacgcaaacctgacagctttctgtaatatcacttgacccacagaaagcgcatgcatcctcgccgtgccaaacggtgagaaataggccgcctccgatacttctgtttccgtctgccatctgtctccttctcagataagcacaaggcaaatcaacaagtctgatggaatgagatgccagtctccttgacgtgtactcacactcagtctttaggagtggttctctttgagccctctctgtcttagctaaggcaaaggggactcttgtgaatgaacacgtaactctccatgtggcaagtccttccggcagtagcactacgctcacaacagtcttagacagatggatgaagggcacctgctgaggcagtggactgctgacagtagtgccttttcagccactggccactaagctgcctttatacatcttggttgcttagctcttttttgtcacctgctttgggccttggtcaccaattctataacaactggaaaagcccattcatcatactattaaaactgttttacattctaaaagaagataacaatggtaggataaaacagcagagagctcctgagttgttagtgaataaagggaaaattaaatagcaagtatcgcagcagcttaagtgctgcggaaactgtggaaagtaaaatgttgtaaacatctgttcatctcacttagtttaaatcctcgataatgaggccagcctcagagagcatttatgtacccatttgttttatatatgaatctgtcatctataatgccaggtgcctgttttatgactgagaagacattcctcaaaacacatctgtgttaggcactgccagggccccttcaccttgcccttgacggtgcctacttcatatctgctgtgcacatcagcatcagcctcccagctgtcctgcatgatgttatctccttgatggtgactgttgttttatcctagaaaatgaaaactttggttagaatattcagaatttgacagaagaatgcaattccgagaaaaacagaagattacagttcagtctataataattcaacggcccttatttttttatttactgatttatttttaataaagacagagactcactctggtgcccaggctggagtgcggtgtgcagtcatagctcctggcctcaagccatcctcccaccttgacctcccaaagtgctgagattacacacgtgagccaccacagccgtcctcaatggcctctattgactagttaagataaaaatgttaatcttttaaaaattattttacctcctttcaaccctaaatttgtgtatattaagtactcaaatatatatacttcttcctctgaaccattacaaacactaagatcaactagattgttcctactgatggtatccagattgttttgaaagaaactagatgcaaaccctttttcattcactgtcctcacttctggaattgccttgcacttcctcagctcaatctccactttaaacttctcttcaagactcatcatgataggtcggaatttcctagcctgaagtcactatttttccttatcgttagcaaagccattctgtgctttttttcattcacgtattcattttcccttggcttaagttgaacaaatgagaagaaaggagggagggagggagcagagagaaagagaaagaaacttttcacttggactagagttgttaattgtatttattctttatgttaagccaggttattcttgttggtgtgattatttgttcaaatctaagaattcccgttctataaccattcctgtcttgttttcctgtttgtatgtatagcgtggtacaatagaaatagtaactgagtgtcaggagacctgagctctagatccaactctgttgataaataagtatataatcttgaacgtaataacaccatcaacgaatatcaaacacttcacattttacaaagtactattcagatacttaatagcgcctaaccctagggctgtatgggcgaagcagatctcataaataaaaggagtgagtggtttaaagccacagcagaaaaagaactgtgagaaagtaggggccacatggtgttgtctacagaggcaggcacttctaactccagctctcgtgaccatgtcagatgcgagccctgtgttattcaggcatccatgtttccctggagaattcagatttttatacaaatctctttatgtctaagtgttggcagctaatgtgttttttatttttatataaatcagtccacaaggctgatttaattgtgtttgttttaacacaaataaggccacaggctgcctgacttgcctcttcgggctttatcttcctcacctataatattgggtggatagatcaaatgattttaaagtctaaaattcattattttctgtattttgataaatcaacatatttacctgtagctgtatcgtctgctaaaggctgacattaagagtttaaaaagaagcaaatcaaaaagcataagaaaacgtgtgtaaagattgtttaactctgtctatagaaatttgctttttttatgaaagtattattttattaaaaaatattgcattatgaagatgaaaaaatcttggtttttttgaatccttcaaagaaatagatcatattttgatgaattctgcttgattggagttactaataagtagaaagtccagaggctgggaatgtggggaaacctggactcatcccaggctcctttcatccatctgttgcatttttttgtcgtcatttccagatgtaggaaaatccctcacaacaatttgataagactcttcccttcatttccagcatcaaatctaacttgcctttcctatcgtcaaactgctgccttttatgatgccacagggaattaatttataaatcttctgtgtttcctgatccctcttgaattgtctcaacgcagataaatcaacctaggtttcctgcccatacgctggtgccctcctctccctgtttcttctgtgtccatcaggtggtgtgatttatagctgcctttcctatgctcattgaccttggtctgaggatctcattaagcatatgtaaaactagaaagattagtttgagggtcgttccctcctccgttaaacttctcttggtgggaaccagtcagaccaatatattccaaaaatctgttcctgctgcctcttttggtctcttttgaactaatgtagatactcattaaaagcaaatgtgaattagacaagtgtggtggcatgcgcctgtaatctcagctactcaggaggctgaggcaggagaatcacttgaacctgggaggcggaggttgcagtgaggcaagatcacaccactgcactccagcctgggtgacaaaacaagactctgtcacacacacacaaaaaaagcgaatgtggaattaaatgatatttgcattcaaggataataggagtggtgttaaactagaatattagctgtcactgagtgccgttttcagaagctgtaatttacatgaccaaatgtattatcacatgactttctggaaaacagtattcacgccattagtcatctcaagaaaatactgtttaacgtttaggcagctgagccctattttgagttctttatgtgaattaattcatttaatcatcactacagccctcagaagtggagttatcctcattttacagagagggaaagaggttaagtaacttgccctaagtcccgtagctcataagtggctgagccagggcaggattcagagccgatcatatcactccagagctgacactcctgatcactacaccaaaatgtgttaccatcattacagcatgtgcttttggtgagagatttcaatagccttcagccatattattaataaccccatcatactctgttgtaataaatagtactttaatctacccttataaattacagtgaaaatatatacattactgtaaaggactgcccccaattttaaaaaattaattcagaatcctgacaggtcaaactgctttctaaatcttgtattaaaaagatgtcttctaattttaacaattaccttataaatagttgactggattaatgaacagctgtacagcagaggagagggtaaaatgataagctgatttttaagcagctaagttcgaaaatctgtgtgctcataaccctaaattaccattggaaataattttgttattaaaatactattactgtcatgtatacatagacaagatgtatgcaaatctggttccaaagtattgcacagcatttattaagatagtgtttagccaccagcattttttttaattttaagaatcaattaatttgcatacttaacagctcatagagatgagtgattggaaagctgctgaaaagttcatagaaaatagtgactgttgaagaaagaacatctatcatacctgaagttcagtattttccccctatatttcaaaagttttatgaaatataagaatttaaataaataaattgttgagctttaatactaaaacagtatttgtggtagttggttttcagggtagagatgcttaaagtttatggtattgccagccttgttcctgaatggagcatttagaattggatatgatgtttttcttggtctcccagaaaattacaacctactaatggttaaatctaaaattatgggttctcagaaaataatttggaacatgtacagtctgggcctacctaacttttaacaagctgattcattagaaatatacaaagagattgaatggatattactgtgtttaaatctacatatgcactttacgagtacacccaaagtgcacacctggaaacaaacaccaaactgtctcctgagacccaggttataaaacacgcttagagaagcctggttggttctcagtcattggcctgaagccagtgaaaggacacagttgcatcatattcccctagtctacagtgtttaacatttcttaatttcaatttctgctaaatgaaagattcttataaatcaagttttcttttcctaacaagtttcctcgcaattaccttcctatcttttttttttctttttttgagacggagtctcgctctgtcgcccaggctggagtgcagtggtgtgatcacggctcactgcaagctccgcctcccgggttcacgccattctcctgcctcagcctcccgagtagctgggactacaggcgcccgccaccacgccctgctaattttcttgtatttttagtagagacgggggtttcaccgtgttagccaggatggtctcgatctcctgacctcgtgataacgcccgcctcagcctcccaaagtgctgggattccaggcgtgagccaccgcgcccggcccctatctatcttattattgagaaacaatagccaggaagaacagaaggaaacctgtttttaaggctggttctagttgagctaattgctatctagagctctctttgtatttagacatcaagacaacagtcacagcaatgttccctaagcccgcattgtcctcctgaatggtagatgaaattaccagcacctgacttgcagctcttcttatggctgtgcactgaagtaactatttctcttaatacatattttaacaatctcagatgagactaagtgggtctcttacttttgtgtcgtctagtaaggagccataactgaaatatcctcctttttattaccataatgatataactataggaaaagaaaaaacatgagccatgattgacagaaattactctccttgtcagagatcatttcctctgttgcttaaagcttcttgcaatgcagcccttttttttttttttttttttttttttgagacagagtcttgctctttcgaccaagctggagtgcagtggcacgagcttagctcactgcaacctccgcttcctgggttcaagcgattctcctgcctcagcctcccgagtagctgggactataggtgcctgccaccatgcccagctatttttgtatttttagtagagacagggtttcaccatattggccaggctggtctcgaactcctgacattgtgatctgcccacctcagcctcccaaagtgttgggattacaggcgcaaaccactgtgcccggtcacaaaaaaaattttaattgaaatgcatgcagccaggcatggtggcttatacctgtaatcccagcactttgggacgccaaggcaggcagatcacttgaggtcaagagtttgagaccagcctggccaacatggtgaaaccccgtctctactaaaaatacaaaaattagccagccatggtggtgcacacctgtaatcccagctactccagaggctgaggtgggaggatcgcttggatccaggaggcagaggttgcagtgagccaagattgcaccactgcactccatccagcctgggcaacagagcaagacttcgtctcaaaaaaaaaaaaaacattaaaaagtacacatgtctaagtatacatgtcagtgaaattttacacacttatgtaaccagcatctacatccaggaagcagatgattgccgacaccccagcaaccagttctcacactccgttttcaggtaccatcccctgcctattcctgcaggagtaactgctctactgaattctgacagtattgattaattgtatcttaaaaaatcaaaacttaaagattttctgtcaacagagcaaccagggacccagaggcagaagccaggggagccaccacaggcagagggcacagccttgagtcagaggattgttctcagaccttgaaacctaatggaattttctctgctggatttcagacttgcttggggctgatgagccctttttttcttccagtttttcccttttggaatgagaatgtctatcatatactggtcccaccgttgtattttggaacctgataacttgttttctgtttcgcatattgacagatggagaagatggatcatacttagtctccctcatacccaactcagattaattagatgaggagatttgggactttcaagtgatgctgtttagatggaattttggatttagagttgtgccatagtgggttaagatttttggggatactggaatggggtgaacctatgttgtgtatgggacagataagaatttggtgggactagaaggcaggctgtagtagatggaatgccccccaaaacatatgccctccccaaacttatagcccccaaaaaacattatgtccacgtccagtttctataacctgtaaatgaaaccatatttggataaagggtctttgcagatgggattaaattaaggatttcaagaagagatcattcttgattatccaggtggggccctaaccctaatgacaagtccttgtgagagacagagagaagacagatacagaagataaggtgatataaaggcagaggcagagattagactgggtggctatgaaccaagaaatgtccacagtcactgaagccaaaagaggcaaggaaggatgctcccttagcatctccacagggaacatggccctgccaacaccatacttttggacttggggccgctagaactgtgagagagtaaatttatgttgtgtttatgttgtttgtgatcatttcttacggcagctccaggaaactaacacatggagtaggtaacacagcttctcgagtccttcatgtatgacaagcttgttgcccctgaaggtattagggttcccctttatttgaaggagaaaggtgaatacattatctctgcttaatcactagcatttgttgatatatgcaaagaagacattcttaagacagcctcggggcagaagaggtcaaataatatttttggagaaaggagaatactaagagactaataagagttagcctcggccgggcgtggtggctcacgcttgtaatcccagcactttgggaggccgaggcgggcggatcaggaggtcagaagatcgagaccacggtgaaaccctgtctctgttaaaaatacaaaaaattagccaggcgtggtggtgggcacctgtagtcccagctactcggagaggctgaggcaggagaatggtgtgaacccgggaggcggagcttgcagtgaactgagattgcgccaccgcactccagcctgggtgacagagactctgtctcaaaaaaaaaaaaaaaaaaaaaaattagcctcatgaatgagctagaaaaggagctcttaggcagagggatcattgtggccagggttgctgaagcatgaagcatcctgagatcagggagccatagaaggcttcttattaccaagtctgcactactcctgggcagtgacgtgagactccagagccaggaggagacaggtcacggagagccctggattgacaatgctgagagtagcttggacttgctcctgtaggggatgccaagccatggagaggcttttagtctcaccgatgttttcagagttttcttttatagataaatcaatcactctggcagctaatggaggaagttaaggggagcctggagtaagaagatggtaagattaaaaacagggagactgtttaagaatctattccagttgcccaaatatgaaatgatgaggacaagaatatagggtagttgagatggagtaatgtattcactaggccattctgtgtatcaaacaccacctaatcttagtgccttaacacagtaaacgcttatttcttggttacacaaagtccaccgcagatcttgccggctctatgaggaagctgccctccatgcagcaattcagtaatccaattctactaaaaatttcctcctttagctctttcagtatgaggccttcttggtcactgtggcaaaggaacaagtaattggtggttcccgtgctgtttcttctatgcttgggtcccacggtcactacccacagaccactggccagtcagatgtctggtctggccaagtaagtggaagtggtctccctaattaaaatgagtaatcaagaagaaaggccatatatggaagagaatataacatgcttatttttagtagagttgaattcgaggttatttatacccaaatagatacatcaagaaagccgttggctggagatgctccaggtaaagatgagagctagaaatgataattttggagtcatcagaacagaaatactacttaaacccatgaaaatggaatagcttgcttaagagagaatataggcaagttatacttactttttactgttttctgacacatactaaaatattaacacaggccattcttttcatccttacagattatagttcaatgagcatatgccctctgtaagcctgttggtaatggatttcagaattggctctactggatatgcattgctaggagtttttatgcagttctagggtttttaagacctttttttcatgtcttacatgtgttgaaaatgctttaagcatttatggcacaatatatcacaggtgattgtgatcttatataccccatagccattttgctgatttgatatataaattaataaagctctgttcctggaaatgaggataatgctacatgaatactccaaagagttaacataaatgtagtcttgaaaagcactccctcaagaaaagaattctgtccaaatcctattaattcccgggtattttgcctattttccttaaaagcaccttacattaaaaaatctgttttgcattcagtctctaagcaaaaatatgtagtgcctttaaagaaacaacaacaaaaaaacccttgagtaggttaatctctccattttaagttacacacttatttcatgaactaatcaaacttgtcgttaaggcttcattaatttcctctccactcatggggtgggatggttgaatcatagcggggctgtgtgtgtctggaagtgacctttgtatatttgggtggtaaattatacttcaaaataccagtagacattttattaaaatttttattttctttggtagattatttccttctaattatagtagtaaacactggtatgttatgattagtgattagcttataacaaacatctaaacagggataagtcagcctgtttagcgataaacctgtctcttgatatatttagaactgatcactagccagtatggctccatatatttctaggacagtgtaacccacagtgacataaattaaaattttaaaaaaatcaaggatacagtaaataccaactgtctattaatattgattaataaatcaatacatttaaaaaataataaagtttaatttttcaaattgataaaagtaaaaattactaaattgatacattactgagttaataaaattaacatttactactattaatctaaatgggaaggtgaaacatgggacaaagaatgaatttttctgaacctaaaaactggaaggaaagtcaaaagtacttaccagagcatgcttaggatgcccaaaggtactgtcagttcatctcccggaggtggggttagtttagtcaccaccaaaataaaactgtggtcaaaccatgaattttggagtattaaatgaacccagttgtggattcactatggtcaaattactacaagaactgggactggaataggttgccctgccctagaagtttcctagttgattgagttgaggtctgattaagttgaggtcacttccagacacacacagtcgcactctgattcaaccatcccactccaggaatggagaggaaattaatgaagccttactgacaagtttgatgagggagggagcagctatgttggcatgtcttctaagagctgtttctgacttctggtgcccagcagtagtccagctatggtagctgatcagttgctgcctaattacctaatcctattggcaagatgaatgtttcagttcgctgctgtgcctttaatcataattgtcttttattcattcagtttgaggtcttcctggttcttgggatgttgagtgattctcagttgaaacctggacatgttggatgttatgcgatatgactctgggtcttacttagacttctgttttagctggttttctttgacaccactccagcaggggaagaatggggtgctgcctcagtattgcccagtggaggtagaagtccagtttctcccacttggaccctgctgacactcaaggggtggaggcttcttgttactcctaggtggagatgggtattcatgtccccactaggcttcactggtgtatccctgcctggttagggtaggaaggcctccactaacacagtgggggtgaaggaaggggggcctggttactgctgtgcggtagtgaaggtccgactccaccaggagacacggctgttactgctccatggaggtggaattctagaatcctcacctagtctctagtgacactgtggaggggagacttcattgctgatggttggagattatagccctgcctccctcggctttccctgacaccttccagtggagcaaggagaggctgaagcacctcctcacaacctggtgagcatggggcccgccgcttggtctttactgacatgagtgacagtgggaccacatggtctttggaatagagtgattgttgtcccacaggtttctatgttgctaggctgtccctttcctttggaggcttctttggctagagagagtgggctcctgttgaagcttttttggtctgtgcctgttggcatttcctggttgttggcttcttcagctctacctctggatatataaggcagaaagatccagggagctgcaggtcacagcactcctgactggtctgccttctctctgcctttttagtgtttgtctgtgtgtatagttcttgttgtacttttatacttagtgtgctggagaaaaaaaaatattcctgatacttcttaaagacagtaaggcagactattcaggggaccactgagatgaggatttgtgttagagggcagagattgggctcaactcagaatacacaaggaccaatggagatgtgtagcgaaggagcagggtgggggtcagtgatggaaaattactaagaagaaacgtcatggctgggggattcttgccagacctactcaacaggagttgctgaagacaagccagagagatgacatattgatagtgggagatgaggaatttgatcagatctcatgagtgatcaggcctcaagggtggggatttatttttgaaggaagacttaagcaaactaccttttctctttaggaaaataaaatgtatgttctgggcttagatatctaagtaatcagtaggttgaattttaatgcttacatgcagataaccgatttttttaagttataattttcattactacctcatcccttagcccaagtcacatatttacctgttttggaaaaccatacctctggcagcagttgagctttgatgtctagtatcattactttattcagcttccaattcattttaagtggtccttaatgggtattcatttcttatcagaatcaatctatacctgatacttgtatatttctggaaatcaaagtttttcaaatatttggatttataaaattataagtggaaatatttcaacaactatgaagagatagataatttaagatacttttctataattaacaactttttttagaaaagcctgattttaataaatggtggttttctgtttttttcttctacagaaaagactgaaagccatttagctcagttgtacaaaaaagaaactttagagaatagagaaaatcaagagtgcaatagtagctgtgggaaaattttaacaatgtaaccacgtatgtttgtacagatacatatatacagagaaatccttttataatgaatagtcagagtataggagaaaaaaatggtattggagagtttggccttatatcatttgctttcaatctgaatggttcagtaagaatctaaaaatgcctttatatcctctgggtttatttaaagatacttcactgtatgtacacacaggtgtatagttggtttatgttttgactcagttatattcttttcttaccatgtatggaccatgattttgtaaaaagaaaagataaaattccctcagaacatctagctttaagaactttggctgggtgtggtggcttacgcctgtaatcccaacactttgggaaactgaaaggcaagaggatcacttgagcccaggagttagtgacgagcctgagcaacgtggggaaacctcatctctacacaacaaaaattttaaaaattagctgggcgtggtggtgcacatctgtagtcccaggccttaggaagctgagatgggaagatcgcttgagcccaggtggtcaaggctgcagtgagctatgattgtgctactgcactccagcctgggcgacagaggagaccctgtctcaatttaaatatcaaaaagaacttttattcttgtgatctaaagttcttttttttttttcctttagagagaacacacgtgtgtgtgtgtgtgtgtgtgtgtgtgtgtgtgtgtgtgtaaagtgcttggattcttgaagatcactttctctgcttgcttagctgttcttcaagcaggagaaaatatgctgtatttatgtgattataaaaagcattgccaggcatggtggctcatgcctgtaatcccagcactttgggaggccggggcgggcagatcacgaggtcaggagattgagaccacggtgaaaccccgtctctactaaaacgacaaaaaaattagccaagtgtggtggcgggcgcctgtagtcccagctactccggaggctgaggcaggagaatggcgtgaacccgggaggcggaggttgcagtgagctgagatttcgccactgcactccagcctgggtgacagagtgagactccgtctcaaaaaaaaaaaaaaaaaacaaaaaaaaaaccacaaagcattaagcaatttaatttctgtatatttagtaaggaagtgatcatactttaaaaaaaaactttttaggccgggcacagtggctcacacctgtaatcccagcactttgggaggccaaggcgggcagatcacgaggtcaggagatcgagaccatcctggctaacacggtgaaaccccatctctactaaaaatacaaaaaattagccaggcgtggtggcgggctcctgtagtcccagctactggggaggctgaggcaggagaatggtgtgaacctgggaggcggagcttgcagtgagccgagattgcgccactgcactctagcctgggtgacagagcaagactcctctaaaaacaaaaaaagaaaaaagaaatttagtattacttcttgttttcgtggcctctgtatctgtaaaatacaactgtacactcagtgatatggtttggctttgtgtccccaaccaaatctcatgttgattgttattcacagtgttgaagaaggggcctgatgagaggtgattggatgggggcagcattcctccctgttgttctcatgatagtgagtgagttctcttgagatctgatggtttaaaagtgtgcgatacttcccccctcacctgtgctctcactctctcctgccaccatgtagaaaaggtgcttgcttccctttcaccttccgccatgattgtaagtttcctgaggccttccagtcatgtttcctgtgaagcctgagggactgagtcaattgaaccaattttcttcataaatttacccagtctcgggtagttctttacagcagtgtgagagcagactaatacactcagccactcagataacctaaattacagacaaactgtggtaaatgttcttggatcctggccattgttcactgatttttagaataacagaatgcacttgcctgcattttcttcttttctttagatatggtgttgagtctcactgaatccagctaataattccctttaaacattctgttctttgagaacagatacagctgggagaaatgatcctatgacattaaaactagaattggattgcattaggtttattgcaaggatgtgagatctgtactccaaagtggggcagtgaccaggagcaaaggctcaaccactctttgtttttgaacagtttcattttaggtactgcactgggccattataggcaaattggcccaaaaggtatttcactcctggaacttaagttcatgaccaacttttaggaatggctttttagatctgactgttactttttcaccagaatgtaccataattatataccatggccttgccagaaaacaggaaatctttcaaaaattaggagtggaatagaaattttgtagtttttttttttttttcagttttaaaatgttgaatgtgtttttatccttgtgttaatatatgtttgaagagagaaaatataggctgctcttctccagagttcgaagttaaagtctgcacagcatatgggaaagtgctaaatatacatggtaattggaattaaccattaagatgaacatactcattctggcagctaagaagggatatcttcagctcagggaaaactataagctatgtttgtaagtccacccagctgggttatgtgtctgggttatagaagccaggaatcccatgcaagcgtttctaaggattacaaaaacggtcatgatgagatggaagagaacagtttcttaagaacgagcagatagaccaaaaaaaattttttttatttgctttctaccaagagggggaaaaaagtagttttcatgggaaatatgttgaaagaacagatgtcttgtgagcttaattccataaatggtgatgtgcccaagaataccctgagataagaagaaaaactacatggagtcttaaaaaaaaaaatcactgagtcctaaagtaaataagtgaatatccataatcaacaattttccttttcatattaaatctatttgcgtggaaggaaatgaaggagaaaactttataaatatgtgtaaactggagtccctggattctagagttcttttgtgaaactagtgtaaggaacagaaattgtctttttatctgagaaaaaactgtgctagttgagatgtctattttctttgcttttgactgagataactcactgtggtaacactgggttttaaattctgattggtaactatatatctatttttgtttaatacaaagaggaaaatgaattatttaataaaggaatttttatagaaaaagcattcaaaatgttagactcattgccaaaaaatatatgtcgtccttaatcgtaggaaaggtgggagctacaaacctatcatttttttgcaccaatcatggaaaattgattcttgaattcaacaaacatataaaggattttatctaagctggcaattttactaggtactgagttgatagaaagatgaatgagactctgtcgcagccctcataaactcaaatctattggaagaaaagatatgtaaacagatgattagaatctgtttcagatagcgcggaaagccttttgttccaaacctcaagaagctgcataagcttttaccacctctaaaaatttgtcatgtgtggttgagctcatgtgagagaatggtgtcagaatcaaagagggggctgaaagataaagatgaggtgtgtgagcctatgcagcagctgcccaggggctagcagacgtagttatgactagaaggacttgggtttacaaaatgcctatacagagaatggaggtgaggcattgagctcacaagaggtggggagttggaaccgaacctctgctgaagatgggtccattagaggctcgctgtgcagaaaagcaagactcgttcagtcaaacgcctaccagtgacagatgacaaagaagcttttctctgccctgactctgggaaggagcccagagtcagctctaagaaaccaaagttatcaagcctgtaccttccccaggtttagactaaaaatttatgtcactacttgtctgggaagttcctacctgaagatcacaaagaaagaaatgtacatggtccttacccattcatagtaagataatggcaagctgaggtgctttgtgaccaaaatcgagaatttaacaacacactcaattaagcaggctgtgcacattgggaactctgatactctcctggtgggaatgcaaaatgtagacctcttatagaggcagtttggcaatatgtagtaacattgcttatctgtgcgttgactttgtgacccagaagctttacttctagaaattggtcccacagacacatcttcaaaaatacaaaataacatatacacaaggaaattcattgctataatatttataatagcaacagattcaaaataacccagttgtgccacagtgggatatttgttgtcaattatagtatatccatcagagtggaatactgtgcagctgtagaaagggatgagaaagatctctattgatatggagcgattcccagaacatactgttaaatgaaaaagcaagatgcagaataatgtatttaacatattactttttatgtaagaaaagggggaacatgtgcaattatatgagtatatgattgctaataattgcaagaagaaacaattgaaagacaaatcaaaaatttacccaaaaaagttacctctaaaaaggagggaacaggatagaggagacaggggtggaagcaagccttctgtgattatacctagttatatagttttgactctagaatcaaatgaatgtattacataatcaaaaataaaattagatctgaaaaaaggaaaaaagcagtccttgaaatttaaaaacaaacagaaacaaatgaatctaattatatattaaattgttgacattcacattgagcaaataattatttcagctaactttataatacagatttttctctgtacatctcagtaggataaactccaagtaaaagaacaaaaatgcgaagttttttttagtggtctcactctctcccaggctggagcgcaggggcacagtcaccactcactgcagcctcaacctcccaggctcaatcgatcctcccacctcagcctcccaagtagctgggactgcgggcacatgccaccgtgtctggctagtttttgtattttttgtagagatggggtttcaccatgttgcccaggctggtctcaaactcctgggctcaagtgatcctccctcctcagcctcccaaagtgctggaattgtagacgtgagccaccgtgcccagcccaaatagattttagagttcatcctgaaggcatattgatagtaattgtattggttttgaattttaaaagcattatattgttagagaaaacaaataacaagtaattatgttattgttaggaaccaaaatttttcagcataagagaaaaaaatataaagtataaaatcaaagtagtttagtaaacccagtcttcaagactgagatctgtaatcttaaatctgaatttaaaacattactgttaaccaataattttctcccttttaaaaaaatatttatttcctatctctgactgaaccagactagaagaaatgataaataataaacaccccacagccggattgtggtttcccacttagtctgtgtatggtatgctgctataacaaagtcggtaggtaggtagattataaagaacagaaatttattttttcacagttctggaactgggaagtctaagatcaaggcaccagcaggtttggttgtctggtaagggccgcttttgacttttaagatggtaccttgttgctgtatcctccagagggcagggacgctttgtccttgcacacatctattcatttactcatttgtttatgtaatgagttccctagtaaacttcagtgctgacaaatgagtttattttcttttctcctacttttttttttttttttttttttttttttttgttgaaacaaggtctcactctgtcaaccaggctggagagcaatggtgcgatcatgacccaaggcagccttgaccttctgggctcaagcaatcctcccacctcagcctccaaagtacctgggactacacacaggcatgtgacatcatgcccagcaatttttttttatttttttgtagatacagggtctggttatgttgcccaggctggtctcaaacttataggctcaagcagtcctcccacctcagcattccaaagtgctgggattacacgtgtgagccatcacgcctgccctctcttaatattttttaagagcaaaagcattatttacttacatggctgcacattggcttattttatatacctttattgagatatgattcacatcccatgcaatttacccgtttaaaatatgccattccatattgtttagtaaatcacagaaatgtgtaaccatcactacaataccctattttttaaagtatctttttctagtattatttcagtgtcatcgctttttatatattaaatacattttcacaaattgaaagcattattgattttgctgctcaaattgttaaatgtagccattgtccctttcccccaggcctggcaaccactgatctactttctctatatatagatttgcctattctggagatttcatataagtgaaataatatactatgttgccttttgcaggacttctttaacttggcatcatgttttcaaggttcattgatacttgtagcatgtatcagtacttcattcctttttatggctaatagctcattatatggatatgccagattttatgtatccattcataagttgttggatatttgggttgttcctcttttttgactataataaataatgatgccgtgaacatttgtgggtgcttttttgcatggaaacacgttttcagttatcttgagtatatacctaggattggaattgctaagtcatatggtaattgtatgtttgccattttaaggaactaccaaaatgttttgcaaagagaccttaccactctacaatcccaccagcaatatatgaccgtccctacacattctcaccaacacttgttattgacttttaatagccaccctggtggatgtgatgtggtatctcattatggggttttgtttgttttgttttatattgtattgcttctccgttgttcctgtagatcactgtggctttgatacgcatttccctattggtgttgcacatcttttcttgtgcttactgcctatttgtgaatcttctttgttgattgaaaagattcaaatcccttgctcatttttaattggggtatttgtatttttattattgagttgtaagagttctagacacaagtcctttatcatatatatgatttataaatatgttctcccatcctgtcgttctcttttcactttcttgttgatactgtttacagcataaaattttataaattttgatgtgctccgatttatttttttttcttttgccgctttcgctctttgggtatattatccaagaaatcactgcctaacccaggcctcaaagatttactcttatgttttgttctaagagttttatagttttagctcttccatttagctctttggcccattttgagtttattcttttatatgttctgagactgagacttaatgagtttgacatcattttctttgcatgtctatttctatttgtcccacaccatgggatgaaaagagtattctttctccattagattgtcttggtacccttactggaaatcagttgaccataaaaaaatgatgatttgtttctggactctcaattttgtttcattgatttctttgtccatctttatgctgataacacactgtaggtaaacctactatttactgtaggatctgaaatcagaaagtatgagtcttcctaactttattcttctcattcaatattgttttggctatttttgtatttttttttttttttttttttttttttttttttttttgtgacggagtcttgctctatcgcccaggctggagtgcagtggcgtgatctgggctcactgcaagctccacctcccgggttcacgccattctcctgcctcagcctcccgagtagctgggactacagacgcccaccgctgcgcccggctaattttttgtatttttagtagagacggggtttcacgtgttagccaggatggtctccatctcctgaccttgtgatccgcccgtctcagccttccaaagtgctgggattacaggcgtgagccaccgcgcccagccctatttttgtattttttaaaacaccatgtgaatttacagttctctcaaaaattgaagaagcagtaatagaagtagcactaatagtagcagtagtcatagtagtaggagaagaaatgctgtagcaaataaagggaagggaggataaaggaagcaggtagagcagtagaatcgtttctgaaggaggacatggatgtatgggttttttctgttctttcctctggtgtatgtttggaaattctccatataaaatataattattttagttttaaaaggagaacaggctctgaagctagactgtttgtattagagctctagccctgtgacttattcatcatatgaatgtcgctaagttatttaggctctctgtacctcaataaaattgacatgcaaattgtaccaacttcatattgttgctatgaggattaaattacctaaagctctcagaatacttggcacttagtaagtattcagtaaatgttggcttggaaattgactatttttgaagggagggcggtaaaaaaaaaaaaaaaaaagagtatttttaaaagtacacgtagatttaccaaataatcaataaatctagttattcaattaaaaacttagtggcaagttaacgtatatgaaaggagaattaatgaacttgaagattctgccgaaattatccaaaatgcagtgcagaaggataaaacaaaattgaaaatatcaaagagagattaggagacatggaaaacagactgagaaggtacattcatctgataggagttttgagaaagaccataggggaaattcagaaggaccaatattgcaaaataggaaagtatacatttaaaaaactggaaattacagattttgcaaattagaaaataaggaaattgcaaatattgtaaaaaagagaaattgcaaaatatttagaacagggaaaaacactttatatcaaaatttgtgagatgctgctaaagcagttcttggaggaaaatttatactcttaacacatatataaaattgaaaatgaaaaggctgggcacggtggctcacgccgtaatcccagcactttgggaggccaaggcaggtggatcacttgaggtcaggagttcaaaaccagcctggccaacatgatgaaaccccgtctctactaaaaatacaaaagttagctgggcatggtggcgggcatctgtaatctcagctactcaggaggctgagaaaggagaatcgcttgaacccggaggttgtagtgagccgagatcacaccactgcactccagcctgggtgacagagagagagactgtctcaaaaaaaagaaagagaaagaaaaaaagaaagaacagtaatgagctaagcatccaaatcaagaaatagaaaaagaatatctgtgtaacccccaacacacacacacacacacacacacacacacaaaagaacaaagaaaataaaaacaaattaaatgaaatagaaaacaagctgtaagagaagatcagtgaaactaaaagctagctcttagagaggatttaatgacttaattagatgtgaaatacatagtgagacagattgttcatgaagaaaagaccagatattataataattttaacagtgacttaatctgatgtcccttcagacttctattactaaagaattaattagtctgcttttattctggttaatagaacctgcaactgaactctcagattttttttatcaatactaaaacacaaatctaattagaatttaaactttttcttttaatagctgcgtttggataacctatcctgtctcttagcttatgtattcttctatgaaatgtagtttctgtaacaagttattttaacattttggacattgacatttttgtcgtagaagaaaaaattaacagaatagacaactaactcctttttcctctgggagggtatgtatacctggagatatacattgatagcaaagaagtctatttcagcaagtttcttccttcttcccttcttccttttttttcccccttccttccttcagacaacgttattctttatgtcgttgggaccaggggtttcatctccctgcacatgcacctggcacggttcaagaggaaaaacatttggatataaaatatctttcatgtcagtaaaacatgaaggaattactccttttgctttttggtcttatcttgagaagagcatactatgagagccccttaagagcacagagtcatttatatgatctgtgtaacatctaatgctctgtgagctgtcagatatttagtgctcaacatcataactatgcagggaacagacttcacaccaagtttcttcatactagacctaggaacactaaactttgatcatcttcgtgtctttttggaaatggagaagtaagttcttacaactgtttttttcattctctgacgtggatcaaataaggaatctttggtcttatctgtccacttggatcagtttttttcaggcaggcatacgtactcactcctaagaagtactttaaatgcgttctgccttgaaaatggatttgtgtgtactttattaggatttctttttaagtttttaaacttatgctagatatcagatattaaagattgtctcatgttctaagaaaataactagccaagtctactttcacccacattcctgttaaagtcaacatggaaaggtttcttaaccaattgaatgacatgatacagatgtttcgctcactttctgtatatgcctctttcctttcttctattttccttttttctgagagctgctttgcagaagactttgtcatgaaataccacatgccataagaaaaattagcctacatcttttcaagattgtcttagtccattcagactgctataacaaaataactcagactgagtaatttataaacaatagaaatttattgctcaccattttggagaccagaagtgcaagatcaaggcagcagcagattcggtgtctgatgagggcttgctctcggcttcgtagataatgctgcttcactgcatcttcacactgcagaagggcaaacgggctccctcgggcctttttccaagtataatggatacatttatttatttactcatccatttatttattcattcatttatttactcatccatttacttattcattcatttgcaataatcctttgaacaactactgtttgcaaaaaaaaaaaaaagtatgttatttgccaccagtttgataatggagataacagttctatatgaaaaaatcgatagttggtctcacaagcaaagtgtgctgggagagcaaaaacagaagaaaaacattattttcatattttctcttttgagtgagacactgtcctctttaggagttcagtttcctaccagtgatagaactagatatttacatctcccaaatcaaagtacaaactttggccatagaaccttgttcctcgttattttctttttattttcaacttttattttagattcgggggatgcatacacaggtttgttccctgggtatattgcatagtaccctcaggccttttttacagggatgctaatctcattcatgagggttccaccctctgacctaatcatctccaaaaggcccatttcataataccaccaaatcaaaggttaagtttcaacatctaaatgtggggagagccgggcgcagtggctcatgcctgtaatcccagcactttgggaggctgaggcaggctgatcacttggggtcaggagtttgagaccagccaggccagcatagcaaaaccctgtctctactaaaaatacaaaaaaaatagccagcgtggtggtgtgtgcctctaatccgagctacttgggagtctgaggcaagagaattgcttgagcccaggaggcaaaagttgcagcgagctgagatctcgccactgcattccagcctgggcaagagaacgagactccggctcaaaaaatataaataaataaataaataaataaataaataaatataaataaaataatataaaattggggggaacacaaacattcagaccatagcaaaggtctctgggggtcctcccagaaaagagaaatttgattcacagataatttattaatcggttttttttttttctatcgttatgtactggagggaggaattgactttaaaatgtgcttacattattaggtgaaaatgtaaagaacctaaatcttcaacagtatgggactcactaaatatccattcaggggaccaggcacagttgctcacgcctgtaatcccagcactttgggaggccaaagcaggcggattatatgaggtcaggagttcgagaccagcaaggccaacatagtgaaacccatctctgttaaaaatacaaaaaatagccgggcgtggtggcaggcgcctgtaatcccagctactcgggaggctgaggcaggagaatcacttgaacccaggaggcagaggttgcagtgagccaggatcacgccattgcactccagtctgggtgacagagcaagactccatctcaaaaaaattaaataaatggatatctattcagccaaatgctgtgtagccagttaaaagtagattttgggctggtcaccgtggctcacgcctgtaatcccaactctctgagaagccaagacggggggatcacttaaggccaggagtttaagaccagcctgggcaacatagtgagaccccatttctaaagtttctaaaaaaaatacataaactttctaaaaccaacaaataaatatatatacatatgtatatatacacacatatacacgtatacatatatgtgtaattttttaaaacagtattttagaatactatttaatgacatgaaaaaatggtcatgataatgatgatagctaaaatgtattgggtgtcagttttacgccagacacctttttaagtgctctccttgtgttaattcaacaggttaatcctcacagcagtcttatgtaggagaaaactgttgttatccccattttaaaggtgaggaaactgagactcaacagcatttacatagcttgcctgaagtcagctggtgagagacagagctagagtttaaactcaggcaatttggctcttttaaatcccttgctcagacatattacatatctctgtaaattttttttatgaaactagacaaactatttttaattcatctagaaactaaaatgtgttaaaaataacctgtcaaattttgacagagtagaattggtggacatattctaccaggtatgaaaatatgctataagatatagtaatttttaaaatatcctagtgtagctgaaatagagaaaaagtagaataaatcagaagagcatgccactttttatgttcacagggaggggactaaatggatacacctaaatattaagagtgacaatcactgatagaggaattatagatgatttttctttcttttctcttttttgtttgtactttattttttaaattatctataatgccaggagttcaagaccaccctagacaacatagtgagaccctgtctctacaaaagaaaattttttaattagctgggtgtggtggtgcctacctatagtcccagctactcaggaggctgagttgggaggatcacttgagcccaggagtctgaggttgcagtgagcagtgatgatgccactgtactgtacagcctgggtgacagaatgagactctctctaaaatataacaaagaaaacccaaattatctttagtgagtatttttaaatcatacagtattagcaagtttatttttaatgctttaaaacttcaagttttaacaatattttactagtgtaacatattgctgtttgattttatgcatcatgtaccctggcattttctaagctgcttactctgcagagttaatttttctaaaatgttcaatatattattcatttattcaaggcctaaattaaccactcacacagaatcactaatccagtcttcctttttgataaagatggagaaaagacaatgggattatagtccttttctggcttagggttgaggagaaggatttcagaacttttaacttatttttaagactcgaattgtttattgatggtataaagaaaagctatttatatatatatatatgagagagagagagcacttctgtctgaacacctcactgaactctgtagtaaattgtaatagttgttcaattgatttttttattgagaccctgtctctacaaagaaaattttaaaattaagcatggtggcgtgcacctgtagtcccagctgctcgggaaactgaggccagaggatggcttgaggccaggagcttgagacaagcctgggcaacatagtgagaccctgtctctttattttattttttatttttttaaaaagacagttcatgaagtgcttgatttggggatattgcctcttccccaaaaatttctgtatcaatttaattgccagtcttagcccaagctgccataataaaatgccattaactggatagcttaatcaaacagaaatttattttctcacagtttggagaaatcaaggtagtgtttgattcagttcctagtgaaggttcttcctggcttgcagaggctgcctaattactggatcctcatatgacagagatataaagagaaatccctctatttttctcttcttcttcttacgaagcccagtcctatcagattaaggccccacccttatgacttcatttaaccttaattacctcctgaagaccctgtctctgggtatggtaacgttggggtttaggggttctacatatgaatttgggggaggcacaattcagcccgtagtattggctaaactctttccagtatcctcagaaatcccatatttagtttattttattgcagacaggattagttttatcctttcttatggaactcttaaaatactcgttactttacagtgtgtcatagaaactttacttaaatttaaccttatgaataatttcttcctagacgcaaaatcgaatgaagctaatggccgacaactacgaggatgaccacttcaaatcctcccattccaatcaaacaaatcacaagccctccccagaccaggtaagatggctctggaatgttttattaaaaaacccacacacttaaattttgaaatgtttttgtactagcatgttgcaaattctgagatataagttagaagaataaaaataaatagctaattcagttctgaaaactctactcttttcaaaaaaatcacagattcagtttctttataggaagaactggatattttaagagcagatacttgaaagatttgaacaataaagaatgcttgaattgggttgagaaaaaaattaacctcagagatacacactaataatatgtaatttttaactgtctttactaatttttaactgtcttggttttctttttaaagaaatagtgccttattagaaaaacaagactctttccttacaagcctagtgaggcacagtttggaggttatttctgtttagttgcaaattatgaactctctgctcattacctattaaaagtgaagattgaaacttagttcttcactccctgtccttgtggatccctccagcatgtcatgcttaaggaaaattgttgccttcaacttctcatcaatgcaaaagagatattgatgaatctgaagggaaccatattccattctagtttcttggaagaagggaactctccccaaatcttgaaaatgatggatgggagagaatggtgaacagattacctcatatcccattaccaaaaatcaaattttaacatctctatcacacccagtcttaaaatatgtagctaagggaaaaaaaaaaccagtcaggtaatcacatccatatgactaaagcatcaaggaaaactttcctgctaaacgtctccactaaataacagctatggcgttatcttagcagaagcaggagaaatagtgcagatgaaagcagcaatggtattcaaattgctgttgcttccaagattcggaaggtatagtcctattatgatgacgtttcctaagccagttgaggcaagccttgtattttagaaggaaaacaatgtaaatatttaatgtgggcaaaatggagagctatctgcctggtgtcagcagtctttccctgccaagagatcattttaccttttctgcctgcttcctgatacctggaactgaatttatgccagggtatataagatgcatgtttgattcctcatgaaaacaggtttttgataatagaactggatgcctggagtaggaagagacaaacagagaaaggttgaaggaaaagcaaaacataaagaaaaacctccaacttggtaattttgcccagatccagccctgagatagagatagcatcttggaaagtaggaagaaaagaagtataatgacaaactacagttgttcctgagtatcctcaggggattggtttcaggacaaacccacccacaaatgccaaaatccatggttgctcaagtcccttatataaaatggcatagtatttgcatataagctacacacatcctcccatatactgtgttttgttttgttttgtttttgagatggagtcttgctgcgttgcccaggctggagtgcagtggcatgatctcagctcactgcaacctacacctcctgggttcaagtgattctcctgcctcacccttctgagtagctgggattacaggcacctgccaccatgcctggctaatgtttgtattttagttagagacagggtttcaccgtgttggccaggctggtctcaaactcctgacctcaggtgatctgcccgccttggcctcccgaagtgctaggattacaggtatgagccaccatacctggcccctcccatatactttaaatcatctctagattacttgtaacctaatacaatgtaaatactgtgtaaatagttgttatactgtatttttaaaattttattatcaatgcattgttattttttattgatttatatatatatatgtatgtatatgtatatatttcatccacggttggttgaatccacagatgtggaacctgcagatacagaggaccaacattaactactaattttgatagtttagggaattagaatctgtatgagagagtcaagaaattctcttctgctacattatgcttatgtctttgttttaaatactaaccacctctttttcattccatgctgccctggggcattgcccccttgtcatctctctccctgtaggatgaggaggagggtatatgggcatagccaatcagaggcttagttcagccattttgttcagaacggtgagaaacagctttccttaactatagaaatggtttttgtttgttttcatttttctttttacacagtaactctcacatctcatttctctgtaattcatgaaatccctggtgtgctttctgtttttttattttcacgtgattcttgtgtgtgttgctgtgctgctgacatagtggggtttggattttgtggcttttttttttttttctcgttgtgtgttaatagtcacttctgtaatttctttttatacatttttgggagaacttctaggacgtgtaactaaatttctccagttgtgattttattaattaccctttctagggtgattttacagtgtcctggcaaggtttatagtaattttatatgaaattggcaatagaaaattgatcaagtactttgctcattggcctaagtttgaggtatactttttatgatgattaattataaatacatggtgtttaaaaaaaaaactgtactgtgaactaaaacctccttttgtttgtttctgtagaagaatgagctctcacagtcagcacctcggacacatcccctggggctttggcattaccctcaaactatccctaaaaatattgaggagcaaagtaaaggaaaactttttttagaagtcattctaaaaattcttttccctcccttttcatggattgctgcagtgttcaacagttgccaggacactgtctagattctccttttcaggacaattggctggaaagtatagtccagccgtggcagtatctccctttgatctgatgcccttgaggtttgactaaggaaatccttttcttagaaaaagtaataattatgattaataagttcacacatatttggtggccttgcactccctggattcactgcccatgcctatcagtgatctcactcccctggagtcagttctccctgaaatgtctttgtcttggtgttaaacttcttaaaatgatgaggacatgtgtagatctcttaacgttgagcacaaccaagaaggatggagaggtaagttgtggaaaggggccatgcgctgtgaggtgggaagctgtccagatggctttatcctgagggcatgaatgaagttgaaacgcactgggtcaaccagaaagctcttcaggttaggatgctgcatgtcagagaaagctaaagctgagagcagtcaatgtgctaattatctgcactggacaagggtaggtatttgtcatcatcaagcatgtgagaccgtgcagtagctggatgtagtttactggtctcttagaaatgagcatgcccctaccttgtctattttggcagaacataggagcttcttagcttccttcagctggaagcaccacatatgtggacatgattatatttttgtcgcaaatcctttttctggccaatcagaggaagcctgttggtattctaggaaacaggcctataggtaacttcaccaggagactagaaagtaagcaaatcagtatataaacttgttcctgaaatcttcattttcctttctctaccaaaataggataacttagctttttccaattatcgcactattgagcatattgcactaatatattaactttcattggtttaacaccatgcaattgcaattagccagccataactggcgtttctatgatatggtgtttccaattttataaaatgtgctgtaaacctcattatatcataaggattttacctaaagaaatgcatgagtgacccctaaaacactgcagaagttttgactggctatccactttccttctcctgtttcctcactaattttacagaagatagattttctttagaaattcaaacttttgaaattgacgatttaccttatcaaacttaaaaacgtgtgttttgcatctgaaacattttctaggacaccaatacatactgatcaagtgtgagccttacttgatgtatccatagatgggaagagaatcacagatgtactgagctgaaaaggattctggagttaggccatttcaggagaggtggtaaaacgtaacgcttaagagtgtaggctttggagcgggatgcctatgttcagattctaccaccaccatgtactagcttctgatttggacaaggtacgtcattgcgctgtacttcaatttcttcatctttaggatggaggttgttgtggggagtagataagttgtgagacacgtggactccagagccagactgcacagctttgaatctagacctctccacctgccctgtgaccttgggaaagtcacttaaactccctgagccccagttcctttatccaaaaaatgggtttatgaataatgcctacttcctaggattattggatagattaataagttgatagctgtagaatgctttgagcagtactgtacatgcctttgttatgctgttgccgttgtcatcattaacttagatccgtctccaggaaatagtaagctttcaataaatgttagttcctgttgttactaacatcatcgtctaatccagtgccctcattttataggtcaggatgcaaaacaaagattgaaaagttgtgacttaaggtccccaggcatttctgtggtctggaaggaagaactagtatctgacagtaaaagaggtagtgaagacatattgatggtgatagctgtcttccatcaccacaagtttcatctcctatatgttgaggaattttttcctttgggaaaacaccttgaattttataaagaaattccctattgtatgacatttagtcagtgaaatctttgaaagaattagctgtcaagcagccctcctaagacacacggactgaagcaaggactgcctccactcataaaaaaaaataacagttccttcactctcctcttggcctatagaaaatccatgtgagggccagactcggtggctcaagcctgtaatcccagcactttgggaggccgaggcaggcagattggttgaagccaggagtttgagaccaggctggccagcatgacaaaaccccatctctactaaaaatacaaaaattagctgggtgtcatggcaggcacctgtagtcccagctactcaggaggctgaggcacaagaatcacttgaacctggggggcagaggttgcagtgaaccaagatcgcaccactgcactgcagcctgggtgaaagagcaagacagtctccaaaaaaaagaaaaggtaaaaaaaaagaaaaagaaattggttctctctctcacatgtcattctgctcaggcattcatgttaggtgttctaagttcaataactaagtagaatttgagcatgatttgataagttatgtaactattcagtaaatcacttgaataaatgtctatattgtaatgtgtttaaattgcactgggtccaatagccatgaagtcttatatgactatctcagtcagctcaggctgctattgaaaatatcatagactggatggcttaaaccagcagtccccaacctttctggcaccaggaaccggtttcgtggaagacagtttttccacaacgggggcttggggaagatggcttcacaatgaaactgttcttcctcacatcatcaggcatcagttagattctcatcaggagcgtgcaacctagatccctcccatgcccagttcgcagtagggtttgcgctcccgtgagaatctaatgccgccgctgatccaggaggcggagctcaggctgtaatgctcgcttgcccgccactcctctcctgctgtgctggacagttcccaacaggccacggacaggtgctggttcagggccctggggttggagacccctggcttaaaaaacaaacatttattttttactgttctaggggctgaaagtctgaggtcaggatcccagcgtggtcagatgtttggtgaggaccctcttcctactttgcagatggctggcttctcactgtgtcttcacagggctgagagagagaggaagcaagctgtctcgtggtgtttctttttataaaggcactaattctatcatgagggctccaccctcaggacctaataatcttcccaaagccatccagataccatcattttgcagattagggtttcaacatatgaattttgaggggacacaaacattcgattgatagcaatgacgttgctgactcatagatctcagtggtgcacatgtgacttagtctccgcccaacagggagttccagagcaaagatttcctatgtaagttagtttatccatgccactctctatccgtttactgtaagttttcttcttttttctttctcctttcttcccctcctccccacctccttttaccctccctcctcctcctccctccttactgtagaatgtaggccccatgaggacagggactttaatatatttacttatgtattcccatcatttaaataaatgcccaggatatagtaggtcctcagtaaatatatatgtgtgtgtgtgtctgtgtgtgtgtgtatttatttaactactgaattcacaaaaatccagaaaagtaaaagtaaagtttacattgaaaccaggagcatagaaattggttgttagctttattgtcagcactgctattactagaaagggaagataagaaagatgaatggaaacaaaagaattttagagaaatgttgagaatttaaaggaaaatcataatgaagtcctagagtctgcctcctgaaattttacactgaatataatggagttgaatgtaattctgaaatctttttcatttaccaactgaaaatccttcgggtagaaactttccttccagtaacctgtggttcttagccatcaagaagaacagcatatgctctttctggacttcaccccgtggagcagtttgtgtgaactggtgctaggtcccttcagtaaaggatggacctaccaaggggcttaaaagttggtcttggtataagaacatgccacttactacaatctggaaatggcctgcctattagatcagcactgtagcatctcaaaacaggatttggaccagtatgctagacttttctttttcattagagatgatgtaaatattaacacaaacttttaagacaagtgttgtaaaacaagcatctccttctcttttggcatttcctttttgtccatcttagtggagttgtcagtgtacttatcagttggaaacatcctaaaattattctcattgcaacagtgcaacaatggaagccttaaatttctagagaatacatccatagaagggaggtgttaaattatcttgcagaattaaatggtgcagtgaattgcactgctttcttggtatggagaaaatggtccaaaaaccaatttgggccaatatcaggactgacttttgatatgacagacaaggaagaattcgatcctctattttcagaagtggatcagagattttagcaagaaacttctttcctggaaagcttagaacaaagccaatggaattaaagaagcacaaggatctagctgctgagaaataggagggagaaaatgaacatttattaagcatttactataggtccagcactttcatgtatcttatctcatacagggctcatagacgttaaataattttccaagattacacagctaacaagcggcagatatttaaacccaggacagactccagaccccctgctgtctccattacaccatacccaaagaggagtcttccattttccagtctagttccttggacatagtagacaactccatggaagggtgttgaattgaattgaattcctaactggggaaataacaaaatggtctttgctggtaaggaatatctgtaggttacccaagacagaccctcactgaaaagaaactaagtggtttctgagttcactgataaatgtgactaaccaggaatctagtgaggaatttggaactatagaagggagaaaaaggaggtcttggaggttgagtaaagtttgggaagatgaaacaggaaaagaaaagttttcagataggaactaacttcaaggaggttccaacctaagaatgagaatatgatgtgtaggggctggtgaggaaaccagcccaagtgaaacagagggtgtctgtccttccattggttccatggctatccccacccacacttctgttttaatattggacacccataattcaaagagacaaactacagatgtgaggagctcacaagaacagttacatattaagctttacagagaattaaagtagtaatcagctgcctttggacgttgtctgaatcactgtcttctaagttgattgtccctttatctagttctgttgctttcaggtcctagtcagaaggtgggctttggaaccagattacttggtttcaaactcctgtgtacctcactttcttcatttgtaaaatcaggataataatacacctgcctcagagggctgtttgatgattaaatgaagtaacataaagcccttaaaacagaacaatgcttttacatatcagtagttgctcagttaatgttagctattagctggctttaacctgaaggcacaagctgaccacttatagcattaatacccttcctgcttttatcgttcccctcccttcttcactttctctgtcttcctcttggctctcatttaatgggagtattgaataagagttccttactcttcaactctggattcaaactattcttgcacaacctgaactccagtttaatagtgtttcctctatatgctcagaaatgtctttagtttactgtttgacctcggcacaccacctgttttctgcttttcaggtttctcttcttccctcctctccacaaagaaatttaaaatcttcatttctgcttttcactgttttccagagggttcactccctttacacctcatccttctgtcctggattctcactagctgtctcagaactctgccgtctgctattaaaagccaagctttctgccagccctttttgcataccatactcagcaggtcccttctgtgtgcctctatcttctctaagtcaccatctcatctcatgagcatgtactgaaacacataaacagttttgctactgctgctgctttttttttttttccttctcccaagcaacttgaacctatgtcaaatcaaaaaagattttggaggccgagcgcggtggctcatacctgtaatcccagcactttgggagacccaggcgggcagatcaccctaaggtcaggagtttgagagcagcgtggccaacatggcaaaatcctgtctctactaaaaatataaaaattagctgggtgtggtggcgcgtgcctgtaatcccagctactcggaaggctgaggcaggagaatcactttaacgcaggagacaaaggttgcagtgagccaagattgtgccattgtacttcagcctgggcaacagagcaagactccatctcaaaaaaaaaaaaaaaaaagattttggaaaagagttatttttgacaaaggcattgggaaataaagagtaaatgatggatgatgctagtagttaccatttaaagaatacctactaagtgccaaacactaagttgtaagtttataatcacattgtaagcatgttttcattgaaaccaatataacaatcctaagagatagataccattttcattattttactgctgaggaaactgaaccatggagaagttagctaacttatccaagttcacatacctggtacacagtagaagccagatttgaagccagatatgtctaattatatcaaaacttgacctacctctgaaggatacatagctagaaggattttttaaagacgttattatgcctttgtgttcatgctgattacaagagagaagagagtaaatgatggaattcaggacatgctaccccaaaatatggcacgttggcattggatacaacaacagaagcaggaaggtctctctgaccttctcctcacccttcttgcctgaagcaagctataaagaattttctgacctgcctctaaagtaagtcataaaaccttcattgcagaggtacccaccccatagctgaaggaaaagaatgtccttatctctgaagacagaggaacacaaagaacaacaggccttgttaattcctcccagtttattactgttattagattagacccaattgtcctcaaatcaatttctccatgactgtctcctcttcatcatacacagatttccttcttttctgaagtcttcattttctttctttctttctttctttctctttctttctttctttctttctttctttctttctttctttctttctctctctctctctctctctttcttttctttctttctttctttctttctttctttctttctttctttctttctttctttctttttggagacaggatctctctctctgtcgctcagactggagtgtagtggcatgatcatagcttaccgtagcctcggactcatgggctcaagggatcctcttgcctcagacacctgagtagcagggactacacgcgtgtaccaccatgccctgctaaattttgtattttttggtagaagcagggtctcactgtgttgcccaggctggtctcaaactcctgggttcaagcaatcctcccacctacgcctcccaaagttctgtgattacaggcctgagccacagagaccggctgaggtcttcgtttctgaaggctcccacattacataaaacttacagtaaataaatgtgtatgtttttctcttgctagtctctgttatagggttctcccccattaacctagcagtggatgaaaaaagaaaatctcttctcccctaagaatattcccataagaatatccaattataaataagactaacaataaactccttttaaaatctgagtagaaaaggaccccatggtagcaatgtatgtatgttggactaatttgtaactattctcctaagtgttgaccttaatctttctggtaatgcattttaggattagtatactacaaatgtactttttctccaaaattatacgtcctggatacatttctttatgtagatatgacatacctttcttgcttcaaatatcaataacatgtagtgtaagaagcctccaagagtgtggtctttttaaagctggaactcacatcctttattctatctagtaagccatctctcaggtctcattcttgagaagaaaaaaaaaagctgacaaaatttctacatttaaatttatttttcccttaatgtttcatatcaaaatggaagccatgtttttcatcatttcattcaagacataaaaccttgtgaaaaaccaaagtaatggaggaaatgaggaattgtcgtttagtggatatagagttttagttttgcaagatgaaaaagttctggagaatggttgcacaacagtgtgaaagtatttagcactcctaaactgtgcacttcaaatggttaagatggtgaattttatgttatgtgtattttgctacaattttaaaactttcctaattaaaaaagaagtaatggtgattttctggcaaaaaaaaaaaaaaagatacattcaaaacatgcactgaatattattttgaaaatttttcttagtgaaaagaggcaccttcctctttcccaggtaaacatttcaaggttttgaaatggaaaagaactacccttgaggctttggtttagccttttgttctctgcttgggaaccgggcttatttgtttgtttatttaactggttgctttattagcataataaagcatgacactgttcttccttgatttgaactgcttagaagtctttaaaagaatcatttgcataatttattatttttaaatgtgttcacattcagcatttcctttaacaaagatacacacctataccttttacaaagactgaatatttaggcaacttaacagctacaaacttaactttttaatgaattgaagcacttttcattcaatagagatacaaatttggagaccatcttttagaaattggatccagaaaaatactctgaaccagggactgacttaaataatttcccaacatcaattaaatgagatttttcctttaaaaaaaaagttgttttgctttgtgaggttaaacttttttttattttatttatttatttatttatttattttgagacggagtctcgctctgtcacccaggctgtagtgcagtggcacaatctcggctcgctacaagctctgcctcccgagttcacactgttctcctgccttagcctcccgagtagccgggactacaggcacctgccaccacgcctggctgatgttttgtatttttagtagagatggggcttcaccatgttagccaggatggtcttgatctcttgacctcatgatccacccacctcggccccccaaagtgctgggattacaggcatgagccaccatgcctggccgaggttaaacttttaagcaaaaccctacaggagagttatctggaactctttacaaaatgagtgtatttctttgtgagaagaacagtgtgtggagtgcaagggtgtgcatttattggtttacttccccaagcccagtatttttgtttgtttgtttggttttggtttggggggggggggggttaattataaagcattctattattgtatttaaatcttttcctttattattatttttaaattgacatctaataattttatgtttatagggtacagtgatattttgataaatgtgtataatgtataatactcaaatcagtaattagcatatctgtcacctcagacatcatttctttgtgttgggaacatttaatattcactcttctagctattgaaaaatacataacaaattgttgttaattatagtcaccttatagtgctatggaacattagaacttgttcctcccatctacctgtgcttttactcgctcagcggattcttctcacccactgcacagaaaagccaatacactgagacagcagcattgcagtagagaaagggtttaattatctcaaggcagctgatcagaggacgagagatatttctcaaatcttcctccccaagaactcagaggctagggtcttccaggataatttagcaggctgagggctaaggaacgggtactgctgattggttggggttgcgatcatagaggtgtcaaaagctatcttcatacactaaatcagtttctaggtgggggtcacaagaccggttgagtcagttccttggtatgagtaacaggtccgagtggagtcagttggttgccagaatgcaaaagtctgaaaaatatcttaaagaccaatcttaggttttacaacagtgatgttatctataggagtaattggggaagttacaaattttgtaacctccagctacatgactcttgatgagtaagcaattttagaaaagtaagctagggaacgggctgcgcacagtggctcacgcctgtaatcccaacactttgggaggctgaggcaggtggatcatgaggtcaggagatcgagaccatcctggccaacatggtgaaaccccatctctactaaaaatacaaaaaaaaaaaaaaattagctgggtatggtggtgcgtgcctgtagtcccagctacttgggaagctgaggcaggagaattgcttgaaccagggaggcagaggttgtagtaagccgagatcatgccattgcactccagcctggcaaaataagctagggaacaatggctggttatcatttaactacacctacatcttagcagaattcagtcttttcccataatcctaaccttgtggcctttcatttgtcttacagagatggtttcagtcccccgtgggggtcagcttgcagagggactattatcatttttgcttcaaagttaaactataagctaaattcctcccatagttagcttggcctatgcccaggaatgagcaggggagtgagcttgtgacgttagaagcaagatggagtcaggttagatttttctcacttttataattcttgcaaaagcaattttatattcattaacccacccctggctttccccttccccctacccttcctggcctctagtaatcactattctactctctgtttgtatgagatcaaccttttaagcttccatacatgaatgagaaagtatggtatttatctctctgtgcctgactttttcacttaacatattgtcctcccagctcatctgtgttgctaaaatgacagaatttcattctttttttttttaatcactaaatagcattgcattgtatagatatttgccacatttatccattcgtctgttgatggatacttaggttagttccatatcttggcagttgtaaatagtgctgcactaaacatgggagtacagtgatctctttgattactgatttcctttcctttggatatatacctagtggtatcatagctggattgtatgatagttctattttagtttgctgaaaaccctccatgctgttttctgtaatggctgttctaatttacattgccacaaacactgtgtaagagttcccttttctccacatcctctccagcatttgttattttttgttttttggggtttttaaataatagcgattttgattggtgtgtgatggtatctcatggtttgcatttgcatgcaaatgattagtgatgctcagcattttttcatgtacctatttcaaactcagcgtaattttggttgggaggccgttaggctaaggcagctccaatgccctgagttcctacataaacaaactgaaacccaactctttgtaaacagtcatattctaggccaatcagaaaccaccaactaaccccctacctaggggctttccaatactcaagtttaaccgatcaggaactgcctggccaacctctaaccagggactttccactggaatgatccaaaaaacattactgccccactttaaccaataagagattttctttaccttgcttctgctttcaccttacaaaagtcttctaccagtctcttcatcagaaccccccaccacttatggcctaaggctgcctgattaacgaattgttgtctgctcaaataaactctttaaaattttaacgtgcctttgtttatcttttaacagctgtttaatctcactgtgatcacaaaccatacattgtattgtcttaattattttacatttttgagactgttgttttatggcccaaaacatgatccatcttagtgaacataacttgtgctcttaaaggaatggtattctttaattgtcacatacagtgttctgtaagtatcaactgggtcaggtggttgatagagtctgtcagatcctccctgtcttcactgaatttttgtagagggagaggtctgttaattgcagagaaagaagcattcaaatctccaacaaaaatcggagatttttctgcttgtcctttgaattatttcaggttttacattgtattttgaagctctggctgtgtttgcagactcatttatgattgttatatactcctgataaactggccttcttaccactgtgaaacatcccttttgattttcagaaatatcatttgtcttgaaatctactttatctgtcttaaatcagcaaggggcactacaaagtaacagtaaaggtagatgtaaatattgttaaacaagtaataggtattcaatgaatacttgttgaatattgaattttagtattttctgggtggcagattgccagataatatggtttcgtgtgtgtatgtacgtgtgtgtgtgtgtgtatgtttcttttttaataatctattttctaagtctcagtgtggatgagatgctgtggataaaatagtactcacttcaggaagttagttacctccaaggttgactgagcgttggtcctagccttctaataactaatattgaaggaagaagcagctcataatgacataatgaatgagtaggcaatctaccttaaatctttagagaaaaaactaatgattgaacatacaatgtcaggtgttttcaatagaggggtaatagaagaattagagcaggtcaggaaggacagcttcataaatacgacaccttatgacctttggctacagttttactgctttcctgatatttgcttgaaccaaagctcattctctgtataccaacacaagtacaattctattctgttctttagctgtttaaaacaaagtggtttcttcatatcacgatttaaaaagagtagtctcttatgtctctaaaagaaccattgggaaaaaagcaaaaaagagtagtttttcttaattctaaagatcctcaaggcagtggtgtcttaaccaggaagacaggagagacccaggcagccttaggaagctcactgtcatcctcccttttcctcttgtttcttcatccctagaagtaaacaaactaaaaatggttttgacctttgaaaaagaaataaacactgaagtaattgcctgtgattctctctacccagccgtctgctgaaagtgtgtcttgagaagagcttgagatgatagatagatagatagatagatagatagatagatagatagatagatagatagatagatagatcgatagatagatagatagatagatagatagatagatagatagatagataatctgtctctactccacaggtcgataatagctcactaacgcatagccagggagatgtcagagtggcttgagacctcaagaagctttttcttaaatccttaaaacctaagaacctttttttttcttttcttattgttcagttgcctgttaattttttgtggggagtaggggttggaatagcatgctactgcttagagtagaacagggttagaattctttgctgccaggagtattatttcctttaaatttgtgtttctgttgtgtaaacaaaactatctgcttcctggaacataaagcacatacataattttagtaggcacttatgctggattgtgcttggtagttggcagtgagagcactttttagtgtgatggcatagccacatctcttgtggggacaggaatattttcctgttagagtggatggtgacctcttctgcattctgctttcttccccttccccacagacttgtagaagctcttgacaaacagagcagagaaacaaacttaagtaccagcattctcaccagcccaaattcctgaatctctgactgtcctaagacatgccagttgtctgtacctgtgcagcctttcctcatagcaaggactggaacagaggaggaactggttacagtaatcatcattcccctgtgaacaaaggtctcacgcagtcatttctcctcagtgtgttttcggcttcacagaatgactgtgagacaatgttgatctgtttacgtcacttagagctttcagcacatccttttaatggccaaacttactttttttctgacagacttagtattaggatcaactatcatttttctggccctaatgcacagagctattaaattcctcaaggttcagatatgtctgtttttctgcgtaacatgaattatccaagaaaaatgtagacacctacttaaagtaatagaaaaagcattgaatcagggtcagagacttcaaagtaatccattaacctcttggtacctcagtttattcatctctgaaatggaagtgatgataactatcctacttttcttgaggcaccgatgtaatgaatgtgaaagtagtttgtaaatccataatttgccatacaattaatagctgttgtttactaacctgtaggtagccaccatgtacttctatatagcttttgcatagtatctgaagtctaacacagggagtttttagattttttttttttttttttgagatggagcttcgctcttattgcccaggctggagtgcaatggtgcgatctctgctcactgcaacctccacctcctgggttcaagtgattctcctgcctcagcctcccaggtagctgggattacaagtgcgtgcaccaccacacccgtctagttttgtattcttagtagagacaggttttcaccgtgttggccaggctggtctcgaactcctgacctcaggtgatccacccgcctcaacctcccaaaatgctggcattacaggtatgagccactttgcccggcctttagaacattctttacaagtaagttagaggaatgtcaataggagcagggtgtagtcgtttactaatattggaagataccagatttctggatttttagggttagtctcttttgttaaacattaatattctctagaactcaattacttttgaataacttgcagaaattcccagaattctaggatctttgctctagactatacagcttttgccaaatttagactacaactatattgtacgttttgtggactacagtagttcgtctagtgtggtatagtaatgcatactattgcagatttgaaagctctgtcaacattatcatatcactggaatgctgcttttatttcttaattctaccccaggttgtcttaccattctgtctttgtacctctaaattcaatgtgtcgttctttttttcttcataatttagagtggtttgtgactgggccacattccatcttccacctttttcgtaaaaaccattttttctccatagaagtatcaaaacctttggaattccttcaaaacagctgtgtctgccctccttctagtggcccactagaacatatatgtctggagagctgcagtgcctgggacactacaggcagatatatatactttattcttaactagaatttctctgataactggacaccagcctagaagtgtctcagacctgctttcatctgctctttgtgttcttaaatcccagacagacccttccagaaccagatgaccatcaagacaaaagcatactcaagcagacaagaaaggagtaggtctcaccatatctcctagatttataatgtgtgctctctacctggcagacactacacatactgtgtaaagcactgctgggggccttctttgtgtgaaacctgggtgcctcgatgcctatcagaacttttacatgaggaagttggattggaggagagatttatagtcaacagtaaccacttaacttggaaaacagaaaagaaaaagaatcgtccataatcccatcaccccgatgcaatctcagtgaatatcacagatcagcattactgtttctcttatgtgctgttgtcataattgtgatacatgacagtagtgcaactataaatttcgtattttcttttttttaatatattgcatcccacctgtaaaactggcaagatatattttcttttgcttcccctacagggcgtttgtattattttgagggccttttaacttggtgataaagagtgtctttgccctaagacctaatttgaatccagcgtggtggtcgtgtaactgcccacaagtcacgtcacttcttctctaagcatcaggtccctcatttgttaaatggcaatcataaaacctatgccaaaggttaaggtgggaattaaatgtaataatgtagtcagtgcactcagccctttgcctgacatataggacgtgctcaataaatggcagtgagggtgacattgaggcagagacctcttaggctacatgagtgcattgtaagtaatttggggtagaaccttttacttaatgtattttaagacatcatttatagtgtttcacaggtagatcctgcttttctgtggtttctgttgagtgatttaaggtggcatttgtcctgggactcacttgatttatttattagactgaaaattatatagcatttgaagcatctctggaacatatgcactcagatccgtgggttcatatcttaatgattatgggcattttactaatgaggaagagctatcttcccctatttgtggtattatttgtgatttagacattcttcctggacaacaaagtatctttgtactttgtacaaaataaaactcttcacgtattacttgtttcccacacagtcatctgaaaatgtgggcacccgacagggctcaacaaatatttatttaaataaaacgtggatgagttttaccctaaagaaaagttgcatgtatgttatttacagttttctgcagtgtagtagctatttttaatcttttggtttctccctgcaccctaataggttatcctataattgggttccgttcatgtgtattagtgtcccaggctgatcttagctccagtaaatacctagtgtgccttctagaatgttatatcatgaagttcgttactcacccccctcagttagcctacgacttgacctttttttaataccagttttggaagacaggcctaacacttgtgtattccatcacatcttgatttcatagagttacgttgtggaggatatggttcaactcacattttatctgaaatattaaacagcagaccctttacgataggaccccgcagtactgctttcattcacttgtcctcagctccgcgctgatttgttcttcaggattactatctgttttgggttaactgttttgcagttcttagacacagaactgcattatcaaccaaaataaaagagctattctccctgatgtgccttccttcttcttcctgatcctaggatgatgaggctaaagtttccagctggatctggctcggcatttctgggataaattaaatgagcacacttgattgaggggtagctgcactgtatccctggcttcctattatgctaggagatcaaagcagagcacaaatagaggcttgctctatacaatattcaaaacagatggcttttttttggtgaaaattcaggttttaaggcaaaacacttgttagcaaaacttcatttcttttcattgatagatagtcactactgaacacatagcactgtttcttcctgtatttcaagactaggatcacaaactttttgcaggaggagggatttggcaagcctagaaaggtattagattgtctgtgtcttcatgtgaatatgaaataagttattaagattttgctgttggtattctagaatcaaatgaaaacatcttacatttggtcacataatcattttgttgttgggtcactatttaaaaatctagtactcatattgttttgtcttctaagaattgaaccaggatgtttatctctgatttcatgttttaactgaaaagtacattctccacactcctttatcatttacatctgaatcctcaagttcatgtagaataattctatgtgatgtgaaacttttattattttggtttaaaactgaaatgagaaataagattaattcaaaaatatttttgggacgtctgccatgtgcctaacactgcattaggtacgtggtaaaaaatacatgtttcaagacattgaaacaactgctaaatgatggattttctccaacagagaaaaattatacaagatgcaatagaaaaacccaggtctccagagagatttaggggttcacaaagaaggtgacacttgagctaactcttgaaggagcagtaggcatttgccaggcagatacaattttagataaggacatttgcaaagatatagaagcataagcagcataacaaatttagtatattcttggcagctcattatacatagtagttcgggtgtatgtcaattatctgttgcagcattacacattaccccaaagtgtggcagcataaaacaacaataaatgattttcatctcagtggtttctatgtgccaggaattcagcagcgtcttagctgggcagttcttacttggggtctctcatgggaccgcaattatctaaaaccttccctggggatagaacagccaattccaggattgctcacccacagtttgtgccacctattggaaggaaccttccgttccttgccatatggaacctctccattgggctcctggatgtggtgacatggagtccagcttcacccaaaatgagtgatccaagagatgagagccagaaggaagccacaatgccttttatgacctagaatcataagttacacaacatcccttcggccacattctgttccttagaagtgagtcactaagaccatcccacactgagtggggtattagggcttaggcaccactttttgaaaggaggaatgctaaataattttcaggctttttttttttttggcagcagagtctcgctctgttgcccaggctggagtgcagtggcttgatctcggctctctgcaacctctgcctcccgggttcaagcgattctcctgcctcagcctcccgagtatctgggattacaggcatgcaccaccacacttggctaatttttttgtatttttagtagagacagggtttcaccatgttggccaggctagtctcaaactcctgacctcaagagattcacctgccttggcctcccaaagtgctggaattacaggcatgagccactgcacccagcctcaggtttattttttcaattactatgggatgtcagagagggaaaaacaagccattaggtggttgcagtcagcagcaggtggatcgtgaagacctcagcatgccattgcaatctgtagaggttggacaggtggagagggaggtatacggggcagagtactggaaacaggacagccagttcagagcttgctactttgtcctggagagtgatgctgaggggctgaaggggtgcagtgatagaagagtttataagtgagaatatgtttattatcaagaagctctggttcttataggaaatgtcccaaatggtttctagtctctcttggttgagaaaatagagaacaccgtctgaatgcccagttataattcagaaagttaacttgcccgtaggaactactcagggaaaagcaatgaaataaagcctgaaagttctataaccgctccggggagaaccacgagctgtgatgcgctgatgccgactgagaacttagctgctggtcatctttacagatcaagtcacccctcaggattttgaatttttcattcagaaagttaggcaggggacaggggcagatatctctaaaattccttccatcttttgtattctgtactcaaaatgagtacaggatgctgttttgaaccaattagtgttttagacttgtctaaccttgaaaacattggacccaatagaaacatttaacctattcacagatatttaattcaggttgtatcagtatcaaggaatttttaactgagcgttttctggagctgaaactaagttaacttagtatcttgatcaatttatacatgtagttgaaaatgttcagatttttaaattatcttatggaatcattttaattagtatcactttttcatatttaaattgcataacgattttatttatcagtttttacatagattttactaattatcacttcctgtaactgtcagttttcattttatgcctattgccaaatccaattttccatttagccaatgttttattttgtgttaatattattcttgatacaagtacttttcattgtgaatggattttttaagatagtaattattattcctttttacaataatctgttggaaaattataagaatttcctctttaatattatatttaccctgttatctgagattggtctgttatggaaattggcaaacattttttaatggtccagatagtaaatagtgtatagttacacttttggtttttgtttgtttttgagacagggagtgcagtggtgcaatcgcagttccctgcagcctcaacctccttcccaggctcaagcagtcctcttacctcagcctcctgagtaactgggactattggcatgcaccaccttaccctgctgactttttaaactttttgtagagttgagtctctgtgttttgcccaggttggtctcgaactcctgagctcaagcagtcctcccacctcgacctcccaaagtgctgggatagcatatacttaggctttgcaaactgtgtacttcctgccaaaacaatccacctctgctgttgtagtgtgaaagcagccataggcaatatgtgaatgaatgactgtggctatgaactaacaaactttagacactgaaatctcatgttcatataaaaccatttttagctgatgggctgtacgaagaaggcggagctgaatttggttcatggactgtagtgctgtgttgcttatctggttcttgttgtgcttcttgtcattttacatgccttcactagccatccacaggccttggtgaggccaagcatgtggtggcattaaaatgtcctcagggtgaggatgtcaggtagttaccaaggataacttgtctttacatgtaccgtgatcttcacaaggatgggcataattattcccagtttacagatgacaaaacaggttattggaaataatagtagttaataattattgaagaacttaactatgtggcaggcacatagattatcacaaacccattaatacactgttaccaaagcaacttgttccaggtctcctacctagaatgtaacagaccctggaatcaagccgtacagtgtgtctccagagcccatgctcttcaccactgtatcactctgtgtgtaattctgctctgtggcacagaactatcaatacagtgcaaagatgtcatagcacataagtgatacacatctgtctctagtgagcgtagcctctgggttaaaaaacaaaaaccaaaaaaaacttttttcaccacagtctctgaaactgaatacccagtcattaacgtgatgtcaccagccaaccgcctgcatcctcctggctgtgcggtgtttgaatggccatagccacgggagctacattgcctgccctggtactaaaggatggactactgtgtctgcatccagtgtagtactgtaaggtgctgtgatgccacagcagccgttgccaaagaaatgtttaggtagatgcaattcttagttaagattataagatgcagaggatcgcctaaattaatttaattccaggctaattaaaaaatttcctgagggaagtaactgacgtgagagcagataagggcaagcatgcaggcacacagcatgctttcctggaaggtataagttgtaattgctccaagagatggcagaggtaggagtcctagttcagaggagcctggctccagccaatcagacatttcatagctctatgcacgtgtatgttttaagtagcgtgttaacctgatgctttcttctggtgtacagaaatatatgatcattgagacagaatgcgctaatgaagtcggggagctgaaaaccttcacatacatagaatgtagagcactgaactcacaggttgtcggaggcacacacacctgccttagaatggctttgcagtattccttgaaatgctgcatctgggaaatgatgtgtggatggtttgctagctggaggctggtttgttaattagaagtgtatctgaccaatggcatgagatcttattgcttaaacgaacaagatggcggagactttactccctttgaatggtccagcaaaggctatttcctgtcagcagtagcatctcatgcaagaagattacagttgctgaagcccacaaggcaactgagtatggagaattcctcaaaattgtatgttgtgtatatttgggcagactggttaaagcatgaagagagctattgctactgttaaagtatgtgtctgtgctatcaaaagtatactccctgaggctgaggctgcaatgcagtgagctgtgatcacaccactgcactccagcctaggcgacagagtgagaccctgtctcaaaaaaaaaaaaaaaaaaaaaaggtgtactccctggtaggagaaccagggaaaagcagctacaaacaagagcagattaacatggtgcagaaaaggcatgttctgcttcctcttgtcccttttctttgcttgatttctagagttagattttatcatttcactctttaatctgtttcttattttctaaacacccgtaatatattagattctctgattatatcaaaaacgtggtctccatcctctggatttcctcactaaaactggacgtggcttcctttgtgcagtagcttttttgtgagtactaaaaggtggcactggtatgagagcctgggagattaaaaaatagatatatgaagattctatataagcttaactttttcctttctcttttttactatcagtcactttacagctaaactaggagcctacttactctttattgactcgtgtagttacctgtgcttcagtctagatgtgtacaccatgtaccccttggaacttccttctgtggccgcttgctggcgctctgctgttcccccatgagtatcagtccgttctgtcaaatgctagggtttgttctttgcgctcattccatttcccacttcccagtggggctgcccccctttgccactacccttcagaattgatctccagtccctgcttaatgatcctgtgttcggagcagagggaaacagagcacgtgggtccttcttccagagatgggtgttacatacacccaaagggtcgtctgactggagatccttaggctagtcatggtccaggttgtgtaatcttgaaacatcagccaccatttgtagtatctctggtgtttaccatgctgagcctctttcgtcatagtcaattgtatattttcaaataataaagctttgcttaagcgtccacaactatgaatattgaagtggtgatgaccgtcagagtttgtgttgtgctacacggcttaacgtttcgagagagagagaataattcaatcactgcatgggaggttttattctcaaataaaggaagttggtagagaaagccgtcttcctcatgtttgtttttcccaaatctttttttccacccaaagtctggattactcccaaggtgagagggttgatgtctggaaattgttaatccatgggatctattcatggtatataaaattttcagaaagaatttgccttttaaatatgatttcctgattgactatagcaaacataaatccaggaagtacaactctgtcagagcagccaggatccttcttagcttctcagatgtatgagattttttagtgcgtgtgtggagtggaagtaaagattcttcccgtgggcaggtcagaaggagagaggggagttaggagaagaaaggaagagaataataggacatagaaacaaaccaaagctgctagggtcggggaggcaggtatatacccctggctttcctggaattagctgctgtccccctgaaaaaccagctttattttagtttatagtactgagaggaagaagctagggaggcacccttttagtgccttctgtcctggtactgttttcattcttgaagtgctcttttatgatatacagaaacatttcctcatcctcttggtgatacaaagttcttgggccactattttcagagaaaactaagctgtactaagctggaaatattggctgagggccattttgctcagatctctcctcccatctggacttcgtgcccccgtgcattcttaaacaccaaatcacaaccatttctcacctgctgaagtgagaaacagttttctggctgtttccgatgttagcattaaagatcagatttctgtatgtgacttgcctttctccaatggaaaggtgcccatttctgatatttacacacagctacagatatatttatagtttctcttggatttcgggtaatagctaactcttcttccctgccacctgtaccctctcaggccatgttcttattaagcactctaatgagaagctacgtctaccacaggctctagacacatgatgagaccctcagtggctatagcctagctgtgagcactcagcagtagacttatatctgcatagtctgttgtgtttggtttgacgctagagttcaaataataaggtgactaactgcaaactgcctctgcctgctcccccagcccttccatgtacagacagacggacacacacacacacacacacacacacgtgcacgcacgccctcttatcctgaccttgaaatagctaccactcacagaagagtctcctccagagactggcctgtctttgggagcctttgtacagataaactatcaaatctcatagtgactagacagtcatacttggctcttttttgtagtcctatggactgagaaggagccggtaaatgtgttcctcttcagttcaggtcacatctttgacatgttcacatctttattatgttgttccttgtttgttgagatgctatcaaggtcaggaggtcccttttgttgaccctgggtaactccgcttgcctttcccctccactcccaatgccataggtgagaaaggagaagataaaatgtgattatgaggttattatactcttttgccccctaggcaacaagcgtattgttgtttttcagatccatccgtctagcagacatgtgataatgccaaaaggtggtgtcgtgcttgactgcagcagttacagcacgtgaggcaccaggcctcagagggtcagaagagagtgtgagttatcaatttcaatgtttatgtgttcacacgggcatgcagggagttaaaagccaccatttttccctgtgaccaactgcccgcctagcttttcctttgaaatccagcgtcagtccttgtagggctggcctgctcaaaaagtatgactgtctcttctccctcttttgcctcatgtttcttccacatgcctagatttttgcccctaatgtctcattcataaatctgtagccctggaactgtactgtacagtagggaagccattcagatatatatatatatatgtacttatacttaactcttccatttttcactaaaacacaatgagtgatttgtgtggggagccaagcctcaagccaagaactgaattcaaagtgttttctcgtctttgttaactcttaacagcaagaaagaattttggaacacatttctgctcctggaatttctgagtgcagcagtaagtggctttctgagtggctttcttgacttcttgattctggttatctcatcgactttcagcagccatcctttcagggcgcatactgtatgtacccttgattggctggcctgtaataatagcttctgtgcctcctagtagcattctcttcacttttcaccccatttctatgtgctgtcctcatctgtatatacatgttcacccacctggtggtgaatgacctggttttaatgtatcttacaaatttccgagtactaaagcaagtatagagatgcctacagtcttgacatccttttgtagcacatggagagacacatagatatgctcagccagagatgtccttcccttactagtaggcaagcccctaacagtctgttccctatgcactcccttagatttcgtttgagtagcattttttataatgcataaggtaaaagagatgttaactgaatgaagattgaataggcagaatgcagttagcagctctgtagttgagatttcaagatttattttattctgaacgctgttccatatctccttacagctttgaggacataatgttttctcttcatacctgaatccagaaataaaggatgttttgttttgttttgtttgctagagtggtaatgcatccttaaagaaaaattggcaacagatttgtgagctgtaaaactaagaagaaatgatcatttgttattttcaaaaatgattctcatgtttctttgcatttcaaaacctatagtcttttgtggttttcataggcacatttacactttgacagaccataaaaccctttcaatctgaaacctttggagagagtttctacttttagaaccagatatttctattagtagtgagatttctgattaacgtttattcatctcagtgactagtggtccctggacctgaactcctagtggtaactgaattatatgattttgtgaactccattctttcacaaaatagctgtgtttaaataagaacataacacattgctccaaacctttgtgacaaggcttgacacactatccttcattttcctgaccctgaagtacattattgactaagaagatatcttagttattgagggtaaagactttgaggcagaattaatgaattttattttctcgcatcttttacttttcagagtttagctctccgctggggcctctggataagaatgccattctaagatgataatatttatggaaagttaatctgttattctgggattttcttaatgtagtctatgttgagagacagcagtacaatgacagtccaataagaaatcaaaactaccactaacatttatgcagttaatatatggacagttgaacctgcctctgaagacttcagcaggtaaaaagaacaaaaagattttgtagccacttcagggctctgagctagccacagaagaatcgtagtagatataaaaataatttgccaggaagacaataagtcatcaataaatgttagctttaaaaaaatggcatctttcgggctgggtgcagtggctcaggcctgttatcctagcactttgggaagctgagacaggaggatcacatgagcccaggagttaaagaccagcctaggcaatattgtgagaccctttctctacaataaatttaaaaaattagccgggtatggtggtgcatgcctatagtcccagctactttgggggctaaggtaggagaatcgctgagcccaggtggctgaggcttcagtgagctgtgattgcatcactgcactccagtctgggtgacaaagcgagaccttgtctcaatttaaaaaaatatatatatatatatataaaaaatgacatctttcaacggacaaaagattagtaccccatgagaaaataccttaagccccaaataatattcagtacctgttcatctaggctttatgaggaggctgtgttatgcctctcggaatggttcttagagtaactatctggcacagaggcagtagagtgggaagagaagagcctactggacagacgcttcactctgcacatttcttccaggtattgaagtcacatggcccaagaaagtgtgtttggatctcatagatgagtgagttgcagaagtggaatgctgtagaatcttctgttactatttgtattgaatgatacaggaacaacttacctgtcttcctaaagaccatcagttatccaacctcactgaagtggaaactaggttaaaacaaacacctttggaagattactggtcttgtcactatgccatgaaatgctggcctctgaagcctgtttgagaatctaatacataaacaaataaattcttacaagaagaaacaaagctcttagtacttaaccaaaaatgtctcatccctttttataatttaaatttcctcaacaattttgtaaatgtagcattggggccataatgacgttttggcatcatatttggtacaagcaaatatcatgacgagttcattttttaacttcttttttcctagtgcagaaaagtatatttaagtacagttcattatagctgtacaaccaatttggcctgaccacatatctgatgatttttagtaggaccccttgccaatgtattgaggtcgcatgtggaaaaaagttataacttacgggtcctgtaaggcattctctttctacttggcaaatgtccctcttccctcttgagattaggcagtggcagttctaccttgtgggaaacacagtttcttttctaagtggactgctcaaattagatagggagaaaagggaagagataagggcatttcccacatgattgacatggttcatgtgttccgagaggcttaagtagtttttttacagatagatttggggactatactagttgggcagtttcatatgctttcacaatgatacatattttgggagtatttgtggtattttgatacctctatacaatgtaaatgatcaaatcagagtaatccatcacttcaaacatttatcttttctttgtaaaatgagtttttatcccggataaacaatttagaatttcattcttttttaagttttctttctttctctttttttttttttttttttccttgagacagagtcttgctctgtcgcccaggctggagtgcagtggtgccatctcggctcactgcaagctccgcctcctgggttcacgccattctcctgcctcagcctcccgagtagctgggactacagacgcccgccaccacgcccggctaattttttttgtatttttagtagagacggggtttcaccgtgttagccaggatggtctcgatctcctgacctcgtgatctgccctccttggcctcccaaagtgctgcgattacaggtgtgagccaccgcgcccggccttttttttttttttttaatagagacagagtcttgctatgttgctcaggctggtctcaaactcctggccttaagcaatccccctgcctcagccttttgtgtgtgtgtgtgtgtgtgtgtgtgtgtgtgtgtgtgtgtgtgtgtgtgtgtgtgtgtgtgtgtatggagtctcactctgtcgcccaggctggagtgcagtggtgtgatctcagctcactgcaacctccacctcccaggttcaagcaattcttaatgcctcagcctactgagtagctgagactacaggtgcgcaccacacccagctacttttcatatttttagtagagacaaggtttcactgtgttggccagactgctctcgaactcctgtccccaagtgatccacccaccttgccctcccaaagtgctggaattacaggcatgagccaccacacctgacctcagccttattttttaagttttcgattggactctgaaatttttcagaataccagatgccatcatgtttatttaatcaattagccatcagcataaaatgcatttaaatctgtttgaaaattttttttttttttgagacagatcttgctgcaatgcccagcctggagtgcaatggtgcgatctcggctcactgcaacctccccttttcaggttcaagcaattctcctgccccagcctcccaagtagctgggattacaggcatgcgccaccatgcctggctgatttttgtatttttttagtagagatggggtttcaccgtattggccaggctggtctcgaactcctgaccttaagtgatctacccgcctcagcctcccaaagtgctgggattacaggcatgagccaccgtgcccggctgaaattgattgtttattaagaataaggatctaaaaagtcagcatccgcagtcatagtggttgtaggagtgagctaataatatctttttaaattctgttttactataaggaatttgaccttctcaatatgaccatttatcacattgccccctttcttcgtggtcatacttttttctgccagttttgtcagtcaaaagtaattacctaagataagcagctctttcagcctttgcagcccagatgtggcatttgtgatggcagctctatacccacaaacatgcgcgtgtgcaccaaaagaatgggaataaattgcacaaatccagtgaaaatcccaaaggtgatttttttaaatcaatgtattcatgaaagaagatagagaaaaccaagcttttaaaaaatgaggaatgaaatagggatatgttacttggcatcatgggggtgtagtaacagaaccgtgatgagacggtttcgtcattggcgcacagagtgtgcttgcatttaaagtaattttacctttgaagactgcacctggaatcctttgtaaattttccacaatgagtatactttttgttgttgttgttgttttgagacagagtctcactctgtcgccctggctggagtgcagtggtgtgatctctgctcactgcagcctccgcttcccgggttcaagcgattctccggcctcagcctcccacatagctgggattacaggcgcacgccaccatgcccgactaatttttgtatttttagtagagacagggtttcaccatgttggccaggctgctctcaaaatcctgacctcacgtcatctgcccaccttggcctcccaaagtgctgagtttacaggcatgatccaccatgcccgaccacaagtatacatgtatgcccagaaataaaatacaatatttttgaaaagttggtattgtttgcaaaaaactatccagctcccccactctaaattctctacttgattgaaacactgtcttccttctgtgactggctgtgttgacatgcctgtcataggtaggaaattccagcccagaactggtaccgtaaacctgctgattaggagtctcttacagagcccagcagccttccacagcagaactttggtgtttatcgtttatccttagagagagagagagaattttaaaaacaaaagtaatgctaaattgattaattttctctggtttgtctagccaggctccagcttctgtgtaatatactgtataggcctaaactgaactctgatctttttagcaagctgaagattgttttagccactaagcccttgctctttattctcttttaattatttcctggaaatagtattagaaacaaaggaaatgtgctatatgtattatgcagccatgaaaaacatagtttcggtcatatataatgtagtgaacagtactgacaatataatgttaaatagataatgtatcaagcaaaatgtgaggtgtgatactgttagaagctgatttatataaatttattaaaagacttggcaggaaaatttccaaaatgttacaaatgattacttcttttttatttttttttatttttttgagacagtctcgctctatcgctcaggctggagtgcagtggtgtgatctcggctcactgcaagctccacctcccgggttcacaccattctcctgcctctgcctcccgagtagctgggactacaggcacccgcccagttaattttttgtatttttagtggaaacggggtttcaccatgttagccaggatggtctcgatctcctgatctcatgatctgccctcctcagcctcccaaagtgctggtattacaggcgtgagccaccacacccggccaaataattacttcttgatggaagtgtatgcaaaagtcttatttcctttatatttttcttttttcccccaattttttggagtaaaatatatattgttttcataataaaaacataaaactttatttcttaaaaaaactcttgttgaaaaagaaataaaggaacgtggcaggagcagtcctctgagggggtccaaggaggaatcagtgttactgtggaaagtaataccaggccttgcttctgttgacttgaagattattgagctcccaattcattagttaggccagaggtgtcctgttcatgaaaattgccaggccggtgacatgcaacaggtgcagacctgctgtgtgagccctgggaacacactgagatctgccagcgttttggcggtgcttcgcagtgctcacagctgctgtgtgtcaagcaggggctgctctaatgcttcagtgttctgtgatggtgaggtctggccccactctcttcctcagcactccaggctttgaccagctaccaaatacctggccagactattgtcacgagagctgccaaatgaaatcctggggcaggagtcatcagtcatttagtgtgcttccagaaggaatcaaaggagtagctgttcaagcaggggaaaggaatgagaaaagaaaaaacgtagagcaagtctgttacttaagaaaaacacagaaccaatgttacaactaagaatttcagagtccttggctgtgagtcaggtgtttggtgttatatagggatttatcagtcactggttcagaagaatatcggataacctctgtgaaataaatgagaagagcataagccaggatgagacagaattcgtaatgagttccctcatcacatctcttggccaagaaaaacatgcactttctccagaggcagaatttttcttccattctaggaggtggaggaacacttggagtatatgtagtccaggctttcagatgagcagtttcactagcagttttttgtaatctactcataaataagtgaaaagagaaactgtgaggtaactggagtctttctgtatcaggaatagcatctctgtaaaaacaagttagtcctgtgcttaattcctgcctcgatacagagctgtccgtctggtgtgaatatatgaagccagcgttctcttcctgtctcccagaagggcggctgcgtgtgacagcgtaaatgtgtgacagtatgtgaaaatgtttctgtaatcctgaagatttcagtagtgattagaagagctttagtctttggtcaattttctttgacttggaaagcataaagaatatttgaacctctcatttcagactgaccttgactttcctcattttattttattttattttatttttttgccttagatcatccagcccctcttagaacttgaccaaaatagaagtaaattaaagttgtacattggacacctgacaaccctctgccatgaccgagaccccctgatcctccgtggactcactccaccagcttcctataacttggacgatgaccaggcggcttgggagaatgagctgcagaagatgacccgggggcaggtgagcctctcactcaaactttgaaaagagcctgtgaaaatccagttgctgtgtaggttgatgcagtgggggctaccttggggaatccagttgccgtgtagttgatgcagtgggggctaccttggggaatcccgttgctgtgtaggttcatgcagtgggagctaccttggggaattccatgtttagattcaagatttggggggtggggaggggtttccagatataatttttaaactgatttttaattgattttttactgttttatttttttaattcaccaattaaaaatgtatgtttctcatgtacaacatgtaattttgaaatatgtatacattgtggaatggctaaatagagctaacatatacattccctcacatactttccatttttgtgtgtgtgtggtgaaaacactttaaaatctactctcagcaatacattattattaagtatagtcagcatgttgtacagtagatttttttttttttttttttttttttgagatgaagtcttgctctgttgcccaggctggagtgcaatggtatgatctcagctcactgcaacttccacctcccaggttcaagccattctcctgcctcagccttccgggtagctgggactacaggcgcgtgccaacatgcccggctagttttttgtgttttcagtagagatggggtttcaccaagctggcgaggctggtctcgaactcctgacctcaagtgatcctcccaccttggcctcccaaggtgctgggattacaggcgtgattcaccgcgcccggccagttgtacgctagatctcctgaaggtaatcctcctgtctagttgatattttgtaactttcagcaacatctttccagcccctggtaaccaccattttcctcttcgattcaagtttcttggcaatgaatagtcttgaacagatatttggaattaccttttgaaggaagtacgattcttggctcagtgtaacttactcaagtatccgaaagggctgatttataagggagaaggctaaggacgatctgttaacattgccatcggttattccatgaagcggtagccactgaaggaaagtctgagtagtttaggttaatcccatgtcttagaccattcaggtagctaaaacaaagtaacacagacagggtggcttataagcagcagacatttattgctttctgttctggaggctggaagtcccagatcagggccccagcatggttggtttctggttccttgtgtcctgtcgcatgctgctgacctcatgacctaatcacctcccaaaggcccacctcctaataccatcacgttgggggttgggatttcaccatatgaattgaggggaggagggtaaacattccatctatagtactccctagacgacattttctgtttactgtcacttgtaaaaatccagtgattctcttttttacatgttgtgatttttaatgcagtaaaagacagggtaaggctagcctggagacaaaaaatcaggaataaaagaaacagaagacaggatgagaacaggcatacagtacagacatggaaagtgaaggaaagaaaaagtgaataaacattgagacatagaaacagaaaaagagaaaaataggtcagtttttgaaatattaacttaaagctccttttgctcctagtttactgatagaagtcagtgatattccttaccccctatagattcaatcataccaacagaaggctaaagaaaggcacaggtggtgtaaacttactaaaactcttcatcagaactttgaagctacttactatttctagctaaatactttctatttcttaaatattgtttgtttactcgtgtgtgaaggtaaattgtatttaatacagaacttcctgtggtgtgatattaaagatgacagtgaaaacccgcaagtcaagaaatgcaaactggtgagccttagagctgtacttactttcccgtgatgtggatgttgcctaataatacacggacatatttcacagcctaactagttacccatcatttatttgatgtgtgaagacaaggccaacttctcaaatttagcgtgttgacataggaattttaatctctttctttcttgaaagaggaaaaaaatgtaacgaacagtattaaattcagcgaggtgctgtggctcacacctgtagtcccagctactcaggaggctgaggcaggaggattgcttgagcccaggagttcaaggttacagtaagctatgattgtgccactgtgctccagcctgggtggtgacaaagtgagaccctgtctctaaaacgaaaaaaaaaaaaaggacagtattaaattcaattcctaatagctctttttgatattgataaccatatactaaaaatgtaatggaaataaatacatacacaactacagtgcaaccaaaagcccattggaaacaaggcacatggctattcattttagagacttttgcttcagaattttgcagaaaaacgatgcttcttaaaagcagtgctactgggcacagtggctcccacctgtaatcccggcattttgggaggctgaggtgggagaatcccttgagcccaggagttcaaaaccagcctgggcaacatagagagacctcgtctttaaaaataattaaaattatccagacatggtgtcacacgcctgtagtcccagctgctcaggtagttaaggtgggaggatggcttgatcccgggcagtcgtggctacaatgagctgagatcgtgccactgtactccagcctgggtggcagagtgagaccccgtctcaaaaacaaacaaacagcaacaacaacaacaaaaaaaaaaaaacccagtgcttattaatgtattaaagtttaactggcattaaattattcctttgtaaaacagtttgtctttgttttgtttttgtttttgtttttgtttttgtttttgttttggagacagagtctcgctctgtcacccaggctggagtgcagtggcacgatctcagctcactgcaagctccacctctcaggttcaagcaattctcgtgcctcagcctcccgaacagttggaactacaggcgcgcgccaccgtgcccagctgattttttgtattttagtagagatggggtttcaccatgttgcccagtctggtctcgaactcctgagctcaggcagacggcctgccttggcctcccaaagtgctaggattacaggaatgagtgaccatgcctgcccagcttgtctttgaaatggaaaagatatttttgctcagtcctgtattttcaatatgcctagatggacttaactcagtcttaccaaggggaaaaaaaaatcttcagagtgataccaagatagaaaatttcaaactgatttttcagcaagttttgagtgaatgaaacctgattaatagacttcccattgcagattgtgttacagtcaagctactgcactcatccaaacaattgtgctcacacacatgacttccgttaatattgtcatgtttccctttaattgagaatgtacttcagttactgaagttactgtttgaggtgtgtgaaattgtattctccccaacagtccctgcgaaacgagagacctgggtcatctacagaggaatacagtaactaacaacccctactataagcttcttcatagcttctaaaggttggtggagaaaccaacccatttcgtgcttccttaccccaagtaagaatttaaggaagtaatgtaggctgtctaacaatacaaaatgacttgcctatgaaagtattgtgatcagagtttgacttcagctttaacggccaagaaacagaagatgtgagtcactgccaaatatgcatattggtttattttgtgtgcgtgttttgtttatagttttgtagttttgtttttgtgatgcagagccttctgctcctgacatttgcatttttcacctcatatctccaatgcatttcactgccaccatgctgccaccaacaccaccgccatgaggacaggacaagaactttgtctttttcaatgctagggcagtgcagaagggaaatgcagggtcagagcccctacacagtccccactggggcactgcctagtggagctctgagaagaaggccaccatcctccagaccccagaacagtagatccaccgctggtttgcaccttgcgccgggaaaagctgtaggcactcagttgtcagcccatgaaagcagctggaaggggcctgtgccctgcagagccacaggggcagagctgcccacggccctgagagcccacctcttgcatcagcgtgacctggatgtgagacgtggagttaaaggagatcattctggaactttaaggtttaatgactgccctattggatttcagacttgcctggggcctgtagtctcttcgttttggccaatttctcccatttggagtaggtgtatttacccaatgcctgtaccctcattgtatctaggaagtaactaacttgcttttgattttacaggcttataggcagaagggacttgcctcgccttatatgagactttggacttggacttttgggttaatgctgggggcctgttgggaaggcatgattgtgttttgaaatgtgaggacatgagatttgggaggggccggggcagaatggtatggtttggctgtgtccccacccaaatctcatcttaaattgtagttcccatcatccccacgtgtcatgggaggcacccagtgggaggtaatagaatcatggaggttgttacccaccatgctgttctcatgatagtgggtggcttctcatgagatttgatggctttataagggtcctttccgcctttgcctggcacttctgtctcctgccaccatgattgtaagtttcctgaggcctccccagccatgcagaagtgtgagtcaattaaacctctttaataattacccagtctcgggtatttcttcatagcagcgtgagaatgggctgacacactatgtctttctatttaaggtgggtttcttgtagagaacatatatcaaatcagtaattgtcttctgattgaagtgtttagaatatttgcacctgatataattattgacacagtaaagttaaacctatcatctttatatttatttgtttcatctatttttttcctctgtttttgttttcttttaaagtaatttttttttgttattttattttatttccactagtggcttaaagctcaactccccaccccttttaagtgattactctgtggtttacagtgtacagttttaccttatcatagtcaaattttgaaaatatagtataccacttcaggtatagtattggaatctgccaatagtatacttctatttcctttgtctcaaactttatgctatcattggcatacattttattcctccatatattataaaagccatagtacattgttactgtttttgctttaaatcagttatctttttttattgtttattgtgctaaaacatacacaacataaattttaccatcttaaaaatttttacgtgcacagttcagtgttatattcataacgtaaactatcaccaccatctatctctgtagctcttttcatcttgcagaactgaaacgccatacctgttaaacagtaactccccattctcccttgccccatattccatctgccttctgattttactcctgtaagggtttcgtataaatggaatcaggcagtatttgtcgttttgtgactgacgtatttcatgtagcaaggttcgtctgtgttgcaccttgtttaaggaaatgctgtgtcagaatttcgttcctttttaaggctactgttttatataccacattttccttattcattcctccattgatgaacactcgggttgcttccacattttagctctcatgaatagtgctaccgtgaacacgggtgtataaataccttttcgagactgtgctttccgttcttttggtataaaatcaaaagaagagaaattgctggactatgagttaaccctattttcaattttttgaggaaccaccgtactgttttccacagcggctgtaccaactgacattcccaccagcggtacacaagcgttccagtttctccatatcccggccaacacttgttattttgtagtctttcgtgtgttttttaaatagtagccaccctaatgggtgtaaggtggcatcacatagttttgatttgcatttccctaatgattcatgatgttgagcatctcttcatgtgcttattggccatttctgttttttctttggagaaatatctattcaagttctcagcctatttttaaatcaggttttctgttgttgttgttactgagttttagaagttctctacatagttagatagttatccctaatcagatatacgatttgcaaatattttctcccgttctgtggttatcttctcactgttactgtggtaatagtgtctttcgatgcacacatttttttattttcaggaagtcccatttgtctattttaatcatttatattttatagagattaagattataaaataatatttttctcatatgtttaccattttcaaaaatctttgttttttatctgtgtatgtctgaatttccatctgtcatcatattccttctctctaaagaacttactgaggctgagagcagtggctcatgcctgtaatcccagcacttttggaggccaaagcaggaggattgcttgaggccaggagttcaagactagcctggacaacggtgaagcccttatctctacaaaaatttaaatttaaatttaaaaaatttagctggatacagtggtgtgtgcctgcagtcccacctactcgggaggcccaggtgggaggatcactttagctcagcagttcaagattgcagtgagctatgatcacgccactgcactccaacctgggctgcagaatgagaccctgtctcagaaaattaaaaataaattaaaaataaattttaaaaaagaacttccttttaaatgtcttgtagtacacatctgctggtaattaattctatgttttatttgtatgagggagtgtatttttatcaacttccgttatggccagaattgtgtcccccctcccaaaattcctatgttgaagtcttaaccctcagtacctcaaagtgtgacgactatatttagagataagacctttaaagagataattaagttaaaatgaggccattagggtgaaccctaatccattgtaactgatatccttttaagagacacaccagggtacacacacacaggaaaataccacataagggcaaagcaagaaggtggccatctgtaagccaaggagagagaggcctcagaagaaatgaaacctgctaatactttgatgttggatttctggcttccagaactgtgagaaaattaacttctgttgtttaagccacccagactggtattttgttatggcagccctagaaaactgtacaccttgtttttgagatgttctctgggcacagatttcttggttgacagggattttttttttcctctttcttttaatacttttaagatgtggttccattttcttttggcttgtatagtttctgttgaggtctgctatattcatgtagctttgttttggggtgagtgggttggttggttggttgatataccatgttcttttttctcctgaggctttcaaaatattctctttatctttagttttcaaccatttgatgataatgtacctagttgtgtttttctgtatatctatcttgtttggaattctctgagcccctgctctggatctgtgttttgttgtctttcattaattttggaaaattcttggccattatctcttcagatatatcttctgcccacttctctcttctcctttgtaactaccattatgtatttgttagatcatttgatattgtcccatatctcttggatttctgttttgttttgttttctatattttcttattatacttgaagttttctgttattagtttggataatttatattgatctatacttaagttcactttctttttgtgtgtgtgtcataattttttattaaatgttaaatagtctaagtaaaaagaacagtggaaaccaaggtaaataaaacttatgtctggaaatatactttcctcttcttctgtcaggccattagcattggggactgaatcaaataactcactaattgagctgggtttgggcttctttccactctagttaccttcatggtgccacaggccttgagcttttcagtggtggattgccactttcatacgtttaatgtgagctctgtggtgccgatgtttctgtttcatgcttctctctcagctttcagcatgtccttcatgcctgcaccgcagagggcctctctccatgctcttgttcttctctaagcagtagactgttcttgttactcagtgaagactcagggtcgggcaggagtggcttcttcattttcctgctccagtcttggtcttggtacttctgtcccacccccagtgacagacaacatctcccccctactcagcacaggtctagactgtcggctgatttcctaccccttccccagtagcagcagacttctagtttgaatccattcataatttggggtcctactggactccctgtctccttcctggcaacagtttgcttttgcctaatgtcagcacaagaggtagggtagattttgtaccaattctctagcctaggaatagaggccatgaaggttgctgccctacccccagaagcacacagcttttcccttgttctaaaatgttgagcatggaaaatttggccttatgtcttctcacttccgggctttcttgatgtcaagctccctgtcattctgtgtccatgttgtgattgaagaaagcaatcttaaacatgcatattttaggagtcacaaaaaattatttgcagaggattccagaagaaagtttcctctgtgaaaaccttctcttaccattttttacattatatataatttctatttttgtccccaggcttttttctttattgtgtgtgattgtatcaaattaattttaatgaaatatttcaaacatttggaaaaatatggagattaatataacattacctttatacccagaattaacaaatattactttgtcttatcttcttcagatcctttttaatgctaaatatagtatgatattgtgatataataagaaatacacatttggtctcggtccctagttccttatacacagctcctgaaactcttggaatcccctgagtgatgcgtgtttgtttttttaatgctaatagatgactggtggctgggagctctggatggagactggttaccaagggaaccaaccctgtgatagatggttgggactctccagcccacaccccagcctctagagagaggaggggagctgcaggttgagttgattgcccgtggccaatgatgtaattaatcatgcctacttaatgaatcttccgtaacactctaaaggatagtgtccagatgggttccagatagccagccgaacacacggaggtgctggaggtgcccagagaggtcacggaagctccacacccctctccatgtgccttgccctgtgcatctcttcatctgccggttcatttgtgttatcctttgaaatatcctttgtaataaatgggtaaacatgagtaaagtgtttccccaagtcccataagccattctatcaaattaacctaatccgaggaagagatcctgagaactccggtttatagctggtcagtcagaagcacaggtcacaacctgtgattggcatctgaagctggagggtggatactgtgggactgagcccttaatctgtgaagtccgacactgtctccaggtaactagtgtcagaattaaattctaggacacccggttggcgtctgctggagaatctgggtcaggagagttgtgccgactctgtgagattaggaaaaacactttgttttttcctgcctctaataataattaaagtcttctttgtatctcttctcagctgtatttttcttttttcaaccacagtggcacagccaccatcctaaattggtgtgcatttttacagtccatatttttagcgttttaatacatatatgtttccataaacaatgtacaatactgttgagtgtgatataaatttaaaatatatcgtctcatactacttaggctgtcagttcattattacttactgaactcaggccctctagtcatttgataatagaagaaaacatattcttgacatttttcagagagggtgattcttagaccatttttttaggggcctaagccctaaagaagccttctttaaaggaaatagattgaggtaatgtcaaggtggaacacaattatggtacgaagtgtcttgacccagcactaagaaaaaggttttattaaattcaggagttttttaaattgctgcgcaatagaaatacttatttttggagtgtggataatttgatacattcatatgctgtgtaaatataaataagaataattgggatatctgtcaccctaaatactttcctttcttaatgctaggaaccttgaaattctcttctaatcttcatacaatgtacaacagattaacattaactgtagtcaccctattgatctgtggaacactaggtcttacttctatctaactatattttaacccactaatcagcctctcttcagcacgccccaacccccttcctggcctctcaagttcagttttagatttcagcatcttctctgtttactttaggatgctcccgtatctgaccactgttacttagctttcagaatcgccgatcactgaaattccaggtccaggggttctgcactgcgcttagaatttctcctcatgtataagatgtgctggttgcaccgccaagccctgttgccgtctgtgggacaggaagccttgttagtgcctccatgaatccagcactgacattagctcacgtagaactaacatctactcagggagttgcgttagtggctcttaagaaactccatgaaaattgtgagaaaacttcaatgagaacgtttttgacaagtcgcctttcccttgtatataaatgcgaaccgtttttcattttcaaaatttcaaactttttcatagaactcaaggatttgagtcctgcttcctttgagaggggtaacagtgagttttacataaacactgtgtatgattttaaaaggcagtactgaacatgtgctacacattaattccttagtttcgaaagatgcgacggagtgggaaagttcgatatccacaggtgcagatattggaaagaccacactcaggtgtatgatctttctcatagctgcaagtgactgtgttcagctttccaatgaggtgaggaaacatttatgggcctcctatggctctcttattcattcaccactgtgctgtgtaacacaatttccctgcaacaataaacttcaactttgcaatttgtcaccagtgcaatggctcatgtagttataaagtgaacgtggtgaccaatttggggcgtaatattgttctgcagtcaaagtatcctaatttgaagaaattttatgtatcgtgattttacaccaactggccaaagtcagatagtctgattaaatagatttggttttggctaactatatgtagttaattctacacactttaaatattttggtttgcaggtattttttgaaggcttaagtatttggtttctgtttctttgggtttcctgtctgtagattctaccaagcgtatgttgttgaaataatgaattcagggccaccttacccctagctgcaatcttgtcaagttccagcagctgagtaaacttgggtcaggtcagatttgagacaccctatgaccaagaagatattatttctaaatatcttgtatacattgaagaacagccattattttatctcttcaaggtaattttcttatctagttcatgttatgttttttacttcttttgaattatataaaattggaagttatatttataatattgttgtaatgtgaggccaagggggagcacacatcagaagatggaataagcaagcagaagctcggatctgagtctcacagtactccagatgcagtgagtggttctggagctgtacttctcaaagagggtggcagctctcagagagggtggggccctcagaatcaccagaagaactgtgttctcttgcattcccatccccataattctaataatctagagaaaatgaagagagaaaaaataaggtgaagccaggagtgagctcgcaggcattgtcagagatttaattattgtcatgtgctacataacaatatttcagtcgatgacggaccccatgttccacagtgctcccgtaagatgataagaccatatttttactgtaccttgtctatgtttagatatgtttggatccagaaataccactgtgttccagttgcctacagtacgtagtacagtcacatgctgtacaggtttgtagcctaggagcaataggctgtaccagacaccctcggtgtgtagcagctataccacctaggtctgtgtaagtcagtctgtgatgttcccacaacaagacctcctgacgatgcatttctcagaatgtatccccaccattaagtgacatgtctgtagtatgcagtttatagtaccccacgatattaaaacagaaacagaaaaagaaattcctccctcatgggtcctcataaagaatctgatcgtaagcaacatcttcagcatccttccatatgtacagccgtgaggttcagaagacttctttttttaagaaacatctcagcaatataataaggccaaagttcatctcataaaaaccgttttctaggagaccgtaaatattgctactcaaatatctaatatattatttaatattgggaataaattttcaagtctttggaaagatttaggcagtactctctaaatattagttgtctcaaccatttttttatacattaagcagcaatatgtttaggatctagtctttgacagataccagaatgcagctattcagtgttcaagtatagagtcatacactttaaaagttaatcgaaaaaggaaaaaaaaaattagccaagtatggtggtgcatgcctgtggtcctagctacttgggtggctgaagtgggagggtcacttgagcccagcaggttgaggctgcagtgagccaagatagcaccactgccctccagcctgagccacagagcgagaccctgtctcaaaaaaagaaaaagaaaaagaaaaaaaagttagtcaatctgccccttccccttaatggtggctgaggaatcagctggcatggtcagtgaggctggtgccaagtgttcaactgatatagccaaaatgactggcaggacaaaggcactgggtttgaccagcatggttggcatatttggtagtggagctggtcctcaggatcatgccctgggcatttggcaggaccatggattctgctagcatagctggtgtgtttgtcatgctgagaccaagaagccagcccacatggccaacatttttgggaggcgagggctgaggattcagctagcatgagtggaaatagcaggccagggccaagaaagtggcccacatggttgagagactggttacataccaggagatcaagcaaatgagtaaatatattggagctaatatattgaggatagtgtgtttgttattataggagataagagtaccagatatagaaagagtaaagacaaatcctatcgtattggattgtttttagaggtattgatatgaattcatggtttttaacagataaatagatttagatttctctgtgtgtatgtgtgtttatatatgtgtatatgtgtatgtatacacatatacacatgtatgtattttcttttttttttttttttgagatggagtttcgctcttgttgcccaggctgaagtgcaatggcacgatcttggctcaccacaacctccacctcccaggttcaagtgattctcctgcctcagcctcccgagtaactgaatcggattacaggcatgcgccaccatgcccggctaattttgtatttttagtagagacagggttcctccatgttggtcaggctggtcttgagctcctgacctcaggtgacccacccaccttggcttcccaaagcatgtatgtattttctaaccttatctgctgaagggacctggaagcagtgacacccagtaacagagagctcacttactactcaaatgttggtctagatgccttttcccaccagaaggaaccagagctctttggggaaatgactgagtctagggctgtgtgtgggaaagcacgtgataatcccagaacagttttataccagaaagtaaggaagcattccaagagtggtggggatgtatcaaaacaacatggggaaaatcttgaggaattcgagcatcaaaataagtaaagatagtaacagattataacaactaatatagagagagtattgcctaaatctttccaaagacttgaaaatttatttcctatatcaaataatacattaggtttctgagtacttgggcagcaatatttaatttagggtctcctagaaaatggtttctatgaaatgaactttgacattatgatattgctgagattttttttaaaaaagaaatctctgaacctcatggctatatatatgaaaggatgctgaagatgttgcttacaattagactttttatgaggacccagggggagaaatttctttcagatctctggactagaaataatcaatattctattgaataaaatagaaatctttgagtctgtgatggtataaagaagtgaatgaatgaatgaatgaatgaatgaacaagtaaatgggggagaaaggaaaactccaccctgtggttgaatgccagcataatgtagacggaattatggaattagagaatctgcatttggcaccattatagtagtgactgatttaggcaggtatcatcaatgaatgtgaaaacaccaggtgaaggttgactaagaacagactatttgcatagactgaaagtatctcgtcaaacacacaaaaatgtatgtcagttaattagcacaaagtatttatagttaatttacattggaaaaatctgacacataccatctaaaccaagtgattaaggttagcatctccagtagtgggacacgtcaatgtgtgcctcttcatcataggcacagagaagaacacaggtggtactcttgccaaacaatcacctgaatttaacaccaggaaacatacatagagtgatatagatagagatacagataacgatacagatagagacagatgtgtatacacatgtatatttatcaagatagagaattaattaatgaatgatatgacaaatgtaaaatgttagcagttaaggaatccaggtgaaatttataccagaatagacttaaagatttctgttttattcagtgagttataatattttataatcatttatttcaatgctcaaattctccaagatgtttcccgcatccttctaatatatgcccactactcttggaaaacttccttactttctggtataagatgttcttttgaaattattttaaaataaaaagtttttaaaaacttaaatcagtaaactaggattaagattttaatcctcttgtgaaaattgagaggcacaggagtattgaaaatacaagtattagcctaaatagccaaccccaaggtaacacccacaggcagccgcaaaatggtgccgtggcaggtggagctttgtgtgggctgagtcggtgttaccccatgagcagtgctgccagttacaccaagctccacccatcgctgcaccattacaagaggtaaatacgtttgaatgcgacatccatttcattaccattacagtgtttaattgtaaacattacaagaaggcaggtttaagtttaacagaaagtgaaacttcctagatctctccacaaaaagaatgggcagccatatttgaaataagtccttttgactggagagaagctactcagttgggttataaaaaggattcaggattgcaagatgatttgagtcagcttgtttctaaggtggtggtggtggtgtttttctaaccctgattgtctattatctagtataacagggatgtataatagccccctcctcccagttttaggacagtatttgaatgtgacatcctaacttgaactccataaaaaataaattaggtaaaatagttgaaaaggggaagaaaggaggaatgaaaaatgaacaattgttttgaaaaggcagttttcataggataaagacttgcctaaacgatgaggaggcccttttttttttttttttttttttttcatttttctagttccacttaggatagaccaagataatatattaaattacaaaagaaatattttagttaaacatagggaacagctgtctgactataaaactaagcaacatggaaaaaattcaaaagaatgttgtagaatttccttctggagagttttaaaaactaaggttgactccccatcacttagtgcccatcccaacctcaccatacttgtcaatattgtacccatttgatacagatcatctcatacaattagccatatggattatatatgaatatgagacatgtataacctgtatgttgaatgattgaatatttttgaaagtgcagctttcgtttttaaaacctttgtcgcccaggaattttagataaagccaacgtttttggctctaaaattgaactttgagccgggcacagtggctcacacttgtaatcccagcactttgggaggctgaggcaggcagatcacctgaggtcaggatttcgagaccagcctggccaatgtgggaaaatcctgtctctactaaaagtacaaaaattaacctggcgtggtggtgggcacctgtaatctcagctacttgggaggctgaggcaggagaatagcttgaacccaggaggcagaggttgcgtgagctgagattgcaccattgcactccagcctgggagacaagagcgaaactctgtctcaaaaaataataataataataaaataaaactgagcctttgtagcaatgggtggttgttttaagccttaataaagaaatgtgttttaattccagatattaaccaaaaggcacctaacatatattgctaaaactacccccaattcagcaggcatagagacataaaacactaaacttaagagaacaaaatggtaaataggactttatcaaactttaaacttctattcatcaacactgggaaaaaatattcactaaatacatacatacacacacaaaaacacatacacacatgacaaagtacttgtattgagaagatattttaaaagtcagtaacaaaagatatttaatagatatttagtatctattagatacttaaaacaacataagtttttaaatgggcagaagacttgaacagactctccaaatatacaaagtaagcacatgaataagtgtttatgcaaatgaaagccacaaagagatagtactacagtatcactaaaatagctaaaattaacaaaactgacagtaccaaatgctcgtgaagatatggagcaactggaactctgatacactgtgatgagagggtaaaatggcataatattttagaaaactgagaagcagtttcttatagatgtacatctatcctgtaacccagggatcctattcttactcaaaagaaatgaaagcatatgtccacaaaaagacttgtacaagagtgttcatagcagctttactggaaaaagtccaaaagtggaaacaacccaaatgtccattaacaggagaataggtatttttaaatgatcatatatcattaatggaatactactcagcaatagaaaagaatgaactactaatacaaacaactgaatcttcagaaacactgtgttaagcaaaagaagccagacacacacaaaaaattatgtactaaatgtattattccatttatatgacattcaggaacagaataaattatggtggtaaaaattagaacagtgattacttataggaattgactgaaagaggataaaacagaaccttctggggtaatgaaaatgtcctatattttgactggggagatggccatgtgggtagataaattcatcaaaattcattcagttgtacacctaaagatctgtacattttgttatatggcaacgtttaaaaaaaatactccgcctccagtctccttttgaactgtttgaagtagtacaactgataggcagattctgctaaaaagctaaaaatataatttttctctagagtacaaatttcttttttttttccaccgtaaatgccagcctcccatcagaggctgaaccacagtggaatcaactttcatcagccagcccctctgtggctcactgagctttggattccaggtccctttcccagcacttagtcccatttttaattttcaggaagtattgttccaaaacttggctcagacttatcctctccttggattcctttctccatttgttttctcggttttgctcacttactctttaacttgcacccctctttttccaaggtggtggattagggggtgttaatgctggggcagtgttaggcacagaacctaggagtcatctccctcactccgggaccgcatcaatcatcagtcacagacatgacagttcatttttccctcctgaacgcgcctgcacagatgggtgtatcgctcaagtagccaaatggatgtagctgttgggggacagggcctgaggggcagcagggagagaaaagaacaaagaaagaaagaagaatggttctttgtggggcagcaaactttcttctggttcccagcctgaatgtttctgatctggttttcttctttttgtgatgtttgaacttgtttcctcaactcagatgctgaactcttgtccaaaaaacctaagggcagcatagtgtgagagactgtgggaggcaagtccagcaatccagcaaaaagaattgcagaactgtgaagataaatgtgtgtccgtatcaggactgcgctggagaacgggaagagaggggttggggtgctaagactgtgtgtgtgtgtgtgtgtgtgtgtgtgtgtgtgtcttgacaaactgatgagaaacactattgagtagttttctcctctctgctctcacacacagtctggcactttcttcttctgtgacagctgccattaactttttaatgcgaagacaagggtatcttgccaattggatgttgaaatctctggcaaggaaaagcttgctttaaaaaaaaaagaggcagggaatatggggaaggttgggcagacataccaaaggtccgggggaagacagggtactaagttggaccttacaatgcagaatggctgccctgcttctgataaaatcccctcaaatgaagttgggaaaagaaagaggaaatgggagtgtgagtgtaagggagataaggaactcttttacgcagttgcaatgacacagatattaagtattatttgcaattcactcccgatggatgtgagaactcctcatggagttttggtgtatatgtgggaccttgtgctaaatgtagaataatcttgtttgtgcagaaagagaaggaaagagaaaatattaggagacctctgtagaccaaaacattatgatacaaaagattgttccagtcatttccttccatagcttatctcagagaaggggagttctggtgttcgtggctcgcctatcaggtcttcccctcacctctaaactacggcagctcttgatccttattactggtacctaccccaaactcaccaggtctaaataaaactgaacataaaaacatcctgttgtgaattcagttctcatgtaccttcagctttgcagcaaagaatgcaaaagcctttttttttttttttttttttttttgagacagagtttcgctccgttgcccaggctggagttcagtggagcgatctcagctcactgcaacctccccctcccgagttcaagcaattctcctgccctcaccctcccgagtagctgggactacaggtgtgcaccatgacgcccagctaatttttgtatttttagtaagagacagggtttcaccgtgttagccagggtggtctcgatctcttgacctcacgatctgcccacctcagcctcccaaagtgctgggattacaggcgtgagccacggtgcatggccacaaaagccttttttaatctagtttttattagcttggcctcacactggactctttaaaaaagagtcctaaaatatgaatatggaatattatatgaaatattttataaaaatattttataaaaagctcagcatttatggagatcttagtgtattttagctgccctaattgcttttttcctttgtgttgaacgtattcccatgggagaagaaagttcaccctcctgagtccctgagctcctgcaggaagaattatttaccatcctggaattttaatgagtcttgacaattactgtaatccaggtcattgaacgcgggtctgtcatcgccagtgtcatcttccagagatgatgctcccccaactaagctgagaagaaaatgagtccttgtgaatgccaaagagacatgaatgtgacctgcaccaatgctgcaaacctaaagccagtgggactagaaactgtggaaatgacagtcttccggtccggtcagagcatctgaaataaattgcccacagttttcttccaaacttttaaattgtttacaaaaggtttggtggtaccaatcttactgagacggcctagaaatacaagtaacgtaaatttcttacagagtgtctacaatgctgcatgccagaggcactcagcacacctgaaggatgtgaagctcctgtaggaacagtagctctgtacaacagtaatctctagacaaccaacgtaaatttaaacaaaaaggtgtgagaccacacacccttcttccagtggggcataactgcccaggtgtaaaatcagacaggaaccctgaaatatgaaccatctccagtttgcagacagacattgctgccattctccacttgactcccctgtgcccatgcctgaaagccccgcttcccctagagaggtgggggcagtgtggccacagcctctctccccgcagtaccacctggtcccaaaagtcccagccctccacggcagcactagtgaggcctccttgctgttgctgctgttactccctgagccttctagagaatctcctgcatgccctgtgagaatgtgctgatgctggggccactgccacagtcgcgggttttctcccagacccccttctggtgccaagtaggaaagatgggaccaggctaattctgttgccactgagacaagtgaagacatatcctgatgtctggagttggatctcagaaggcgccttccagtgtataaactgatatgaaatggtggttaggtcctgtggcactgcacaccaacactgtattaccttgctcgggacaccgtaacaaaataccacagaccgcgtggcttaagcaacgtaaattgatttcctcacagttctggaggctggaagtccgagatcaaggggtcggcagggttggtttctcctgaggccccctctccttggtgtatacatggctgcctgctcgctgtgtcctcacgtggtctatcctctctccctgtgctccccagtgtctttctgtatgtccagatttcctcctgttacaaagataccagtcatactggatttggaaccaccctgcctgcctcattttaacttaatcgcctctttaaaggccctgtctccaaatgcagtcacatcattctgaggttctggtgatttaggcttccacctatgaatttggtggggacacagctcagcccaccacagacattatgggtaaaataggctcatggcaacaacttccgaacctaactactgcttgggtaattgttaagggtttcaaaataactgactgtcaaacaagctctggaaactgcattccaaataaactgtggggctctgcctgttaaaaggtaggaggtcctggcgaatctgttatgtccagtaattactgaatactcccttaggggccattcagggtctgctggttacttcaataaagaatgctgtaagaaaagcactgagtctctggccctttctaaaagagttgtgtaagagacataaagccataaaatatgaagtaggtgcttgtttagcgactgaatgaaatcaggaattttccggagataagattatggtattcttctacactgtataaatgctatcttcctgctttgtttacctctttttatacaaaagaccacctaggcacaaaaggaagtgcccctacctagcatagtctgaacgagtgaaagagagtctttaattttaacactaaagataacagatcttgctgtaaagtgcaatgatgcttaatagccctaaagatcaggttgtgattgatgggatttctcatggtgttcttgttaaagataaatagtagtttttaatgttatcagactggaaacatcttactcttttctaatgtaagctctaaagcaaacttcggacactaacatcttattgccaacttaacagaaaagtgtgatgggatattggataaggctccgacctgcgtgcctgaaatttcagtggttcggtttgttcctttgaatgaggcatctctctgaggcactgcctttctaagtgcaagttttctaggaagggcagtgtgttgtcagtttctccttagcgtgcccagtgtatctaggatgatacaaacaggaagagactgggaaaaggagggttcaaaaaagggagggacccaatggccagattaaaaaccagcttaacctcttcattgtatcccaggcctgatgattgagcatctttattcttaggattctccaactttaggctacctgatacatctagagcagcggtccccaacgttttcggcaccggggactggtttcacagaaggcagtttttccacagacaggggagtggcagggaagggatggtttcaggataattgaagcacattacatttattgtgcactttatttctgttattattccattgtaatatataatgaaataattatacaattcaccataatgtagaatccatgggagcccagagcttgttttcctgcaactagactgtcccatttgggagtgatgggagacagtgatagattatcaggcattagattctcataaggagcacgcggcctagatccctcgcgtgcgtggttcacaatagggtttgcgctcatatgagaatctaatgcctcagctgatctgacaagagacggaactcaggcagtaatgcacgcaatggagagcggctgtaaatatagatgaagctttgcttcctggctagcccttcacctcctgctgtgtggcccagttcctaacagggcctggaccagtacacggacccagtactgggagttggagactcccgatctacagtatgtgagaaatcacatcaaccttttacaaggattgagcctaaatttgaaccaaaaaatacttacttctaaaagtaagtaagccacagatagatgtcagaatacaactagcaagaaggtaaagactcatggaaaagatggagtaatgagttttcttagcactgtatgatacgacagaaaagctgcagggggaaggcttcacgaaagcaaaaaactccaactagaaatagcctgcaggggccaggtgcagcgactcacgcctgtaatcccagcactttgggaggccaaggtgggtggatcacttgaggtcaggagttcaaggtcagcctggccaacatggtgaaacccatctctactaaaaatacaaaaattagcccagcattgtgttgcacacctgtagtcccagctacttggaaggctgaggcaggagaatcgctagaacccgggaggtggaggttgcagtgagctgagatcatgccactgcactccagcctgggcaacagagcaagaccccatcaaaaaagaaagacagaaaaagagagagagaggaaaggaaaggaggaagaaagaaaggagaaaagaaaggaaagaaagagcctgcaggctctcagggatcactgttctactgttattttataaggcaaaccagggatgagctgtatttagccacagattattaaatctggaaagaatttagaaatcatctaatctcccctttatacacataatgaagctgaggacagagaggctcaagatggtaaagctaagtggcagagttagaactagacatttcttccatttcagaccttttcccactacttccctgtgcaaccttgggaagaaagtcctcttagcctgtcagaggcatctctgtctgtaactgttctccttcacgaatgttaactcctctgcaggatgccacagggacatttgccttctagtgcaagcagagtgtttcaggaatgcataacagcagatagatacatgtctgtgctaggtgttgtgcactaaccaagcactatggatttcttgcagggagaaaaaggaagagtagataactaacaatatcttattaagagtctcctgcagggctgtgactccacgcagctctcttctccctgtcctgctggtgggagccttgagcccagctcttgagcactgtctggtgtggcaccctgcaggctgccagcagctgtcatacgggcattgggatcgttggaaagtgctgcaacatgggagtagctggggcagctgttgattgggagcagcctccacgggctgtgttcagtgggtgattccatgcctttggtctgtgtggagctcactctctcccttggctccttcggaggggtgggcccaccgccctctccagctgttttctcagaaagagaggcaaagaagaaggacctggcggtccttccagagtgcttgctgtggtgtgggcttcgcctcccctccgtgtgggaataaactgtgtgaagccatgtgggtcctggagctccgtggcttcacccacactttctgggggaactgcactcacaagtatggagagccttaagcattcgttgagccagactggactggaaacgtcccgggagtccctcattctcacccttcttcacctaagtaaacacacaacaaaattctctgagctttagggggctgtgggaatatttttctttcaaccccaaccttccccaagagctttcaaatcacataaagtactgttttccctttagcaatccaaaactagtaacatgcaactccaggccccaccccaccccacccccatcctcctcaatgccagccaagtcagacacaacttgccatgtccctgtggtgtgccatgaactgggcaggtatgccccggggtcactcagagcagcccacgggaccctagagctctggcagtcgtggaaccccttccatggcccttgtgagttacggggccaggagtttgtatcacatcaaagggtcatttcgtcatctcacaagggagtcaggagataccacccagagaatgtatcagatttatactaaaaaaaaaaaaaatccagcaagatccatagctctctgtgggagccattccagtttctccctgtcacagtggccctagaatcagataccacgcactggaaatagcagagtgcaaccctggacgtagagggtgcattgagcacgtgccactgtggctggggggaaacttccttctctcttcctgcctggcctgagagattgcctggacgtggatcaggctttgtgctggtttagcacttaaatcttaactgcaacaaagccttgttcttaccaccctgacagtttcagcattaggtttcttattagttgtttgggtttggggttttttttgttttttttttttcttcatcttctcccttttgacacttttcatttctgagagccaaaccaaatacgctaggcggactagctaacctggctgtgtctgcgattcccagagccctgctgctgctctgatgggtccctttggtaaggagggaaatttttctccatttttataacgacgagcccttaatttgaacgtctctgttcacttcagttaatagatttgtaagaaataatgtgagatattaccaaatcagcttagacaaccagattaaaaatctgcctcactgggaaatctgcttctttgtttagaatactccacactttctcaagcctgcatctgcaaatctttggcctgataaagacttccagagtccatccgtccatctcttgcttcaggactgtacttcgtccaagcattccacacagaagggtaactggcttgttctttgagtgggataccacgtcacagttcctttggtgttccagggacatttctatacaagagatggtcccctgttttcttagtgtatagaggctcatcagaccaatgtaaatctcctgttgagttttatttttttaattcccatttttgtcttttatagtcatgttttctgttctcttgccaaactcccgtgctattcagctcccttcccagcttgttcagaaaaggtataacacccacatcaagataaaacctgctgagcatggtggcacacacccgtagtcccagctgctcaggaggctgaggcaggaggatcgtttaaggccaagagttcaagacccacctgagcaacacagcgagaccctttctctaaaaaattagagaggtataacttttcaggaaagaggataatctggaaagttgctgtaggcacagactatcacgtagaaaaaactgaaattatctcagctagggaagaatgctttaggcaggaagacagccagaattttagaagtgtctagacataagtaagttagaaattaagatatgagtatgttggtgacatctgcgaatacaaaatataatcatcagaaagcaaacatttgttctggattttgtccagataacggtttaaaactgaagtgttgtatctattgtagtgcgtggttccagctcctgctgtacatgaggaggttaatttggagtgacaggtgttagcaacacgtgtttcttggtcctgtagattgccactgacccaattcatttgtccacctttgctggggttacttggtctctcagttgttgactttcacaaaataatggttgactctaaccttgcaaagaataataaacaactgtgagtggtgacagctggaagaggtctgacagctagcaagaccagattccttgtaaagctttcctctcaggtaggggagacttcctctttttctccatggagagcttgtgcacctggatgcagtagagcctgatccactaaccactggccaggcgtgatagatacatattaagttttcctacaacagatagatctatcagtctaacctgtgtacctggccctgtacctcttgagacctcagctgtcttacttgtaaggttagagaatgggactagtagttcctgtagctcccttccgggctgatgagtctaaatttcagaattggcctgttttgggtgtagcatttgtaggtctcgttgttccattgttgggtatttgcctgagctgcaggtcggggataggggacagggtagaaaactaaatgataatttatgtttttatatagattcactagaaatcttaactgttttatttcttttagggctgggggctgccagtgcagttgcagagttttcagtgccatagctgggaagcagagaagctcttgatttgtttttgttttgtttttaacctttgaaaatgaatggcagaaatatgtgatgacctaacattaaaaaatctaggccaagcacagtggctccccactataatcccagcactttgggaagccaaggtgggaggattgcttgaggccaggagttcaagaccagtctgggcaacatagtgagacctcctctctacaaaaaaaatttaaaattagtggggtgtgctggcatttcgctgtagtcccagccactcgggaagctgaggtgagagaatcacttcagcccaagaggtagagattgcagtgagccgtgatcacaccactgcactccagcctgggcaacagagtgtaaccctgtctcaaaagaaaaaaaaaaagagaagagaaaaggaaggaagggagaaagaaaaggaaaaaaggaaggaagggaaggagggaggaaggaagataaatctagctaccctaaggcatatggctagcattcactcagtaaatacttaatgaacacttattacatgccaggcataaagtgttgttgataatacaagaaagtaattacatacttgagtttccctcccatccagggaatctcatcttctatcatgagggaaagaaaggaggaagtccctttatatcaccacttgaatctggaggagatgactgtgaactatcaaattgttaagcagtggaattttgactttggatagacagacccgaatggagccaaactcttgttgttttttgtttgtttttctgagaaggagtctcactctgttgcccaggctggagtgcagtggtgcgatctcagctcactgcaacctccgcctcctgggttcaagcagttctcctgcctcagcttcctgagtagctaggattacaggcacgcaccaccatgcccagctaatttttgtatttttttaagtagagacagggtttcaccatgttgatcaggctggtcttgaactcctgacctcgtgatccacccaccttggcctcccaaagtgctgggattacaggtgtgagccactgcgcccggcccaaactctcgtttttattatgccattttgttcaaagttagttatgggagagcagtaacatcttatttacttttggtctaagcaacagcctttccttcctgtaaaaacaaattcatacattgcctggcaagggagttcatcacaaagtaggaaggggagctgggtgtgatggtgcgcacccgtagtcccggctactcagcggtctaaggcaggaagatcacttgagcccaggagttccaggctgcagtgagctgtgatctcgccaccgcactccagcctgggggacagagtgagactctatctcaaaaaaaaaaaaaaaaaaaggacagggagggagaaggagaagtccccacagcagcctcacagccattaccacttccggcccacttgcacagtctctgcaagtgcagacttgaaaggaaagaggactttggagttaactttaatgagtgggaaataaacataggataaattcttcaagagcaattttagttttccctggtactaagtgctaaagggattctgtagagtcaagaagtgaccagatgcctgtagaaaaatagatccctgggcaaaaaagattgaggtttagagggattgtagagggttagagggattccagatccctctgactgtgtaagttttatgtcttattcaatagatgctcttacggcaaaatacatttccatttattccagttgtgtgaaattccaaactaggaagttattttatgtcttcgtatctcctaagaagcctgcagattcaagttaggggcttgtgggccagacctggccaggacgagcaccatttccacttgatctgtcagctccaaaaggctccgaacatcatgccagattacagctcagacctcatggcctgtgacacatcctgggacttagctgttagaacctcaagtttagattcttgtctgcttaaaccaaactaggcatttctgaataatttcctgccctccaccaaaccatctgcagaaaggaattaatctgagtcactgccaaccacagaggaattcattcactgacccctcttgtaaccgtcccttctttatacccatcaatacatcctccctttcacctcatgctttgtgactatgaatagagttgtttaccttgaaatcaggccaagtccacagaacttttaactgtattttctcttttacaaatttatttcacggagttctggtagctctctctaacatctttactagagagaaaatgttgtttctgttctaaaatcatgacttgtgctgagcggtaaatgtttggggcagtctccctgaatcaagcagcccgcccctcagctctgcttctctttctccattcagccccctcgcattccttattctttagactgtcagcttgttctctggcagttatcctaacactcaaagagggaagggggcctgagtggttttccctgtagccagtcgtaaccatgcttttgtctgccatgtgcttggagagcctcatctctgaaatgttcccgctctgctgagcttcctccgttcgtttcttccctgcacagtggtagggtgaggcattctccccttccctctgctgcatacgcttccagcctgtgttgctttgagcattcagattgagttgctcttgcatttgtgattcttggctcaagtccctctagaaatcatattactactctgagttcagggagggctggaacagctactaagaacagaatgcattttaataacattcaacacacaaaaaagccagagaatttctgccagaggccaccttcgtatcctatacttgtcccgtattccatcccttaagaactttaaacacagtggagtgctacactgtatggtttatgtgccctgctgtctaccaaagggcctgtatcatcagattgttttggtttggacatgcttcaaatttgaacttaaatagctctttagaacattatcgaggcctttccccagaattaatatctattcctttatttcattcaccattttcagattgtctgctacgtgcaggccttttgttacgaggcaatattggtatacaaaaaagaattcaccaaggagcttgaagaacagttggggaattaaacataaaaccaactattgaaaggggacaaaatgaatactgtagcagtttacacttctaaccagggatggcattacagagaaaaggggctcaaccgtgaaggataagaaagatagagaagaaagatgtgtaggaagtaagattgtccacattctagaatgagaggaaaggaaaagcaaagacagggaatggcaggtatgtaccaggagatgaaattgaagcagtagctcccatgccaaaaagcttagtcttttattttgtaggaaggaaatcatttaagatgttggaagaggaggagggaactgttccagcctattttagaaagattactcttacaccagggttgaagtagttatgaagctattgcaagatggtagaacatgagagcttgaattaggattgttaacaaggatatcggaaatgaaaaaactaggctagatgtggtggctcacacctgtaatttcaacattatgggaggctgaagtgggaggattgcttaaggccaggagttgaagagcagcctgggcaacatagtgagatgtcatctctttaaaaaaaaaaaaaaggctgggcaaggtgactcatgcctgtaatcccagcactttgggaggccgaggtgggtggatcacacggtcaggagatcgagaccatcctggctaacacagtgaaaccccgtctctactaaaaatattttaaaaattagcctggggccacctgtggtcccagctactcaggaggctgaggcaggagaatggcatgaacccgggaggcagagattgcaatgagctgagatcacgccactacactccagccagggcgacggagcaagactccatctcaaaaaaaaaaaaaaacttagccaggcgtggtggcactctcctgtagccctagctactcgggaagctgatgcaggaggatcacttgaggccaggagttagaggttacagtgagctatgatcactccactgaactccagcctgggcaacagagcaagactctttctcttcaaaagaaaaaaaagaaagaaaaaactaaattagaagaaacatgatctggaaagagcattaataggaaactcacagaagaagtggccaataaatatatattttttaatgttttaccccagtttttggcttcactacagatgggaagaactacgaatgaaaacagtgctgtcatactgggaaggttgggattggttggtttgttggagtccccagtatgttcagagagtgggaaaatggcacccttatttcttgcttatgggctgaatatcagtacagctattctagaatggtctggttacttgtcaaaagctttacacaggtctataccctttgactcgggaattttaagtagaaaatcatagacatgcaaagatttatgtatgggaaaatgtaatacattaatatttatagtaatgaaaacgagaacaaactaaatgtctattggagttaaataaattacaatatattaataaaatggattacaatgcagcccattataaattattttagaagaatattttatcacatgaaaagctgtttaattattgggtgaaaagaacaattcagtaaatagtatgaacagtatgatttgatgtgtaaagggaacattcaccaagagatgtttatcaggcactggaaagatgtgagtctgaaactcagtagaaaaagaagctagagttataattgtgtagatccaccttcataatggttatgtttagatgagggacatagaagagttattatgctagttattatacatgtgatattttctgtgattaaaaaaaaatttaaagaacacctacctcaaaagaaataaatttgaaagaaagtggattaaatgtgttaatcactaaagcacttagaataatacttggcccataataaatgcccagtaagttagttgctgttattatcaccctccccccttttaaagctaaaggtaaacacatttcgctaagcagaggatctaagagagaacagtggacagtctccttagacctcaggaaacccctgcacgtgtgagactgagcagaaagaagaacaacaccaggacagggaagaaatgttggggcaggcagaggagagccagaaacatgtgggtgttgggggcctctagggcagacagcctagcaggtgttttcagggtcagattggatcgtacagttagataatccttgggggtccttgatgggtttttttctgaagttttgaaattataacttgcatacagaaaagtaaacaaatcctatgtatatagctgaattacacactcatatagcaaattcttggaacaagcagcagaatgttaccagtgccgaagccccttgtcatcctccttccagtcactcctcatcctccaaggataacctgacctcaaacaccacagattagttctgcctgtttttaaactttctatgcctggaatcataccatactctattgtgtctggattctgtcattcaacatcatgtttacgaattgtatctgttttgttatacatatagttcattcattctcattgctctatgatattccattgtatgaatgtgccacaaattgtttatcgtctgtttatcattcagtatggacatttgggttgttcccaggttttaatactcttatcagtgtcttcaggtgaatttacatgtacctacaagtccacttgttcagcttggcattcaactttagtagatactgccagatgtttttctaaagtggttatggccatttacactcccaccgggagtgtaggagaggccaagtggttccacgtccttgtcagcacttgatactgtctgtctttttaaattttagccattctggtggtcatttagtggtatctccttgtgattttaacttgtattttcctgatgactaatgagttatccacctttttatatgtctgttaaccatttcagtatactcttgtggtcattcaagtgtcttgcctatttttcattattaactgttgttactgctttataggagttctttatatattatggatatgcatacatcagatatgtatcttctcctgtggactgccctttcactctcttaatggtgtcttttaagagacagaaatccggccgggcgcggtggctcacgcctgtaatcccagcactttgggaggccgaggcgggtggatcacgaggtcaggagatcgagaccatcctggctaacacggtgaaaccccgtctctactaaaaatacaaaaaactagccgggcgtggtggcgagcgcctgtagtcccagctacttggctgaggcaggaggatggtgtgaacccgggatgtggagcttgcagtgagccaagatcgcaccactgcactccagcctgagcgacagagtgagactctgtctcaataaaaaaaagagagagagagagagagacagaaatccttaattttaatgtagatccagtttatcaattttttctctttgtgattattgctttttgtgttctgtttaagaaatctttacattccctaaagatggtctcttacattttcttgtaaatgctttattgttttacccttcacatttatatatgtattcatcatgaattgatttttgttaatggcatgaggtagaaatccaaatgtgttttgcatatagccccaccatttatcagaaagaccatcttttcccagtgcacagtcaagtggccatatacgtgtagggtttttccgtgttctcttttcgtcccattggtctgtgtgtctgctctcgtgccagtgctatgtgtgtgcattgctgccgccttgcagtgacagccttcttccagagaggagcatttgtatagctttgttcttggtggccgtcttggctgttctgggctctctgcatttccacttactctttggaatcagctcgtctattcacatacacacctgccagttttgatatggcttgcatcgactgtatagattagttgaggcagaattcacacctttacagaaatgaggcttccaatccttaatcatgtttattcctccatttaagacattttaacttctccaaatattttatggtttcaatatagaggcttctgtaatctttcgagagggcaatttcagtgaaatagcagaaactaaattctcagttattaaggagagaactcagaaatgcaggtaacacatgtagactattcttttgagaaatttggttacaggaagagaaaagttgctactagcttgtgagatgcagattccaaaagtcttttcaggacgggcaggattcagtgccctcagaagccatagtgaaaaaccaagggaggggttggaaacagagttcactgaagggacagagacatggagagttagctcaggagtgtgggtgctcctgaggcgtgtggaaccctgctcgcctggagaagccaggtggggtcactctgaggcaggacggatccagactccccgggtgcccacgtagtcaacagcacggagctgtcgtgagccgtgccctttgcactgagagcagcagcaagccctgctgccctcacgcctgtcctcatccacacctctaagcccctggaatacagcacatgttattttaacaaagcatgttccattttctctaccgaaggtgtatacttgtacatgtgtcattccaacagtcctttcctccagagtatcttggttaaagtaaggtttggtggaaaggggctttttttttttttttaaataaaatcttgcagtgcccaggaggcttgaggaatattttgtagtagaaatactatatatggaggaaactaaggtgctgagatatgagacttcgtgcttaagttatagaaagggctggcagaattcatgggagcaaacttgttttgcagtttagtgaaaatcggtttactctggaagtgtttttcgatgttttgttattgtttgtttttagatacaaggttttcagcacacgcacagaagatggcatctgcacatctagggagctgattgggtaaacttcagtgctgcccgtaattatggtgtttctaagaaagtaaccaagaagccagtatttttcactgtaatagttgcagtggtgggattacttgccagtattagaaaatggagaatgggaaatggaaaatctcattggattactcctccttacattactgcgtttggatttgtagtcttaacaaggcaataaatggaaggggaaagaaggaatcaattcatggtaactagaatgtaatgagcactttcattaagtcacaatttaatttgtattctttcggaaattcttttctggttttaagcctaaaggggcctgccttgaggaggtgaggaagataagcaggtgtgggagggggtgtgggtagtgggcagggggttgaagagagcaagaatatctcgagtaataccttttaggggaagtttcagacactaaaatacatctttcccaacttatccacagaatccgttgcatcccaaagccatggaaaaactgccttttttcatgtgatgctcatggtaaggaaatgcagacgcccccagacgtcccccttactctgggcagtctgttgcaagctccccagtggatgctgaaactgtggatggtactgaagcctatagatgctgttttcttctatacatatatacctgagataaagtctagtttataaattaggcacagtaagagattaataataaaataggacagttataacaatactcggaacagcatgcactgtaaaacttatgaattgtttatttctggaattttccatttaatatttccagatcgcagttgactgagggtaattgaaaccgtggaaagggaaaccatggacaagggggcgccgccgtattttagtataaggaggttgtgaataatccatttcaggttgtgctttcgcacctgtgctgtataacacattgatctaagtttttagtttgctttcttcacatcgcctctctttcctaagcaatctaaaagttttaacaacacatgcctgtactcctttgacttcagaatgactaaagctttacaatcaaagtcaacaaaataaaagtcacattttaaaagtaatcacggttacacaagagaagttgatccttgagattctttcaagccaagaaaaaatagaatggatcaagcgccaatgaaatctgtccctgctcagctgtgcccacatgtaatactgctttcagataaaatttgaaccatgcctaatccctggagaacagagaaaggcctcccagatggaaagcaactccagctagtgaaggaacacttccttctctaaacttttcgattctgtgattccctctatttttaaacaccttttcccaggcatagcatacgttagaccctggaaaagcgtagccttgtagtctgcctctggtttttttttctccttaatcttattccaccatttcttgttatacttcctcctccagcgctaaatcactgtcccccttcttgtttacaccctcctggcatgtgtaggtaataatcacatttccctgccctttgtttttacttagttcgggtctccatgtttaggttttctaatcctgcccataaaatgattctttcagcttcttagtcatgctgccatttttctttgaacttactccagtttgtctcaatttttctggtaatgaggtgtctgaaacggaacacagtgcccttaggtgtggcctcgctgaaactgtgtaatggaatggcggtctgctgaggagtgatgcccatgtctggccagcccgggggcctttgtctctcttgaagagctggaatcgcttccatcaagatccggcgattcctgtgctccagaattgcagtgagcagcccagtgcctttcctcctttgtgcctcacctcatactgtgtttccatttgaactgaccattttctgtcccctgctgtcaagaaaatacccacccccccaaccctgccttcctttctgtccagactactgaaggcagtagcattttatctctacctatttgtggcagttactacacagtgttttgcatagagcactcagtcaattttttaaagagtttttttgtttgtgttttttttgtttgtttgagatggagtttcgctcttgtctcccaggctggagtgcactggcgcgatctcggctcactgcaacacccacctcttgggtccaagtgattctcctgcctcagcctcctgagtagctgggattacaggcacctgccaccacgcccggctaatttttttgtatttttgatagacggggtttcaccatgttgggtaggctggtctcgaactcctgatctcaagtgatccacctgcctcggcctcccaaagttctgggattacaggcgtgagccactgcacctggccaatttttttatagttttactgagatataatttacatacatacaactcacccattgcaagtacataattcagtagatttagtgtgttctcagagttgtgcagccatcaccatagtcaatttttgaacatttttgtcaccccaaagggaagcccccacctattagcagtcactgccaatcaccccatcctaccccagccccaagcagctgccactcttacttcccaactctggatttggctactctggaatttcatcaagaatggaatcaggctgggcatggtggctcacgcctgtaatcccagcactttgggagaccaaggtgggcagatcgcttgagcccaggagttcgagaccagcctgggcaacatggcaaaaccccatctctacaaaaaaatacaaaaattagccaggtgtagtggcatgtgcatatagtcccagctacttgggaggctaaggcaggaggatcacttgagtctgggaggtggaggttgcagtgagctgagatcctgacactgcactccagcctgagcaacagaatgagaccctgtctcaaaaataaaaaaagaatagaatcatacaagacgtggtctgttgagaccggcttctttcatttaatgtaatgtttttatatactttacatagtgtagctttacataatgtcacgtgtcagaacttcgttcctttttattggccagttggttaatactttttgagtggatattttatacacttcaatttttcccttcttaaggtcgtagagtatcagaattatgcctttaaaagtatatacagttttaaaaggtatttatgttatatattttggtatatttcttattgcaaaattgatgttgcttgtgctataaacagtacagaagtatgtaaagtaaaagtaaaatcaaaactccttccagccactgagagctttttttttttttttttttttttttttttttttttttggagacagagtcttgctctgtcacccaggctggagtgcagtggcgcgatctcgccttactgcaacctccgcctctggggttcaagcttttcttgtgccttagcctcccgagtacctgggaactacaggcactcaccaccacatgtgaccgattttttttgtatgtttagtagagacggggtttcaccattttggccaggctggcctcaaactcctgacctcacgtgatccacctgcctcggcctccctgagtgctgggattataggcgtgagccgctgcgcccagcttcaatgaggtctttaaaaaatctttgttccagccgggcgtggtggctcacgcctgtaatcccagcactttgggaggctgaggcgggcggatcacgaggtcaggagatcaagaccttcctggctaacatggtgaaaccccatctctactaaaaatacaaaaaattagccgagcgtggtagcgggcacctgtagtcccagctactcgggaggctgaggcaggaggatggtgtgaacctgggatgtggagcttgcagtgagccgagatcgcaccactgcactccagcctggtgacagagcgagactccgtctcaaaaaaaaaaaaaattctttgttcctacaaattgccttagtaaacatacttgtacatacgttcttaaatttcttactggtgtttctgttgaacatactctaaaagtagaattatttggtcaaaggacatatacaattaaatttggctgatgagaccaaattgctcacctccctacaattgtcccacaggtcgttgctctgctgttcccacttcccatgccctagccaactctgtagtttatatttcttgttcgtttgtttgttttgagtttttcttttccttttttttttttttgagatggagtcttgctctcgcccaggctggagtgcagtggcgtgatctcggctcactgtaagctccgcctcccgggctcaagcaattctcctgcctcagcctcctgagtagctgggactacaggtgcacgccaccatgcccggctaattttttgtattttttttagtagagatggggtttcaccatgctagtcaggctggtctcgaactcttgacctcgtgatgcgcctgccacctcagcctcccaaagtgctgggattacaggcgtgagccaccgtgctgggtcttgtttttctttttttgagacagggtctcgctgtgttgcgcaggctagagtgcagcaatacaatcacatagctcattgcagcctcaacctcctgggctcaagagttcctcccaccttagcttccagagcggctagaactagaggcacgcacaaccacacctgactaatttttttgttttagttttttgtagagatggggtctcgctgtgttgcgcaggctggtcttgaactcctaggctcaagtgatctgcctgcctcagcctcccaaagtgctgggattacaggtgtgagtccccaaacctggtcaagtttatatttctttttttttttttttttttttgagacagagtctcgctctgtcacccaggctggagtgcagtggcgtgatcttagcccactgcaacctccacctcctggattcaagcaattcttctgcctcagccacccaagtagctgggattataggcgcccgccaccacgcctggctagtttttgtatttttagtagagacagagtttcaccacattggccaggctggtcttgaactcctgaccttgtgatctgcccaccttggcctcctaaagtgctgggattacaggcgtgagccactgcatctggccatatttaattattaatgaaattgggtattatttttgtgtttgttagccatttgtatttcttctgtgagttttttgttcatattctctgcctgtttttctattaggttataggtttttaggcttatggtaccacttcataatacagtaatgtcaatcctttgtctttttgttttgtgtttattatgtctttcaagccgtcatttgtacttcaattaaatgtatagctcttctgtctctatacagacattttaaatttctaaatagcccaacttacccttttattcctttatgacttctgaatttaaaagcacttaccctcctctccaaaataaagctaaaaatacttttctgtctcccatcccaagattataaaaaatatgctcttaaatttactttcagtgttttcacagcataggttttaaatatacatctttaaccagtttggaatttatgttgctgtatggtataagcaagaatacaaccataaatgggcctagttgaccccgtacagttcattgacttcatatgcttcctggtcatatcctaaatcccagtcatttaatggtatcaacccaacactcttctaattattgtacttttatggcatgttttgtttggtaaagcaagtcttaacatcactcttctttctttaaaatattttcttgactcttctctatatttatacttcaggataaatgttagactccattatcaaattccaaaaagaacctttaggatttgtttggaaatgtgttatacacacaaatacacacatacataaagcctcaagtaatgcatgataaaatatatagcagtggttatctctagatgatggtaatattctaggtgatttttttcttgtttttttttctttattttcgaaagtttttacaatatttgtgaagcactttttactttattttattttattttatttttgagataagagtcttgctctgtcacccaggctggagtacagtggcacgatctcggctcactgcaacctccgcctcccagtttcatgcagttctcatgcctcagcctcccgagtagctgggactacaggcacgtgccagcatgcccagctattttttgtatttttagtagagacggggttttgccgtgttggccaggctggttttgaactcctggcctcaagggatccgcccacctcggcctcccaaagtgctgggtttacaggcgtgagccaccgcacccggctgtgaaatcactcccggctgtgaagcactttttaaattgcggaaaactcctgaaaaaaatgttcttaaactaaattatatccttcagtaacttcatgattatctacttaacataacagaagcccaattagaataaagactatttcatgggaaataaataagtgacttgtagagactgaagaagagttacctggctcagaatataaactagaattgtctggaatattcctgggaaggatccagctggaatcaagatactgaagcaacaccaccccataaccttttctgtagcttggttgatgtcagttctgctgagactttagggtctgtagccttttcacttagcagcattcctgggttgttttctctgcagctgtatttacaaggtacccagcctcctagctttccccgttgaagagattcttactcatgtgacacagccagagtttggggtgcaccaaggccgcgtggtctaaatcgggcccctcagtgtcctggtcttttagtcagcatttagcagaaggaagattgctaggtctattcttaactctttgatatatttaagaagcactgtgctcattcttgactcagagcatctagattctttcttttctttttcttgccctgtcttatggtgccaagcatctagattttttttttttttttttttttttttttgcctgttttaagatggaatctcagctgggtgtggtggctcacacctgtaatctcaacattttaggaggccgaggcaggaggatcccttgaggccaggagttcaagaccagcctgggcaacatagttagaccgcacctctaaaaaagaaaaagaaaagagaaatacaaaaattagccaggcatggtggtacacatctgtaatcccagctacttaagaggctgcagcaggaagatcacatgaggtcaggaggtcgaggccacagtgagcctgatcaaaccattgcactccccccagacaatagagggagaccctgtctcaaattaatagaaagagagagagaggagaagggtaggaggcaaggagggagggagggagggaggaaggaagaaaagaaggaaagaaaagaaacgagagagagagagagaaagaaaagaaaagaaaggaaagagagaaaaaggccaggcgcggtgactcaggcctgtaatcccaacactttgggaggccgaggcgggcggatcacaaggtcaggagatctagaccattctggctaacacggtgaagccctgtctctactaaaaatataaaaaattagctgggcgtggtagcaggcgcctgtagtcccaggtactcggaaggctgaggcaggagaatggcacgaacctgggaggcggaggttgcagtgagctgagatcgcgccactgcactccagcctgggtgacagagcgagactcacgtctcagaaaaaaaaaaaaaaaaaaaaaagatagatggggtctcactaccttgcccaggctggactcaaactcctgggctcaagcgattcccccaccctcagcctcccaagtagctgggattacaggcatgcaccactgtacgcagctccctttttgctttttaatctgtatgctcttgctgggtgatcttacccatttagtaacagttagaacacctaatatttgtcaagcactttatatgactatctcattaaatccttaaaacagccctataaggtagggcacaggagctcacgactgtaagcactttgggaggccgaggcagaggcgggattacttgagcctgggcgttcaagacaagcgtaggcaatatagactcccatctctccaaaaaattaaaatttaaaacattggcctgacatggttattattgcctcattttacagatgaggaaactgagactcagacaagtcaaggtcagatgaactgatcggcagaactgaccttgaaacccaggcagcctaactccagagcctatgttcttaactagactttatattccatttttaattttcctcctttctttcctaaaacctgctgtctccttcgttcttggtcttatttgtccaatatccccagctagaattgtcagaaatgattctccagttctccctcacttgacacctcctccttttagtcctgccttttgaagaggctcagacctgtgtgttcctttccacgtccctggccctcccttgcatcagccttgcctaacccccacctgggctgcgagcaggagctgcccttggtggactcttccttctgctcagtctgagaaagtggcgatgctcatgtcactgtaccatttaaaactgcgtggactccttttttgtggttgtggtttggtttctaggcagatcacgctggaacgtcctcacttcacgtgctcagtctggccctcgcgtgtgttttcagctccatttcctgtcattctccacccactccctgtgccttacattcctgccatcctgaggcttcccttttcgcaagatctgggccaggcctgtcccagccccacgcatcagcctttgttcttctgcgctaagcctcctttgtctttggtctcccagacggactctagtcagctctgaagatccagaccccacgcctctttagtagcatttcctcagactcctcagggtgagcagacactcttagggctgccacagcacatgctcaagcctcagctgcggcctcactctgctgggtggtcgtttatctgtttacatgcttgtctccattaacctaaatgtgtcttcaggacaaggaccaaatcccatcagctttcaccacccagcacagagtagcgctcaataaaggttggttaaaatgcttgaaggaatgtgaaagaggctgttaaaaacaacaggaagttagaaatatacttacttctaagcaaagggattatcttgtgtttctcaaagtaatctcttcagctaaattagcaggcctcaggtgggtaggctaatgtaccgaatgaaagcgatacacggcaaatggagaagtcctttaaattctaagttcccttagggcgagggtcgctccacaaggttaggatcctctctgagatcaccatgcccctctctcctgctctcatgcacgttcatgagcctgtgacttggtggagagaacattctgtttacagtgagaggccaggactgaagtcacagctctgcaaaaatgatcagctttcggcctagaaccagtgactaactttttgggcctcactttcatgaagacgcatttgatatttgcttttacacttttcttatggttaattttgatgcagagagacttcacatacagagtgcctttgtcatttattgatgaaaaataattcttagctcagtgcaaatgggattgttgtatctgaaatccatctctcctttccctttcagcttcaggatgagttagagaaaggtgaacgggacaatgcagaactgcaggagtttgccaacgccattcttcagcagatagcagaccattgtcccgacatcctagagcaagtggtcaacgccctggaagagtcctcttgaccctgctttatggggaagcctgaggtagtcaacccaggagccaagaaaagagaactacgaggaacaggtgcccggaaccttcttggcaccaaacactacaaacttcatcccaacttgctcacttgaagaagtgtgattccagcaccgtttctacatctgccatcttactctgcctttctgctttggatgtggtctctacactaaccttcttgatgtccagggtagataaagggtcgaatctctctgaagaactgccacctggtcatcagcagtggagaactgtgggagctggtggctctgccctgacagagagccatggagcagaggagcctctcacctcctgtcctctgacatgagaatgaaaccaggaatggacttggagttcaacaggctgagaggatgcctccaatggaccagagagctgagtgttctaatatcacaataggtgctttctcctaaaagggcaaaaaacaatctcaaaaagattagaaaaagagaaggggggaagggaagagaaaatcgactcttctttttactgtctcttctgcttactttccacatgagatgctttgtaccggggagctgtgagcaggcctcacgatggcttgggagcactcgttctcccaaggtctgagtcttcatccagccctgcctgtctgtcgcagccttcctcactctgttcctcggccagttaacaagaagatggtgtgaggtgttctccaccagtctctcctgtttgagactgttgacgttatcatactgaggtgttagatcaaatatctctaattgaagaacatgtgaggttgaaagagcaccagccagggcaacatagcgcgaccctgtctctacaaaaaattaaaaagagaacatacaaagttgacatatgagaccctgttgtccccgcctgcagctttgccccagtaacagatgcccgttgctcttgggctggtttcccctgaacacctccaagaggctgcctgccttgccagcacccgtgtcctgagctcctgcagcccagtggctgctgaagttgtgatccctcactcaccctgctagctttgcccttgactcgtcttctctgaacctcagcctcgtgcattgcctggaaccttcttctagcataaatgaaggtttttcctcctacacacattccttcctcggttatttcattcagagaatatttatgaaatgcctactgtgtgcaagtcatccatccttgaaaaggccacttctcagtgagggagagatgtagtggattctgtgagacatacctgctggagttgaagcagtaaatagcatgtccttcccctccccgatcttaaggtgtgttttctagaaaagttccctaatggaattcatgagtttgggggtctcagtcacccgcttgcctgtaggattccatttgatgattctggatttttgctgtttgttattgcccttagaggggctctgagtatctacttgtgggtggccatttcctgacatctgcatgtacctcgtggaattcagccagcttcatgttgcaaatcagaaagctgaccccaagactgcaaatcaatgaaggtattggcattgttaaggacgtagcgtagacaacagcagtcataaataattaggcaggaacttaacccaaatctagttctttgaccacctctaccaccagaacccagcagacactcacatctcctgataagagttgctggactcgatgtttttgttttgcattttctcctctccttccccacttactcagagaatttaaagtctgtagagtcagcacagccccatcagtccaggaacttcccaccaccagcccttgactgtcccattaactgacatggtcagatttccagctccccctactccctgctgtgaaacaatccctctccctgtgagaggaaactgtggagcgtttcttatcgaaggttaaatggactctgctcataaacctcttactgagatgcttcctgatagccaggctggccagagaggggtgcaggggttagatagtaagtggtggtcgtttgtggtcagttacctcaattctgttcattgcagtgcccgtaaaccatgtagaaagctcccagcactgaaaggcaggagtgttagcatctcgctttatccaccataacgtaaagaactgcggtgtgataacagccttcacggggccacggtggaaccaagacagcaggcgaggccatgcctaaacaagtggtctggcacgggcactggccagctgctctctccaagcaggtggcccagatcccacccacgtggactttctcatcaggtgcagcgcctgccactctcagccactgggtgtgtgactctcctcttcatctcagcattctccatcacttcccctccagaaaaacggatggaaggaagccctctgtgacactgcttctgagaagaagcatttccgggaccgatatcatctgtctggtctctgtgaacagcaaggaatcttcttgaccgttcttgggcactggaggctggctaggagttcagtaataaacgtggccttcgtgctgtagggcagagtggatgcagtttgtagctttcagagtgtctcattgagtctagatcattgaaccaacacttaaccaaatgtcccactcccatcacactaggacttgtcattccatgcccctctcctagtggtcatggtttcatatgggcatacaactgctactgaagttatatagccttgaaaactcagtgcaggttgcccttaattttccccaaacccctccatcggcaagtctagttgccctttagcacctaaagatctgcaccccaaaccaatgtcaccataaagagggcacgaagaagagtgggtgtgatcccaacggggttttgtaactgaagaagcccagtgtgagcttctcatcttttcatatacctctaacccccggtactcattgaatcattgatgaggtatctcaattgagatttgcaaggactttgataccatttgaaatggaaaaattttgaacgggctttaacatgtttaagaaatatggatggggccggccacagtggctcacgcctgtaatcccagaactctggaaggctgaggcaggcggatcacctgagatcaggagttcgaggccagcctggccaagatggcaaaaaccccgactctactaaaaatacaaaattagccaggcgtggtggcgtacgcctgtaatcccagctactcaggaggcaggagaatcgcttgagcctgggaggcagaggctgcggtgagccgagatcgtgtcactgcactccagcctgggtgacagagactccatttaaaaaaaaaaaaaaaaaatatatatatatatatatatatatatatatggatgggaatcaccaaattcatctcagctctaaccttttaacctttgtccttgcactttacaatctaaagatctacctgtggctctcagacttcctcacacttgggttttagaaataacttgtaaagcagactggacccaaggccgccttcagtgtcaagaagggcattgtgacttgcccctcaatttctgtccattgaagtctggttttccatgaggaacttgcgggctcacccacccccagagtgagagaagaggaaggcgaagtcatcacagacacggtcttagccacctgctgaactaatccctccgctattgagggtcagggttgtgaggcaaccatcatgtgtcaccccaaaatataaatgtttctgagccgcccatccactggcatttggatttgctgccagagtcctgttcctcccagaaccatcccgccctcctgttgaccatgttacttgagtgtaggcccggtgtcaagaccctcagagtctttgaggaaagagccaagcagagaagaccgctgcgtggagtgtgacaccacatggcatttctcaagcccagcggaccctgtgtcagcaaataccagtaatttaacatctgctcctggcctcctcttcacctgcctgggttcggaactgaggaggaaggatgagaagagactgcaatgcagcaggcaccctctgcagagtgaggccgcccgtccatcactgccagccctgggctgctcaggaggggacgtgaaccactcaaaggaatgtcttaaagaggatctggagtttcccccatgcaaattagggaagaattaggcaagaaaagacatacattacagggaaatccttctgaacaaaatggctgtcttcacctactcttcttgcaagaaaagacatacattacagggaaatccttctgaacaaaatggctatcttcacctactcttcagcaaaaaccgtctccagactttttagtgtcaaaaatgtaaccaactgtctcctgattttttccaatgtgtttggcaagtgctgtggccctgttgtaggtacttctcctgactcttgggggagaagtggttttagggattgatttgggggagcgggtttttgtcccatcccacctcctctcttctttctctgcttgtcgatattgtctgtgtgattcagagaattggggcagttacattgtgtctgttgttgagattattaaaagattaaaacgtagttgtagaaatgaaaaattaaacagctgtgttttaaaaatgcaaaccaatatcttgttaataaaggaattcaagctatggggcagccacactcccctcctcccaggctggcataggtggccctgggctggcggcttaggaagcatggagcacacttagggtagtgcctgcctgggcaagagacacctgccgagcaaaaggaacgagaatctggggctcagagcctcgcagttgtgccaggattttcctatacatgttcaggacctctgggtagaggtttcacagtttgtgaccccataaccaccctcacccgacgtgggttctagctcagtgtgcctaatactgcatggtaacctgggcttgaccctgaagcccctgcctggcaggccacaggacctctcctgcccacttggtgctatctcttccagtgaccacccagcacgggtgagcactggccagcctggagcctgcaatccaggtggaacagactgtcctccatgtcagttccttctggcttcaggccctcaattatttccctttgagcttttttagaccccagatctcctaggcccaggctctctcttgaccccagagaagccactgtcaggaaaggaagtgaaccctactgaagccagagaattcaccccggccaaagcaggccctctgggtccagcccctcattccacaccacaccagtattgcatccatctactgcagctacacatcctgagggcagcaccacccactctggcctgctggcccatcgcaggactagcccaggcacctgccgggcattgcaggatatccagtggggcctgtgactgctccctgatgcgtcagaagagaagtgttgcactttagtggaggagctgaggagcacctgcccccttgtagcttgagttccttttggtaacagtagcagcctccatggtggtgtctgggatgcacgtgcacccgctgccttcaggtgtatgtgtgtgttcctgctggagttgtgttactgacaggataatgacattacaaagaaattgtgttatattcaactttgccttgataattattgtaaacactttgttcattttttcttttttattcacaaactaaatccaccaggaaattataaagttatttaaaaaccgtgctgtgtccttctttgagtgtcacccagctgatcatccaggcaaggtgtgtccccaaatgctagaaaagatggacaaggtctgcagtgcccaagaggccaactccaatggcaggcagcccgagggccaggggtcccaggatttacggtgggtgtgggagtcatcacagccctgacgggcatgagcctcctttcccttcccgcctgatctccgggtttgcagcttttaaagtcaattcccggttccctttttccttctttctaccctcagccccgggccaggttatccgtatcaggtctcactgttccagagcttagagtaggtgcccagcgctgagggatggtgctgctgttgtaccaaggtagaagagccagaagggcggccaccaagggagggctttgcccaggactgggactcaagcttcagcagggcgcgttctgatgcactgactctggggcgtgcaggctgggtcaacagaaagtgtgtgtgccaagagtaaaaggagccgagaaaccctgtgcttggacgcggctgtcatttccagctttgggatttgtcttgggctttatgctcaataagaaattattctggaggatttcttttatgagaattacttttctgcttagccacacttctgtgtctgcccgagagaggaatcaagccagcttgctgcattccttccctctcccgtgtaaattctgccacacgctgggtgttggctcttgggaattgtagcaagagagtccaaactcgttcttcccggtcggccctcccagtgcccaggtcccaccctggcctcgctctctgcagccacagcagctgttgggaagctctgccaggggagacgtgcccgggagacagggcgctgtggacacggctgcagggctgaggttgcttgtactttcatcatatgaagcaggaacaattttactagccgagcatgtattattctgcacaatataaaatcacaaccacaagcaaatgtgtccacagaaagctgtcagattacactggtcagctgtttccaaggtttcccattcatcttttttactatttattcaccctgcattctaccagtgcccagttgcaggcaagtggacaccgacaatagatttaaagaaaatatgtgaaaacttttaagaattccatccattaattttttttcggaactgagagaagataactagtactttatttttgaggtggaatatctcaggctggctcaaaaatgattaggagctacttagggactgggtgctgtagctgaaacctttaatcccaacactttgggaggccaaggtgggaagatcacttgaggcgaggagttcgagaccagcctggacaacatagtgagacctctctcgttacaataaattaaaaatttagcagggcatggtggcatgtgcctatagtcccagctgctttggaggctgaggcaagaggatgacttgagcccaggagatggaggctgcagtgagctgcagtgatcacaccactgcactccagcctagaggtgcagagagaaaccctgtctcaaaaaaaataaataggctctggggctggggggaagctggtgtgaggtttgtgagccttcccaggtgtcctggaaagggcccagactcgcagactgcagccctgggctgccgcttgacctcccagcctcttcttcacctctgaaagaatgcctccttcatccctgtccccagcctaggtcataatgaaggtgccgtaggataatctttttcctttttgaaattttctttacagagcataaattgctttcttaacatctgcgattcacttaaaaataatcaagcatgtctgtcggggaggagcgagggcgtggagacaaaagatgggccagaggtcggtaattatgaagctggggaactgcgtgcatggggtttgtaagtccattctccttattcttgtgtttgaatgtttcctgaatcagttaaatattcacatccttcaactgtacttgcccatacaggcctcttcctccgaagatccaagcactctgcattcacaaagggccaccgtagcgctccgttcagaatttgtacttccctgtgttctagactccaggctacaaataataaaagctagtgacatgtggaccacctgccagcttcagttctgagcactgcacaggtttggtgtcggttcaccttcacagcagtcctacaaggtgggtactgttatcccactttacaggagaggcacaaagtggacgcacgaccttcccagcgccacacagcatgttagtggtgagactggaattcacacccgactctgtctccagagtgtgtgttcttcagcccactgctgtggccacctcccggggaggacagtctgctggggacagctaagcccagtgaagtgcagtggggcacgagagcaggcagtgctcgtcacacaacttcaacaggtggattttgccggaaaagggggtgaagggaagccaaaaagacagatgagcaagaccagggaggtaggaaagtacgaggagggcacttgggacagcaagtggccagtgtggacagaggacatgcgtactgcctggcttcagagcgacgaggcgcggccgtggccgcaggtgcagcatgaaaggggatccccagtgccctaggaaggaggccagcttgggagacacgatctcacagccccagtggtcccgacccctccccagctaccgacgaagaaaagcctccccaggggctgatataaaaaagcaaaggaaacacccctgggcacatgcattctggagctgccagcgtgtgacctgagggaggctccccaggccacgtgcagagaagctacatgaggggactctgctttcctaagggaaggaggatgttcttattgatacattgagagacacatctggctctgtcacccaggctggagtgtagcactgcaatcatagctcactgcagcctcgacctcctgggctcaagtgatcctcctgcctcagcctcctgaggagctgggataacaggtgtgtgccaccacgcccaactaattttttaaactcttgtagagatgaggtctcactatgttgcccagactggtcttgaatcctgagctcaggcaatcttccctcctcagcctccctaagtgctgggatataggtgttagccaaagcaccagctgacatgggacattgtttttaccgcatccaggcaggtgggccctttagaaagggcatcactcaatcttcagttactcaacatgaggtctgtattttgcctcccttcacctgcttttctggcagagaaactagaaatgaaagattaagttgccctgagttatacagcaacttaactggacctgggttcagaatgggtccatcgctgccaaacctttctctggccccagactccctgacagcctcagaggggttgaggcatcagggccacactgtggctgggggtttcagaggaaagaggaaaataacatgcgtggcttggtcaccattacggtggatgtgagtcacgtcaggatttcaggctccgtttggctctgggcagttgatttcctgggaatgaggcgatgaagccctatgaatgttctctcctccaggccctcaatgggacaggaatgaggtttgcagcttggtagtgccactccagccctccctgtccacagggaccattcctttgccgtgtcgtctggggaagaagccatcccctgccataggcaatggcttacagggtgacctgggacatccgtgccttcggctgggttcagccgtgaagcactcttcttcccaactcctcctgctgctcccagcgtgcgacattcatctttcccttcccaagttaacgctcagttctgtcttggccgccttggcaccttcccggcccctcagtctcggtctccacagcacttggtcggctcagccttgttcgtgcgagtcaagaacttgagccgcgctgctctgaagagggagagtcagatgtgggcaaaaaaagtgcatcgaatgtctgagaaacttccataacaaaaagccatctctggcatctgaaagaattcacgctcgaaagatggttcctgcttggtttgtcttgggcttacacttttttattactatgattttattcttcagggttgtgggaatctgcatcttgacttggacctggcccgtgtgcaggatgtaatgggctgatgtgcctggactcctccctctgcatttgtgcagtgctcccgtgccgggaacacaacccaggaacaaggacttccgtgcgacggtgccccggccaccaccacgcctcccgcagcagccaggcccgggccttgaggtcagcagtaaaccccaggacacaggcagtgaccctagacgagcagggcaggtccaggtgacgggaggcgtgccacgtttctccatcccgaagttcttcttggtttttatcctaagtactgatgtcaggatgactcggcagctttgacgagccatctggccctttaggcaggaagccagttggccttcctcctcccactgtcccgcctgggcactcccatggggctggctgcagggggactgaccttctcaggggaggctgcctccggcttcaccgctcctccccgagcacagcctttgtggggcctacggggcagtaggagacaggacgcttgtcctgcggaatggcaaggaatcagctctccatttcagggcaaagtggggcctggattgtgggccttgaacatgaaggcaggtgggcgagggactaggggaccgcgtgaggcccgacgtgcacacggcagggcccggcacccatggttgcgttcggtcggccttggccggctggctcctgcttggaaacttgctgggtggtgtctgcggtaagtcggtggcattattcccaggggctgtgaggaaaccctcatatcgtttgtcctaaagcctaggatcttggaaacaggaccatcacccttatagaggtcatccccctctgaccagaccctattccaaggccatttcctgcgtctaaaatcctccgtgggtgtagaaaccagctagagatgggagcactgaggcctgcaatgggagctctcctggagacgtgagggcgttgccggcctcttcacgctacccctgctccaagaccacctccagccctcacagaggcctctgggcctgccctcctgagaggccactccgggcagggctgtggtgcccaccccatccccaagaggtcagataccaacaatcagattgtttctgcttgaggagggaaaaaaagcccagatgccaatccaccagcctcatcatctggggccgcgtcatcctcctgcagggatggtctctttttatttttatttttatttttttattttcttttttattttttatttatttttaatcttttttttttttgagatggagtctcgttctgtcacccaggctggagtgcagtggcacaacctcagctcactgcaacctccgccttccgggttcaagctattctcctgctccagcctcccgagtagctgggattacaggtgcctgcggccacgcccagctaattttttgtatttttagtagagacggggtttcaccatgttggtcaggctgatgtcgagctcctgacttcaggtgatccatccacttcggcctcccaaagtgctgggattacaggcgtgagcaacagcacctggctgggatgttctcttgaatgagagctttgtctgccctgcctgtcagtcactgtgacaaaggggacccaggcagactggagcccaacattggatcctttgccaggatgtcacgtcatggggttcaagccgcagcatgcaagccatccctggctccggtatctctgaactctcctacatggactaaatgtcacaaaagccccttgaagagtccccaggcaacctccgcggtgagagagcacttagatctccattgcctcccacccaaaacaggagcctgctttccttctcctgtcccctcactgactgcaagccccttgagggcagggcatgtgtctgttcctgcttttgggtcccctgcagacccagtcaagcatgcctgtgcacacactgaccttgccaagtgatcagcgctgatctgatgacttgcaggcttcccagggcttcgtcttccaggaccttcttttctgcagctggcacagttctagcccacgtcattggagatgtgtcgggcctgaaaatattagcctggacatccgttacgaccccagctttccctgtgggcgggacaggtcagagcaagcctgcgcggtggctacctgatgtcaaggggaatcccacttgctgcctctgcggaattccttgtttccaggccagggtccaggacagcagggtctgccgcagccttagctgccttggtgccgggcctgactgcatctccagtgcaagcagccaggagggagggaagcagctgtgtgaggatccgaccacggcctcctctcctctcctcgctcccctatgctgaaatctccacacaggtcctctggtgcgcttcgaacttgtatttcctcccaggggcacacaagaggcctgataagtctccttctttacttccagggaaacagtactgagtctggtgaggaggcaaacgctcagaatctactgcaggtgttagttctgcagaggagtcttcctgcttaagggctcatttgatgttctggaaatttgccaggtactgaaatacagccagtcttcccaaagattcctccgctcctctgagtgcacgtgtgtgtgtgtgtgtgtgtgtgtgtgtgtgtacagccacacaacctgactctgtgttcacacacacgggccctggccaagtgtgagggtctccacgtgacaaaggaaatgagtaaacaacttcaacattgttgtttccctctgaggcttgcaaagaaggtgttaagagcacaagatttaaatcataaactttattaaaagccaaacagcccaatgtgcgattcttgccaacttggacagagtctttggggtaatgctacacggagctaatccagaaggaatcgagtggaggaagacggcagggtgggggtgagcccacgcgtccagccaggagaggcagagggaggcacagccccgacacagccacccaccctgtggccagagcagggtggcgcaggagctggcaagacctctaagctgttcctgcttctgctctcctcacactgtttccttagcaaatggagcctccttcacgcctaaagggcccagagcaaggcagggggaggagggccgacccctgcaagactgagaactggccagaattgcccacttgctagactagcaagagagcgaagtcccagtgggtacccccgacgaaggacacccgttccttaccccccacccagaggcacccttcctcctccaaacacaagatgctgctccagcaggggcagggaccatgtcagcctcccacaagacacacacgggaaagccctgcttgtgagggcgccacacccagggcaggaatcagaatgaagacacgactccacagtgagcacggggctcgggacaggacccagcgtggcagaccagccagagaagctttcacactgcaaacagcccgctccacctacaccccgactgggctccacgact

SEQ ID NO: 888 - DNA, 6037 bp, Homo sapiens
cggcggcggcggtagtggcggcggcggcggtgcctgggcggcagcagcagcagtagcggcagccctgaggacggtgagacggccgcggcggcggcgacagcgcggaagtcgcgcgggacccagagcttcccccctgtcgctagtgctgaggctttcgcctttcctacccagcttcttgctcacggcccgggctgggctgggcagggcaacgcgcccccgggcaggggcggagctgtagatatggtgtaagatacttcttcaagattggacagctggggaccttcttctgattaaccttaaaccaacttgtagccatagagacacctcacaaggttcccatttttgttgttgttgttgttgattttctgctcacacctttcctgaccttgcaaccatgtatggaagtgcccgctctgttgggaaggtggagccgagcagccagagccctgggcgttcacccaggcttccacgttcccctcgcttgggtcaccgtcgaaccaacagtacgggagggagttcgggaagcagtgttggaggtggcagtgggaaaaccctttcaatggaaaatatacaatctttaaatgctgcctatgccacctctggccctatgtatctaagtgaccatgaaaatgtgggttcagaaacacctaaaagcaccatgacacttggccgttctgggggacgtctgccttacggtgttcggatgactgctatgggtagtagccccaatatagctagcagtggggttgctagtgacaccatagcatttggagagcatcacctccctcctgtgagtatggcatccactgtacctcactcccttcgtcaggcgagagataacacaatcatggatctgcagacacagctgaaggaagtattaagagaaaatgatctcttgcggaaggatgtggaagtaaaggagagcaaattgagttcttcaatgaatagcatcaagaccttctggagcccagagctgaagaaggaacgagccctgagaaaagatgaagcttccaaaatcaccatttggaaggaacagtacagagttgtacaggaggaaaaccagcacatgcagatgacaatccaggctctccaggatgaattgcggatccagagggacctgaatcagctgtttcagcaggatagtagcagcaggactggcgaaccttgtgtagcagagctgacagaggagaactttcagaggcttcatgctgagcatgagcggcaggccaaagagctgtttcttcttcgaaagacattggaggaaatggagctgcgtattgagactcaaaagcagaccctaaatgctcgggatgaatccattaagaagcttctggaaatgttgcagagcaaaggactttctgccaaggctaccgaggaagaccatgagagaacaagacgactggcagaggcagagatgcacgttcatcacctagaaagccttttggagcagaaggaaaaagagaacagtatgttgagagaggagatgcatcgaaggtttgagaatgctcctgattctgccaaaacaaaagctctgcaaactgttattgagatgaaggattcaaaaatttcctctatggagcgtgggcttcgagacctggaagaggaaattcagatgctgaaatcgaatggtgctttgagtactgaggaaagggaagaagaaatgaagcaaatggaagtgtatcggagccattctaaatttatgaaaaataagattggccaggtgaaacaggagctgtccagaaaggacacagaactactcgccctgcagacaaagctagaaacactcacaaaccagttctcagatagtaaacagcacattgaagtgttgaaggagtccttgactgctaaggagcagagggctgccatcctgcagactgaggtggatgctctccgattgcgtttggaagagaaggaaaccatgttgaataaaaagacaaaacaaattcaggatatggctgaagagaaggggacacaagctggagagatacatgacctcaaggacatgttggatgtgaaggagcggaaggttaatgttcttcagaagaagattgaaaatcttcaagagcagcttagagacaaggaaaagcagatgagcagcttgaaagaacgggtcaaatccttgcaggctgacaccaccaacactgacactgccttgacaactttggaggaggcccttgcagagaaagagcggacaattgaacgcttaaaggagcagagggacagagatgagcgagagaagcaagaggaaattgataactacaaaaaagatcttaaagacttgaaggaaaaagtcagcctgttgcaaggcgacctttcagagaaagaggcttcacttttggatctgaaagagcatgcttcttctctggcatcctcaggactgaaaaaggactcacggcttaagacactagagattgctttggagcagaagaaggaggagtgtctgaaaatggaatcacaattgaaaaaggcacatgaggcagcattggaagccagagccagtccagagatgagtgaccgaatacagcacttggagagagagatcaccaggtacaaagatgaatctagcaaggcccaggcagaagttgatcgactcttagaaatcttgaaggaggtggaaaatgagaagaatgacaaagataagaagatagctgagttggaaaggcaagtgaaagaccagaataagaaggtagcaaatctgaagcacaaggaacaggtggaaaaaaagaagagtgcacaaatgttagaggaggcgcgacgacgggaggacaatctcaacgacagctctcagcagctacaggacagtctccgtaagaaggatgacaggattgaagagctggaagaagcactaagagaaagtgtacagataactgcagagcgggaaatggtgctagcacaagaggaatcagccaggaccaatgctgaaaaacaggtggaggagttactgatggccatggagaaggtaaagcaggaactagaatccatgaaagcaaagctgtcctccacccagcagtctctggcagaaaaggaaactcacttgactaatcttcgggcagagagaaggaaacacttagaggaagttctggagatgaagcaagaagctcttctggctgccattagtgaaaaagacgccaatatagctctcttggagctttcgtcctctaagaagaagacccaagaggaagtggctgccctgaagcgggagaaggatcgtctggtacagcagcttaagcagcagacgcaaaatcgaatgaagctaatggccgacaactacgaggatgaccacttcaaatcctcccattccaatcaaacaaatcacaagccctccccagaccagatcatccagcccctcttagaacttgaccaaaatagaagtaaattaaagttgtacattggacacctgacaaccctctgccatgaccgagaccccctgatcctccgtggactcactccaccagcttcctataacttggacgatgaccaggcggcttgggagaatgagctgcagaagatgacccgggggcagcttcaggatgagttagagaaaggtgaacgggacaatgcagaactgcaggagtttgccaacgccattcttcagcagatagcagaccattgtcccgacatcctagagcaagtggtcaacgccctggaagagtcctcttgaccctgctttatggggaagcctgaggtagtcaacccaggagccaagaaaagagaactacgaggaacaggtgcccggaaccttcttggcaccaaacactacaaacttcatcccaacttgctcacttgaagaagtgtgattccagcaccgtttctacatctgccatcttactctgcctttctgctttggatgtggtctctacactaaccttcttgatgtccagggtagataaagggtcgaatctctctgaagaactgccacctggtcatcagcagtggagaactgtgggagctggtggctctgccctgacagagagccatggagcagaggagcctctcacctcctgtcctctgacatgagaatgaaaccaggaatggacttggagttcaacaggctgagaggatgcctccaatggaccagagagctgagtgttctaatatcacaataggtgctttctcctaaaagggcaaaaaacaatctcaaaaagattagaaaaagagaaggggggaagggaagagaaaatcgactcttctttttactgtctcttctgcttactttccacatgagatgctttgtaccggggagctgtgagcaggcctcacgatggcttgggagcactcgttctcccaaggtctgagtcttcatccagccctgcctgtctgtcgcagccttcctcactctgttcctcggccagttaacaagaagatggtgtgaggtgttctccaccagtctctcctgtttgagactgttgacgttatcatactgaggtgttagatcaaatatctctaattgaagaacatgtgaggttgaaagagcaccagccagggcaacatagcgcgaccctgtctctacaaaaaattaaaaagagaacatacaaagttgacatatgagaccctgttgtccccgcctgcagctttgccccagtaacagatgcccgttgctcttgggctggtttcccctgaacacctccaagaggctgcctgccttgccagcacccgtgtcctgagctcctgcagcccagtggctgctgaagttgtgatccctcactcaccctgctagctttgcccttgactcgtcttctctgaacctcagcctcgtgcattgcctggaaccttcttctagcataaatgaaggtttttcctcctacacacattccttcctcggttatttcattcagagaatatttatgaaatgcctactgtgtgcaagtcatccatccttgaaaaggccacttctcagtgagggagagatgtagtggattctgtgagacatacctgctggagttgaagcagtaaatagcatgtccttcccctccccgatcttaaggtgtgttttctagaaaagttccctaatggaattcatgagtttgggggtctcagtcacccgcttgcctgtaggattccatttgatgattctggatttttgctgtttgttattgcccttagaggggctctgagtatctacttgtgggtggccatttcctgacatctgcatgtacctcgtggaattcagccagcttcatgttgcaaatcagaaagctgaccccaagactgcaaatcaatgaaggtattggcattgttaaggacgtagcgtagacaacagcagtcataaataattaggcaggaacttaacccaaatctagttctttgaccacctctaccaccagaacccagcagacactcacatctcctgataagagttgctggactcgatgtttttgttttgcattttctcctctccttccccacttactcagagaatttaaagtctgtagagtcagcacagccccatcagtccaggaacttcccaccaccagcccttgactgtcccattaactgacatggtcagatttccagctccccctactccctgctgtgaaacaatccctctccctgtgagaggaaactgtggagcgtttcttatcgaaggttaaatggactctgctcataaacctcttactgagatgcttcctgatagccaggctggccagagaggggtgcaggggttagatagtaagtggtgctcaattgagatttgcaaggactttgataccatttgaaatggaaaaattttgaacgggctttaacatgtttaagaaatatggatggggccggccacagtggctcacgcctgtaatcccagaactctggaaggctgaggcaggcggatcacctgagatcaggagttcgaggccagcctggccaagatggcaaaaaccccgactctactaaaaatacaaaattagccaggcgtggtggcgtacgcctgtaatcccagctactcaggaggcaggagaatcgcttgagcctgggaggcagaggctgcggtgagccgagatcgtgtcactgcactccagcctgggtgacagagactccattt

SEQ ID NO: 889 - protein, 1082 aa, Homo sapiens
MYGSARSVGKVEPSSQSPGRSPRLPRSPRLGHRRTNSTGGSSGSSVGGGSGKTLSMENIQSLNAAYATSGPMYLSDHENVGSETPKSTMTLGRSGGRLPYGVRMTAMGSSPNIASSGVASDTIAFGEHHLPPVSMASTVPHSLRQARDNTIMDLQTQLKEVLRENDLLRKDVEVKESKLSSSMNSIKTFWSPELKKERALRKDEASKITIWKEQYRVVQEENQHMQMTIQALQDELRIQRDLNQLFQQDSSSRTGEPCVAELTEENFQRLHAEHERQAKELFLLRKTLEEMELRIETQKQTLNARDESIKKLLEMLQSKGLSAKATEEDHERTRRLAEAEMHVHHLESLLEQKEKENSMLREEMHRRFENAPDSAKTKALQTVIEMKDSKISSMERGLRDLEEEIQMLKSNGALSTEEREEEMKQMEVYRSHSKFMKNKIGQVKQELSRKDTELLALQTKLETLTNQFSDSKQHIEVLKESLTAKEQRAAILQTEVDALRLRLEEKETMLNKKTKQIQDMAEEKGTQAGEIHDLKDMLDVKERKVNVLQKKIENLQEQLRDKEKQMSSLKERVKSLQADTTNTDTALTTLEEAEKERTIERLKEQRDRDEREKQEEIDNYKKDLKDLKEKVSLLQGDLSEKEASLLDLKEHASSLASSGLKKDSRLKTLEIALEQKKEECLKMESQLKKAHEAALEARDEMSDRIQHLEREITRYKDESSKAQAEVDRLLEILKEVENEKNDKDKKIAELERQVKDQNKKVANLKHKEQVEKKKSAQMLEEARRREDNLNDSSQQLQDSLRKKDDRIEELEEALRESVQITAEREMVLAQEESARTNAEKQVEELLMAMEKVKQELESMKAKLSSTQQSLAEKETHLTNLRAERRKHLEEVLEMKQEALLAAISEKDANIALLELSSSKKKTQEEVAALKREKDRLVQQLKQQTQNRMKLMADNYEDDHFKSSHSNQTNHKPSPDQIIQPLLELDQNRSKLKLYIGHLTTLCHDRDPLILRGLTPPASYNLDDDQAAWENELQKMTRGQLQDELEKGERDNAELQEFANAILQQIADHCPDIQVVNALEESS

SEQ ID NO: 890 - DNA, 6827 bp, Homo sapiens
cggcggcggcggtagtggcggcggcggcggtgcctgggcggcagcagcagcagtagcggcagccctgaggacggtgagacggccgcggcggcggcgacagcgcggaagtcgcgcgggacccagagcttcccccctgtcgctagtgctgaggctttcgcctttcctacccagcttcttgctcacggcccgggctgggctgggcagggcaacgcgcccccgggcaggggcggagctgtagatatggtgtaagatacttcttcaagattggacagctggggaccttcttctgattaaccttaaaccaacttgtagccatagagacacctcacaaggttcccatttttgttgttgttgttgttgattttctgctcacacctttcctgaccttgcaaccatgtatggaagtgcccgctctgttgggaaggtggagccgagcagccagagccctgggcgttcacccaggcttccacgttcccctcgcttgggtcaccgtcgaaccaacagtacgggagggagttcgggaagcagtgttggaggtggcagtgggaaaaccctttcaatggaaaatatacaatctttaaatgctgcctatgccacctctggccctatgtatctaagtgaccatgaaaatgtgggttcagaaacacctaaaagcaccatgacacttggccgttctgggggacgtctgccttacggtgttcggatgactgctatgggtagtagccccaatatagctagcagtggggttgctagtgacaccatagcatttggagagcatcacctccctcctgtgagtatggcatccactgtacctcactcccttcgtcaggcgagagataacacaatcatggatctgcagacacagctgaaggaagtattaagagaaaatgatctcttgcggaaggatgtggaagtaaaggagagcaaattgagttcttcaatgaatagcatcaagaccttctggagcccagagctgaagaaggaacgagccctgagaaaagatgaagcttccaaaatcaccatttggaaggaacagtacagagttgtacaggaggaaaaccagcacatgcagatgacaatccaggctctccaggatgaattgcggatccagagggacctgaatcagctgtttcagcaggatagtagcagcaggactggcgaaccttgtgtagcagagctgacagaggagaactttcagaggcttcatgctgagcatgagcggcaggccaaagagctgtttcttcttcgaaagacattggaggaaatggagctgcgtattgagactcaaaagcagaccctaaatgctcgggatgaatccattaagaagcttctggaaatgttgcagagcaaaggactttctgccaaggctaccgaggaagaccatgagagaacaagacgactggcagaggcagagatgcacgttcatcacctagaaagccttttggagcagaaggaaaaagagaacagtatgttgagagaggagatgcatcgaaggtttgagaatgctcctgattctgccaaaacaaaagctctgcaaactgttattgagatgaaggattcaaaaatttcctctatggagcgtgggcttcgagacctggaagaggaaattcagatgctgaaatcgaatggtgctttgagtactgaggaaagggaagaagaaatgaagcaaatggaagtgtatcggagccattctaaatttatgaaaaataagattggccaggtgaaacaggagctgtccagaaaggacacagaactactcgccctgcagacaaagctagaaacactcacaaaccagttctcagatagtaaacagcacattgaagtgttgaaggagtccttgactgctaaggagcagagggctgccatcctgcagactgaggtggatgctctccgattgcgtttggaagagaaggaaaccatgttgaataaaaagacaaaacaaattcaggatatggctgaagagaaggggacacaagctggagagatacatgacctcaaggacatgttggatgtgaaggagcggaaggttaatgttcttcagaagaagattgaaaatcttcaagagcagcttagagacaaggaaaagcagatgagcagcttgaaagaacgggtcaaatccttgcaggctgacaccaccaacactgacactgccttgacaactttggaggaggcccttgcagagaaagagcggacaattgaacgcttaaaggagcagagggacagagatgagcgagagaagcaagaggaaattgataactacaaaaaagatcttaaagacttgaaggaaaaagtcagcctgttgcaaggcgacctttcagagaaagaggcttcacttttggatctgaaagagcatgcttcttctctggcatcctcaggactgaaaaaggactcacggcttaagacactagagattgctttggagcagaagaaggaggagtgtctgaaaatggaatcacaattgaaaaaggcacatgaggcagcattggaagccagagccagtccagagatgagtgaccgaatacagcacttggagagagagatcaccaggtacaaagatgaatctagcaaggcccaggcagaagttgatcgactcttagaaatcttgaaggaggtggaaaatgagaagaatgacaaagataagaagatagctgagttggaaaggcaagtgaaagaccagaataagaaggtagcaaatctgaagcacaaggaacaggtggaaaaaaagaagagtgcacaaatgttagaggaggcgcgacgacgggaggacaatctcaacgacagctctcagcagctacaggtggaggagttactgatggccatggagaaggtaaagcaggaactagaatccatgaaagcaaagctgtcctccacccagcagtctctggcagaaaaggaaactcacttgactaatcttcgggcagagagaaggaaacacttagaggaagttctggagatgaagcaagaagctcttctggctgccattagtgaaaaagacgccaatatagctctcttggagctttcgtcctctaagaagaagacccaagaggaagtggctgccctgaagcgggagaaggatcgtctggtacagcagcttaagcagcagacgcaaaatcgaatgaagctaatggccgacaactacgaggatgaccacttcaaatcctcccattccaatcaaacaaatcacaagccctccccagaccagatcatccagcccctcttagaacttgaccaaaatagaagtaaattaaagttgtacattggacacctgacaaccctctgccatgaccgagaccccctgatcctccgtggactcactccaccagcttcctataacttggacgatgaccaggcggcttgggagaatgagctgcagaagatgacccgggggcagcttcaggatgagttagagaaaggtgaacgggacaatgcagaactgcaggagtttgccaacgccattcttcagcagatagcagaccattgtcccgacatcctagagcaagtggtcaacgccctggaagagtcctcttgaccctgctttatggggaagcctgaggtagtcaacccaggagccaagaaaagagaactacgaggaacaggtgcccggaaccttcttggcaccaaacactacaaacttcatcccaacttgctcacttgaagaagtgtgattccagcaccgtttctacatctgccatcttactctgcctttctgctttggatgtggtctctacactaaccttcttgatgtccagggtagataaagggtcgaatctctctgaagaactgccacctggtcatcagcagtggagaactgtgggagctggtggctctgccctgacagagagccatggagcagaggagcctctcacctcctgtcctctgacatgagaatgaaaccaggaatggacttggagttcaacaggctgagaggatgcctccaatggaccagagagctgagtgttctaatatcacaataggtgctttctcctaaaagggcaaaaaacaatctcaaaaagattagaaaaagagaaggggggaagggaagagaaaatcgactcttctttttactgtctcttctgcttactttccacatgagatgctttgtaccggggagctgtgagcaggcctcacgatggcttgggagcactcgttctcccaaggtctgagtcttcatccagccctgcctgtctgtcgcagccttcctcactctgttcctcggccagttaacaagaagatggtgtgaggtgttctccaccagtctctcctgtttgagactgttgacgttatcatactgaggtgttagatcaaatatctctaattgaagaacatgtgaggttgaaagagcaccagccagggcaacatagcgcgaccctgtctctacaaaaaattaaaaagagaacatacaaagttgacatatgagaccctgttgtccccgcctgcagctttgccccagtaacagatgcccgttgctcttgggctggtttcccctgaacacctccaagaggctgcctgccttgccagcacccgtgtcctgagctcctgcagcccagtggctgctgaagttgtgatccctcactcaccctgctagctttgcccttgactcgtcttctctgaacctcagcctcgtgcattgcctggaaccttcttctagcataaatgaaggtttttcctcctacacacattccttcctcggttatttcattcagagaatatttatgaaatgcctactgtgtgcaagtcatccatccttgaaaaggccacttctcagtgagggagagatgtagtggattctgtgagacatacctgctggagttgaagcagtaaatagcatgtccttcccctccccgatcttaaggtgtgttttctagaaaagttccctaatggaattcatgagtttgggggtctcagtcacccgcttgcctgtaggattccatttgatgattctggatttttgctgtttgttattgcccttagaggggctctgagtatctacttgtgggtggccatttcctgacatctgcatgtacctcgtggaattcagccagcttcatgttgcaaatcagaaagctgaccccaagactgcaaatcaatgaaggtattggcattgttaaggacgtagcgtagacaacagcagtcataaataattaggcaggaacttaacccaaatctagttctttgaccacctctaccaccagaacccagcagacactcacatctcctgataagagttgctggactcgatgtttttgttttgcattttctcctctccttccccacttactcagagaatttaaagtctgtagagtcagcacagccccatcagtccaggaacttcccaccaccagcccttgactgtcccattaactgacatggtcagatttccagctccccctactccctgctgtgaaacaatccctctccctgtgagaggaaactgtggagcgtttcttatcgaaggttaaatggactctgctcataaacctcttactgagatgcttcctgatagccaggctggccagagaggggtgcaggggttagatagtaagtggtggtcgtttgtggtcagttacctcaattctgttcattgcagtgcccgtaaaccatgtagaaagctcccagcactgaaaggcaggagtgttagcatctcgctttatccaccataacgtaaagaactgcggtgtgataacagccttcacggggccacggtggaaccaagacagcaggcgaggccatgcctaaacaagtggtctggcacgggcactggccagctgctctctccaagcaggtggcccagatcccacccacgtggactttctcatcaggtgcagcgcctgccactctcagccactgggtgtgtgactctcctcttcatctcagcattctccatcacttcccctccagaaaaacggatggaaggaagccctctgtgacactgcttctgagaagaagcatttccgggaccgatatcatctgtctggtctctgtgaacagcaaggaatcttcttgaccgttcttgggcactggaggctggctaggagttcagtaataaacgtggccttcgtgctgtagggcagagtggatgcagtttgtagctttcagagtgtctcattgagtctagatcattgaaccaacacttaaccaaatgtcccactcccatcacactaggacttgtcattccatgcccctctcctagtggtcatggtttcatatgggcatacaactgctactgaagttatatagccttgaaaactcagtgcaggttgcccttaattttccccaaacccctccatcggcaagtctagttgccctttagcacctaaagatctgcaccccaaaccaatgtcaccataaagagggcacgaagaagagtgggtgtgatcccaacggggttttgtaactgaagaagcccagtgtgagcttctcatcttttcatatacctctaacccccggtactcattgaatcattgatgaggtatctcaattgagatttgcaaggactttgataccatttgaaatggaaaaattttgaacgggctttaacatgtttaagaaatatggatggggccggccacagtggctcacgcctgtaatcccagaactctggaaggctgaggcaggcggatcacctgagatcaggagttcgaggccagcctggccaagatggcaaaaaccccgactctactaaaaatacaaaattagccaggcgtggtggcgtacgcctgtaatcccagctactcaggaggcaggagaatcgcttgagcctgggaggcagaggctgcggtgagccgagatcgtgtcactgcactccagcctgggtgacagagactcca

SEQ ID NO: 891 - protein, 1038 aa, Homo sapiens
MYGSARSVGKVEPSSQSPGRSPRLPRSPRLGHRRTNSTGGSSGSSVGGGSGKTLSMENIQSLNAAYATSGPMYLSDHENVGSETPKSTMTLGRSGGRLPYGVRMTAMGSSPNIASSGVASDTIAFGEHHLPPVSMASTVPHSLRQARDNTIMDLQTQLKEVLRENDLLRKDVEVKESKLSSSMNSIKTFWSPELKKERALRKDEASKITIWKEQYRVVQEENQHMQMTIQALQDELRIQRDLNQLFQQDSSSRTGEPCVAELTEENFQRLHAEHERQAKELFLLRKTLEEMELRIETQKQTLNARDESIKKLLEMLQSKGLSAKATEEDHERTRRLAEAEMHVHHLESLLEQKEKENSMLREEMHRRFENAPDSAKTKALQTVIEMKDSKISSMERGLRDLEEEIQMLKSNGALSTEEREEEMKQMEVYRSHSKFMKNKIGQVKQELSRKDTELLALQTKLETLTNQFSDSKQHIEVLKESLTAKEQRAAILQTEVDALRLRLEEKETMLNKKTKQIQDMAEEKGTQAGEIHDLKDMLDVKERKVNVLQKKIENLQEQLRDKEKQMSSLKERVKSLQADTTNTDTALTTLEEAEKERTIERLKEQRDRDEREKQEEIDNYKKDLKDLKEKVSLLQGDLSEKEASLLDLKEHASSLASSGLKKDSRLKTLEIALEQKKEECLKMESQLKKAHEAALEARDEMSDRIQHLEREITRYKDESSKAQAEVDRLLEILKEVENEKNDKDKKIAELERQVKDQNKKVANLKHKEQVEKKKSAQMLEEARRREDNLNDSSQQLQVEELLMAMEKVKQELESMKAKLSSTQQSLAEKETHLTNLRAERRKHLEEVLEMKQEALLAAISEKDANIALLELSSSKKKTQEEVAALKREKDRLVQQLKQQTQNRMKLMADNYEDDHFKSSHSNQTNHKPSPDQIIQPLLELDQNRSKLKLYIGHLTTLCHDRDPLILRGLTPPASYNLDDDQAAWENELQKMTRGQLQDELEKGERDNAELQEFANAILQQIADHCPDIQVVNALEESS

SEQ ID NO: 892 - DNA, 6054 bp, Homo sapiens
cggcggcggcggtagtggcggcggcggcggtgcctgggcggcagcagcagcagtagcggcagccctgaggacggtgagacggccgcggcggcggcgacagcgcggaagtcgcgcgggacccagagcttcccccctgtcgctagtgctgaggctttcgcctttcctacccagcttcttgctcacggcccgggctgggctgggcagggcaacgcgcccccgggcaggggcggagctgtagatatggtgtaagatacttcttcaagattggacagctggggaccttcttctgattaaccttaaaccaacttgtagccatagagacacctcacaaggttcccatttttgttgttgttgttgttgattttctgctcacacctttcctgaccttgcaaccatgtatggaagtgcccgctctgttgggaaggtggagccgagcagccagagccctgggcgttcacccaggcttccacgttcccctcgcttgggtcaccgtcgaaccaacagtacgggagggagttcgggaagcagtgttggaggtggcagtgggaaaaccctttcaatggaaaatatacaatctttaaatgctgcctatgccacctctggccctatgtatctaagtgaccatgaaaatgtgggttcagaaacacctaaaagcaccatgacacttggccgttctgggggacgtctgccttacggtgttcggatgactgctatgggtagtagccccaatatagctagcagtggggttgctagtgacaccatagcatttggagagcatcacctccctcctgtgagtatggcatccactgtacctcactcccttcgtcaggcgagagataacacaatcatggatctgcagacacagctgaaggaagtattaagagaaaatgatctcttgcggaaggatgtggaagtaaaggagagcaaattgagttcttcaatgaatagcatcaagaccttctggagcccagagctgaagaaggaacgagccctgagaaaagatgaagcttccaaaatcaccatttggaaggaacagtacagagttgtacaggaggaaaaccagcacatgcagatgacaatccaggctctccaggatgaattgcggatccagagggacctgaatcagctgtttcagcaggatagtagcagcaggactggcgaaccttgtgtagcagagctgacagaggagaactttcagaggcttcatgctgagcatgagcggcaggccaaagagctgtttcttcttcgaaagacattggaggaaatggagctgcgtattgagactcaaaagcagaccctaaatgctcgggatgaatccattaagaagcttctggaaatgttgcagagcaaaggactttctgccaaggctaccgaggaagaccatgagagaacaagacgactggcagaggcagagatgcacgttcatcacctagaaagccttttggagcagaaggaaaaagagaacagtatgttgagagaggagatgcatcgaaggtttgagaatgctcctgattctgccaaaacaaaagctctgcaaactgttattgagatgaaggattcaaaaatttcctctatggagcgtgggcttcgagacctggaagaggaaattcagatgctgaaatcgaatggtgctttgagtactgaggaaagggaagaagaaatgaagcaaatggaagtgtatcggagccattctaaatttatgaaaaataaggtagaacaactgaaggaggaactaagttcgaaagaggctcaatgggaggagctgaaaaagaaagcggctggtcttcaggctgagattggccaggtgaaacaggagctgtccagaaaggacacagaactactcgccctgcagacaaagctagaaacactcacaaaccagttctcagatagtaaacagcacattgaagtgttgaaggagtccttgactgctaaggagcagagggctgccatcctgcagactgaggtggatgctctccgattgcgtttggaagagaaggaaaccatgttgaataaaaagacaaaacaaattcaggatatggctgaagagaaggggacacaagctggagagatacatgacctcaaggacatgttggatgtgaaggagcggaaggttaatgttcttcagaagaagattgaaaatcttcaagagcagcttagagacaaggaaaagcagatgagcagcttgaaagaacgggtcaaatccttgcaggctgacaccaccaacactgacactgccttgacaactttggaggaggcccttgcagagaaagagcggacaattgaacgcttaaaggagcagagggacagagatgagcgagagaagcaagaggaaattgataactacaaaaaagatcttaaagacttgaaggaaaaagtcagcctgttgcaaggcgacctttcagagaaagaggcttcacttttggatctgaaagagcatgcttcttctctggcatcctcaggactgaaaaaggactcacggcttaagacactagagattgctttggagcagaagaaggaggagtgtctgaaaatggaatcacaattgaaaaaggcacatgaggcagcattggaagccagagccagtccagagatgagtgaccgaatacagcacttggagagagagatcaccaggtacaaagatgaatctagcaaggcccaggcagaagttgatcgactcttagaaatcttgaaggaggtggaaaatgagaagaatgacaaagataagaagatagctgagttggaaaggcaagtgaaagaccagaataagaaggtagcaaatctgaagcacaaggaacaggtggaaaaaaagaagagtgcacaaatgttagaggaggcgcgacgacgggaggacaatctcaacgacagctctcagcagctacaggtggaggagttactgatggccatggagaaggtaaagcaggaactagaatccatgaaagcaaagctgtcctccacccagcagtctctggcagaaaaggaaactcacttgactaatcttcgggcagagagaaggaaacacttagaggaagttctggagatgaagcaagaagctcttctggctgccattagtgaaaaagacgccaatatagctctcttggagctttcgtcctctaagaagaagacccaagaggaagtggctgccctgaagcgggagaaggatcgtctggtacagcagcttaagcagcagacgcaaaatcgaatgaagctaatggccgacaactacgaggatgaccacttcaaatcctcccattccaatcaaacaaatcacaagccctccccagaccaggatgaggaggagggtatatgggcatagccaatcagaggcttagttcagccattttgttcagaacgatcatccagcccctcttagaacttgaccaaaatagaagtaaattaaagttgtacattggacacctgacaaccctctgccatgaccgagaccccctgatcctccgtggactcactccaccagcttcctataacttggacgatgaccaggcggcttgggagaatgagctgcagaagatgacccgggggcagcttcaggatgagttagagaaaggtgaacgggacaatgcagaactgcaggagtttgccaacgccattcttcagcagatagcagaccattgtcccgacatcctagagcaagtggtcaacgccctggaagagtcctcttgaccctgctttatggggaagcctgaggtagtcaacccaggagccaagaaaagagaactacgaggaacaggtgcccggaaccttcttggcaccaaacactacaaacttcatcccaacttgctcacttgaagaagtgtgattccagcaccgtttctacatctgccatcttactctgcctttctgctttggatgtggtctctacactaaccttcttgatgtccagggtagataaagggtcgaatctctctgaagaactgccacctggtcatcagcagtggagaactgtgggagctggtggctctgccctgacagagagccatggagcagaggagcctctcacctcctgtcctctgacatgagaatgaaaccaggaatggacttggagttcaacaggctgagaggatgcctccaatggaccagagagctgagtgttctaatatcacaataggtgctttctcctaaaagggcaaaaaacaatctcaaaaagattagaaaaagagaaggggggaagggaagagaaaatcgactcttctttttactgtctcttctgcttactttccacatgagatgctttgtaccggggagctgtgagcaggcctcacgatggcttgggagcactcgttctcccaaggtctgagtcttcatccagccctgcctgtctgtcgcagccttcctcactctgttcctcggccagttaacaagaagatggtgtgaggtgttctccaccagtctctcctgtttgagactgttgacgttatcatactgaggtgttagatcaaatatctctaattgaagaacatgtgaggttgaaagagcaccagccagggcaacatagcgcgaccctgtctctacaaaaaattaaaaagagaacatacaaagttgacatatgagaccctgttgtccccgcctgcagctttgccccagtaacagatgcccgttgctcttgggctggtttcccctgaacacctccaagaggctgcctgccttgccagcacccgtgtcctgagctcctgcagcccagtggctgctgaagttgtgatccctcactcaccctgctagctttgcccttgactcgtcttctctgaacctcagcctcgtgcattgcctggaaccttcttctagcataaatgaaggtttttcctcctacacacattccttcctcggttatttcattcagagaatatttatgaaatgcctactgtgtgcaagtcatccatccttgaaaaggccacttctcagtgagggagagatgtagtggattctgtgagacatacctgctggagttgaagcagtaaatagcatgtccttcccctccccgatcttaaggtgtgttttctagaaaagttccctaatggaattcatgagtttgggggtctcagtcacccgcttgcctgtaggattccatttgatgattctggatttttgctgtttgttattgcccttagaggggctctgagtatctacttgtgggtggccatttcctgacatctgcatgtacctcgtggaattcagccagcttcatgttgcaaatcagaaagctgaccccaagactgcaaatcaatgaaggtattggcattgttaaggacgtagcgtagacaacagcagtcataaataattaggcaggaacttaacccaaatctagttctttgaccacctctaccaccagaacccagcagacactcacatctcctgataagagttgctggactcgatgtttttgttttgcattttctcctctccttccccacttactcagagaatttaaagtctgtagagtcagcacagccccatcagtccaggaacttcccaccaccagcccttgactgtcccattaactgacatggtcagatttccagctccccctactccctgctgtgaaacaatccctctccctgtgagaggaaactgtggagcgtttcttatcgaaggttaaatggactctgctcataaacctcttactgagatgcttcctgatagccaggctggccagagaggggtgcaggggttagatagtaagtggtgctcaattgagatttgcaaggactttgataccatttgaaatggaaaaattttgaacgggctttaacatgtttaagaaatatggatggggccggccacagtggctcacgcctgtaatcccagaactctggaaggctgaggcaggcggatcacctgagatcaggagttcgaggccagcctggccaagatggcaaaaaccccgactctactaaaaatacaaaattagccaggcgtggtggcgtacgcctgtaatcccagctactcaggaggcaggagaatcgcttgagcctgggaggcagaggctgcggtgagccgagatcgtgtcactgcactccagcctgggtgacagagactccattt

SEQ ID NO: 893 - protein, 968 aa, Homo sapiens
MYGSARSVGKVEPSSQSPGRSPRLPRSPRLGHRRTNSTGGSSGSSVGGGSGKTLSMENIQSLNAAYATSGPMYLSDHENVGSETPKSTMTLGRSGGRLPYGVRMTAMGSSPNIASSGVASDTIAFGEHHLPPVSMASTVPHSLRQARDNTIMDLQTQLKEVLRENDLLRKDVEVKESKLSSSMNSIKTFWSPELKKERALRKDEASKITIWKEQYRVVQEENQHMQMTIQALQDELRIQRDLNQLFQQDSSSRTGEPCVAELTEENFQRLHAEHERQAKELFLLRKTLEEMELRIETQKQTLNARDESIKKLLEMLQSKGLSAKATEEDHERTRRLAEAEMHVHHLESLLEQKEKENSMLREEMHRRFENAPDSAKTKALQTVIEMKDSKISSMERGLRDLEEEIQMLKSNGALSTEEREEEMKQMEVYRSHSKFMKNKVEQLKEELSSKEAQWEELKKKAAGLQAEIGQVKQELSRKDTELLALQTKLETLTNQFSDSKQHIEVLKESLTAKEQRAAILQTEVDALRLRLEEKETMLNKKTKQIQDMAEEKGTQAGEIHDLKDMLDVKERKVNVLQKKIENLQEQLRDKEKQMSSLKERVKSLQADTTNTDTALTTLEEAEKERTIERLKEQRDRDEREKQEEIDNYKKDLKDLKEKVSLLQGDLSEKEASLLDLKEHASSLASSGLKKDSRLKTLEIALEQKKEECLKMESQLKKAHEAALEARDEMSDRIQHLEREITRYKDESSKAQAEVDRLLEILKEVENEKNDKDKKIAELERQVKDQNKKVANLKHKEQVEKKKSAQMLEEARRREDNLNDSSQQLQVEELLMAMEKVKQELESMKAKLSSTQQSLAEKETHLTNLRAERRKHLEEVLEMKQEALLAAISEKDANIALLELSSSKKKTQEEVAALKREKDRLVQQLKQQTQNRMKLMADNYEDDHFKSSHSNQTNHKPSPDQDEEEGIWA

SEQ ID NO: 894 - DNA, 5970 bp, Homo sapiens
cggcggcggcggtagtggcggcggcggcggtgcctgggcggcagcagcagcagtagcggcagccctgaggacggtgagacggccgcggcggcggcgacagcgcggaagtcgcgcgggacccagagcttcccccctgtcgctagtgctgaggctttcgcctttcctacccagcttcttgctcacggcccgggctgggctgggcagggcaacgcgcccccgggcaggggcggagctgtagatatggtgtaagatacttcttcaagattggacagctggggaccttcttctgattaaccttaaaccaacttgtagccatagagacacctcacaaggttcccatttttgttgttgttgttgttgattttctgctcacacctttcctgaccttgcaaccatgtatggaagtgcccgctctgttgggaaggtggagccgagcagccagagccctgggcgttcacccaggcttccacgttcccctcgcttgggtcaccgtcgaaccaacagtacgggagggagttcgggaagcagtgttggaggtggcagtgggaaaaccctttcaatggaaaatatacaatctttaaatgctgcctatgccacctctggccctatgtatctaagtgaccatgaaaatgtgggttcagaaacacctaaaagcaccatgacacttggccgttctgggggacgtctgccttacggtgttcggatgactgctatgggtagtagccccaatatagctagcagtggggttgctagtgacaccatagcatttggagagcatcacctccctcctgtgagtatggcatccactgtacctcactcccttcgtcaggcgagagataacacaatcatggatctgcagacacagctgaaggaagtattaagagaaaatgatctcttgcggaaggatgtggaagtaaaggagagcaaattgagttcttcaatgaatagcatcaagaccttctggagcccagagctgaagaaggaacgagccctgagaaaagatgaagcttccaaaatcaccatttggaaggaacagtacagagttgtacaggaggaaaaccagcacatgcagatgacaatccaggctctccaggatgaattgcggatccagagggacctgaatcagctgtttcagcaggatagtagcagcaggactggcgaaccttgtgtagcagagctgacagaggagaactttcagaggcttcatgctgagcatgagcggcaggccaaagagctgtttcttcttcgaaagacattggaggaaatggagctgcgtattgagactcaaaagcagaccctaaatgctcgggatgaatccattaagaagcttctggaaatgttgcagagcaaaggactttctgccaaggctaccgaggaagaccatgagagaacaagacgactggcagaggcagagatgcacgttcatcacctagaaagccttttggagcagaaggaaaaagagaacagtatgttgagagaggagatgcatcgaaggtttgagaatgctcctgattctgccaaaacaaaagctctgcaaactgttattgagatgaaggattcaaaaatttcctctatggagcgtgggcttcgagacctggaagaggaaattcagatgctgaaatcgaatggtgctttgagtactgaggaaagggaagaagaaatgaagcaaatggaagtgtatcggagccattctaaatttatgaaaaataagattggccaggtgaaacaggagctgtccagaaaggacacagaactactcgccctgcagacaaagctagaaacactcacaaaccagttctcagatagtaaacagcacattgaagtgttgaaggagtccttgactgctaaggagcagagggctgccatcctgcagactgaggtggatgctctccgattgcgtttggaagagaaggaaaccatgttgaataaaaagacaaaacaaattcaggatatggctgaagagaaggggacacaagctggagagatacatgacctcaaggacatgttggatgtgaaggagcggaaggttaatgttcttcagaagaagattgaaaatcttcaagagcagcttagagacaaggaaaagcagatgagcagcttgaaagaacgggtcaaatccttgcaggctgacaccaccaacactgacactgccttgacaactttggaggaggcccttgcagagaaagagcggacaattgaacgcttaaaggagcagagggacagagatgagcgagagaagcaagaggaaattgataactacaaaaaagatcttaaagacttgaaggaaaaagtcagcctgttgcaaggcgacctttcagagaaagaggcttcacttttggatctgaaagagcatgcttcttctctggcatcctcaggactgaaaaaggactcacggcttaagacactagagattgctttggagcagaagaaggaggagtgtctgaaaatggaatcacaattgaaaaaggcacatgaggcagcattggaagccagagccagtccagagatgagtgaccgaatacagcacttggagagagagatcaccaggtacaaagatgaatctagcaaggcccaggcagaagttgatcgactcttagaaatcttgaaggaggtggaaaatgagaagaatgacaaagataagaagatagctgagttggaaaggcaagtgaaagaccagaataagaaggtagcaaatctgaagcacaaggaacaggtggaaaaaaagaagagtgcacaaatgttagaggaggcgcgacgacgggaggacaatctcaacgacagctctcagcagctacaggtggaggagttactgatggccatggagaaggtaaagcaggaactagaatccatgaaagcaaagctgtcctccacccagcagtctctggcagaaaaggaaactcacttgactaatcttcgggcagagagaaggaaacacttagaggaagttctggagatgaagcaagaagctcttctggctgccattagtgaaaaagacgccaatatagctctcttggagctttcgtcctctaagaagaagacccaagaggaagtggctgccctgaagcgggagaaggatcgtctggtacagcagcttaagcagcagacgcaaaatcgaatgaagctaatggccgacaactacgaggatgaccacttcaaatcctcccattccaatcaaacaaatcacaagccctccccagaccaggatgaggaggagggtatatgggcatagccaatcagaggcttagttcagccattttgttcagaacgatcatccagcccctcttagaacttgaccaaaatagaagtaaattaaagttgtacattggacacctgacaaccctctgccatgaccgagaccccctgatcctccgtggactcactccaccagcttcctataacttggacgatgaccaggcggcttgggagaatgagctgcagaagatgacccgggggcagcttcaggatgagttagagaaaggtgaacgggacaatgcagaactgcaggagtttgccaacgccattcttcagcagatagcagaccattgtcccgacatcctagagcaagtggtcaacgccctggaagagtcctcttgaccctgctttatggggaagcctgaggtagtcaacccaggagccaagaaaagagaactacgaggaacaggtgcccggaaccttcttggcaccaaacactacaaacttcatcccaacttgctcacttgaagaagtgtgattccagcaccgtttctacatctgccatcttactctgcctttctgctttggatgtggtctctacactaaccttcttgatgtccagggtagataaagggtcgaatctctctgaagaactgccacctggtcatcagcagtggagaactgtgggagctggtggctctgccctgacagagagccatggagcagaggagcctctcacctcctgtcctctgacatgagaatgaaaccaggaatggacttggagttcaacaggctgagaggatgcctccaatggaccagagagctgagtgttctaatatcacaataggtgctttctcctaaaagggcaaaaaacaatctcaaaaagattagaaaaagagaaggggggaagggaagagaaaatcgactcttctttttactgtctcttctgcttactttccacatgagatgctttgtaccggggagctgtgagcaggcctcacgatggcttgggagcactcgttctcccaaggtctgagtcttcatccagccctgcctgtctgtcgcagccttcctcactctgttcctcggccagttaacaagaagatggtgtgaggtgttctccaccagtctctcctgtttgagactgttgacgttatcatactgaggtgttagatcaaatatctctaattgaagaacatgtgaggttgaaagagcaccagccagggcaacatagcgcgaccctgtctctacaaaaaattaaaaagagaacatacaaagttgacatatgagaccctgttgtccccgcctgcagctttgccccagtaacagatgcccgttgctcttgggctggtttcccctgaacacctccaagaggctgcctgccttgccagcacccgtgtcctgagctcctgcagcccagtggctgctgaagttgtgatccctcactcaccctgctagctttgcccttgactcgtcttctctgaacctcagcctcgtgcattgcctggaaccttcttctagcataaatgaaggtttttcctcctacacacattccttcctcggttatttcattcagagaatatttatgaaatgcctactgtgtgcaagtcatccatccttgaaaaggccacttctcagtgagggagagatgtagtggattctgtgagacatacctgctggagttgaagcagtaaatagcatgtccttcccctccccgatcttaaggtgtgttttctagaaaagttccctaatggaattcatgagtttgggggtctcagtcacccgcttgcctgtaggattccatttgatgattctggatttttgctgtttgttattgcccttagaggggctctgagtatctacttgtgggtggccatttcctgacatctgcatgtacctcgtggaattcagccagcttcatgttgcaaatcagaaagctgaccccaagactgcaaatcaatgaaggtattggcattgttaaggacgtagcgtagacaacagcagtcataaataattaggcaggaacttaacccaaatctagttctttgaccacctctaccaccagaacccagcagacactcacatctcctgataagagttgctggactcgatgtttttgttttgcattttctcctctccttccccacttactcagagaatttaaagtctgtagagtcagcacagccccatcagtccaggaacttcccaccaccagcccttgactgtcccattaactgacatggtcagatttccagctccccctactccctgctgtgaaacaatccctctccctgtgagaggaaactgtggagcgtttcttatcgaaggttaaatggactctgctcataaacctcttactgagatgcttcctgatagccaggctggccagagaggggtgcaggggttagatagtaagtggtgctcaattgagatttgcaaggactttgataccatttgaaatggaaaaattttgaacgggctttaacatgtttaagaaatatggatggggccggccacagtggctcacgcctgtaatcccagaactctggaaggctgaggcaggcggatcacctgagatcaggagttcgaggccagcctggccaagatggcaaaaaccccgactctactaaaaatacaaaattagccaggcgtggtggcgtacgcctgtaatcccagctactcaggaggcaggagaatcgcttgagcctgggaggcagaggctgcggtgagccgagatcgtgtcactgcactccagcctgggtgacagagactccattt

SEQ ID NO: 895 - protein, 940 aa, Homo sapiens
MYGSARSVGKVEPSSQSPGRSPRLPRSPRLGHRRTNSTGGSSGSSVGGGSGKTLSMENIQSLNAAYATSGPMYLSDHENVGSETPKSTMTLGRSGGRLPYGVRMTAMGSSPNIASSGVASDTIAFGEHHLPPVSMASTVPHSLRQARDNTIMDLQTQLKEVLRENDLLRKDVEVKESKLSSSMNSIKTFWSPELKKERALRKDEASKITIWKEQYRVVQEENQHMQMTIQALQDELRIQRDLNQLFQQDSSSRTGEPCVAELTEENFQRLHAEHERQAKELFLLRKTLEEMELRIETQKQTLNARDESIKKLLEMLQSKGLSAKATEEDHERTRRLAEAEMHVHHLESLLEQKEKENSMLREEMHRRFENAPDSAKTKALQTVIEMKDSKISSMERGLRDLEEEIQMLKSNGALSTEEREEEMKQMEVYRSHSKFMKNKIGQVKQELSRKDTELLALQTKLETLTNQFSDSKQHIEVLKESLTAKEQRAAILQTEVDALRLRLEEKETMLNKKTKQIQDMAEEKGTQAGEIHDLKDMLDVKERKVNVLQKKIENLQEQLRDKEKQMSSLKERVKSLQADTTNTDTALTTLEEAEKERTIERLKEQRDRDEREKQEEIDNYKKDLKDLKEKVSLLQGDLSEKEASLLDLKEHASSLASSGLKKDSRLKTLEIALEQKKEECLKMESQLKKAHEAALEARDEMSDRIQHLEREITRYKDESSKAQAEVDRLLEILKEVENEKNDKDKKIAELERQVKDQNKKVANLKHKEQVEKKKSAQMLEEARRREDNLNDSSQQLQVEELLMAMEKVKQELESMKAKLSSTQQSLAEKETHLTNLRAERRKHLEEVLEMKQEALLAAISEKDANIALLELSSSKKKTQEEVAALKREKDRLVQQLKQQTQNRMKLMADNYEDDHFKSSHSNQTNHKPSPDQDEEEGIWA

SEQ ID NO: 896 - DNA, 6102 bp, Homo sapiens
cggcggcggcggtagtggcggcggcggcggtgcctgggcggcagcagcagcagtagcggcagccctgaggacggtgagacggccgcggcggcggcgacagcgcggaagtcgcgcgggacccagagcttcccccctgtcgctagtgctgaggctttcgcctttcctacccagcttcttgctcacggcccgggctgggctgggcagggcaacgcgcccccgggcaggggcggagctgtagatatggtgtaagatacttcttcaagattggacagctggggaccttcttctgattaaccttaaaccaacttgtagccatagagacacctcacaaggttcccatttttgttgttgttgttgttgattttctgctcacacctttcctgaccttgcaaccatgtatggaagtgcccgctctgttgggaaggtggagccgagcagccagagccctgggcgttcacccaggcttccacgttcccctcgcttgggtcaccgtcgaaccaacagtacgggagggagttcgggaagcagtgttggaggtggcagtgggaaaaccctttcaatggaaaatatacaatctttaaatgctgcctatgccacctctggccctatgtatctaagtgaccatgaaaatgtgggttcagaaacacctaaaagcaccatgacacttggccgttctgggggacgtctgccttacggtgttcggatgactgctatgggtagtagccccaatatagctagcagtggggttgctagtgacaccatagcatttggagagcatcacctccctcctgtgagtatggcatccactgtacctcactcccttcgtcaggcgagagataacacaatcatggatctgcagacacagctgaaggaagtattaagagaaaatgatctcttgcggaaggatgtggaagtaaaggagagcaaattgagttcttcaatgaatagcatcaagaccttctggagcccagagctgaagaaggaacgagccctgagaaaagatgaagcttccaaaatcaccatttggaaggaacagtacagagttgtacaggaggaaaaccagcacatgcagatgacaatccaggctctccaggatgaattgcggatccagagggacctgaatcagctgtttcagcaggatagtagcagcaggactggcgaaccttgtgtagcagagctgacagaggagaactttcagaggcttcatgctgagcatgagcggcaggccaaagagctgtttcttcttcgaaagacattggaggaaatggagctgcgtattgagactcaaaagcagaccctaaatgctcgggatgaatccattaagaagcttctggaaatgttgcagagcaaaggactttctgccaaggctaccgaggaagaccatgagagaacaagacgactggcagaggcagagatgcacgttcatcacctagaaagccttttggagcagaaggaaaaagagaacagtatgttgagagaggagatgcatcgaaggtttgagaatgctcctgattctgccaaaacaaaagctctgcaaactgttattgagatgaaggattcaaaaatttcctctatggagcgtgggcttcgagacctggaagaggaaattcagatgctgaaatcgaatggtgctttgagtactgaggaaagggaagaagaaatgaagcaaatggaagtgtatcggagccattctaaatttatgaaaaataagattggccaggtgaaacaggagctgtccagaaaggacacagaactactcgccctgcagacaaagctagaaacactcacaaaccagttctcagatagtaaacagcacattgaagtgttgaaggagtccttgactgctaaggagcagagggctgccatcctgcagactgaggtggatgctctccgattgcgtttggaagagaaggaaaccatgttgaataaaaagacaaaacaaattcaggatatggctgaagagaaggggacacaagctggagagatacatgacctcaaggacatgttggatgtgaaggagcggaaggttaatgttcttcagaagaagattgaaaatcttcaagagcagcttagagacaaggaaaagcagatgagcagcttgaaagaacgggtcaaatccttgcaggctgacaccaccaacactgacactgccttgacaactttggaggaggcccttgcagagaaagagcggacaattgaacgcttaaaggagcagagggacagagatgagcgagagaagcaagaggaaattgataactacaaaaaagatcttaaagacttgaaggaaaaagtcagcctgttgcaaggcgacctttcagagaaagaggcttcacttttggatctgaaagagcatgcttcttctctggcatcctcaggactgaaaaaggactcacggcttaagacactagagattgctttggagcagaagaaggaggagtgtctgaaaatggaatcacaattgaaaaaggcacatgaggcagcattggaagccagagccagtccagagatgagtgaccgaatacagcacttggagagagagatcaccaggtacaaagatgaatctagcaaggcccaggcagaagttgatcgactcttagaaatcttgaaggaggtggaaaatgagaagaatgacaaagataagaagatagctgagttggaaaggcaagtgaaagaccagaataagaaggtagcaaatctgaagcacaaggaacaggtggaaaaaaagaagagtgcacaaatgttagaggaggcgcgacgacgggaggacaatctcaacgacagctctcagcagctacaggacagtctccgtaagaaggatgacaggattgaagagctggaagaagcactaagagaaagtgtacagataactgcagagcgggaaatggtgctagcacaagaggaatcagccaggaccaatgctgaaaaacaggtggaggagttactgatggccatggagaaggtaaagcaggaactagaatccatgaaagcaaagctgtcctccacccagcagtctctggcagaaaaggaaactcacttgactaatcttcgggcagagagaaggaaacacttagaggaagttctggagatgaagcaagaagctcttctggctgccattagtgaaaaagacgccaatatagctctcttggagctttcgtcctctaagaagaagacccaagaggaagtggctgccctgaagcgggagaaggatcgtctggtacagcagcttaagcagcagacgcaaaatcgaatgaagctaatggccgacaactacgaggatgaccacttcaaatcctcccattccaatcaaacaaatcacaagccctccccagaccaggatgaggaggagggtatatgggcatagccaatcagaggcttagttcagccattttgttcagaacgatcatccagcccctcttagaacttgaccaaaatagaagtaaattaaagttgtacattggacacctgacaaccctctgccatgaccgagaccccctgatcctccgtggactcactccaccagcttcctataacttggacgatgaccaggcggcttgggagaatgagctgcagaagatgacccgggggcagcttcaggatgagttagagaaaggtgaacgggacaatgcagaactgcaggagtttgccaacgccattcttcagcagatagcagaccattgtcccgacatcctagagcaagtggtcaacgccctggaagagtcctcttgaccctgctttatggggaagcctgaggtagtcaacccaggagccaagaaaagagaactacgaggaacaggtgcccggaaccttcttggcaccaaacactacaaacttcatcccaacttgctcacttgaagaagtgtgattccagcaccgtttctacatctgccatcttactctgcctttctgctttggatgtggtctctacactaaccttcttgatgtccagggtagataaagggtcgaatctctctgaagaactgccacctggtcatcagcagtggagaactgtgggagctggtggctctgccctgacagagagccatggagcagaggagcctctcacctcctgtcctctgacatgagaatgaaaccaggaatggacttggagttcaacaggctgagaggatgcctccaatggaccagagagctgagtgttctaatatcacaataggtgctttctcctaaaagggcaaaaaacaatctcaaaaagattagaaaaagagaaggggggaagggaagagaaaatcgactcttctttttactgtctcttctgcttactttccacatgagatgctttgtaccggggagctgtgagcaggcctcacgatggcttgggagcactcgttctcccaaggtctgagtcttcatccagccctgcctgtctgtcgcagccttcctcactctgttcctcggccagttaacaagaagatggtgtgaggtgttctccaccagtctctcctgtttgagactgttgacgttatcatactgaggtgttagatcaaatatctctaattgaagaacatgtgaggttgaaagagcaccagccagggcaacatagcgcgaccctgtctctacaaaaaattaaaaagagaacatacaaagttgacatatgagaccctgttgtccccgcctgcagctttgccccagtaacagatgcccgttgctcttgggctggtttcccctgaacacctccaagaggctgcctgccttgccagcacccgtgtcctgagctcctgcagcccagtggctgctgaagttgtgatccctcactcaccctgctagctttgcccttgactcgtcttctctgaacctcagcctcgtgcattgcctggaaccttcttctagcataaatgaaggtttttcctcctacacacattccttcctcggttatttcattcagagaatatttatgaaatgcctactgtgtgcaagtcatccatccttgaaaaggccacttctcagtgagggagagatgtagtggattctgtgagacatacctgctggagttgaagcagtaaatagcatgtccttcccctccccgatcttaaggtgtgttttctagaaaagttccctaatggaattcatgagtttgggggtctcagtcacccgcttgcctgtaggattccatttgatgattctggatttttgctgtttgttattgcccttagaggggctctgagtatctacttgtgggtggccatttcctgacatctgcatgtacctcgtggaattcagccagcttcatgttgcaaatcagaaagctgaccccaagactgcaaatcaatgaaggtattggcattgttaaggacgtagcgtagacaacagcagtcataaataattaggcaggaacttaacccaaatctagttctttgaccacctctaccaccagaacccagcagacactcacatctcctgataagagttgctggactcgatgtttttgttttgcattttctcctctccttccccacttactcagagaatttaaagtctgtagagtcagcacagccccatcagtccaggaacttcccaccaccagcccttgactgtcccattaactgacatggtcagatttccagctccccctactccctgctgtgaaacaatccctctccctgtgagaggaaactgtggagcgtttcttatcgaaggttaaatggactctgctcataaacctcttactgagatgcttcctgatagccaggctggccagagaggggtgcaggggttagatagtaagtggtgctcaattgagatttgcaaggactttgataccatttgaaatggaaaaattttgaacgggctttaacatgtttaagaaatatggatggggccggccacagtggctcacgcctgtaatcccagaactctggaaggctgaggcaggcggatcacctgagatcaggagttcgaggccagcctggccaagatggcaaaaaccccgactctactaaaaatacaaaattagccaggcgtggtggcgtacgcctgtaatcccagctactcaggaggcaggagaatcgcttgagcctgggaggcagaggctgcggtgagccgagatcgtgtcactgcactccagcctgggtgacagagactccattt

SEQ ID NO: 897 - protein, 984 aa, Homo sapiens
MYGSARSVGKVEPSSQSPGRSPRLPRSPRLGHRRTNSTGGSSGSSVGGGSGKTLSMENIQSLNAAYATSGPMYLSDHENVGSETPKSTMTLGRSGGRLPYGVRMTAMGSSPNIASSGVASDTIAFGEHHLPPVSMASTVPHSLRQARDNTIMDLQTQLKEVLRENDLLRKDVEVKESKLSSSMNSIKTFWSPELKKERALRKDEASKITIWKEQYRVVQEENQHMQMTIQALQDELRIQRDLNQLFQQDSSSRTGEPCVAELTEENFQRLHAEHERQAKELFLLRKTLEEMELRIETQKQTLNARDESIKKLLEMLQSKGLSAKATEEDHERTRRLAEAEMHVHHLESLLEQKEKENSMLREEMHRRFENAPDSAKTKALQTVIEMKDSKISSMERGLRDLEEEIQMLKSNGALSTEEREEEMKQMEVYRSHSKFMKNKIGQVKQELSRKDTELLALQTKLETLTNQFSDSKQHIEVLKESLTAKEQRAAILQTEVDALRLRLEEKETMLNKKTKQIQDMAEEKGTQAGEIHDLKDMLDVKERKVNVLQKKIENLQEQLRDKEKQMSSLKERVKSLQADTTNTDTALTTLEEAEKERTIERLKEQRDRDEREKQEEIDNYKKDLKDLKEKVSLLQGDLSEKEASLLDLKEHASSLASSGLKKDSRLKTLEIALEQKKEECLKMESQLKKAHEAALEARDEMSDRIQHLEREITRYKDESSKAQAEVDRLLEILKEVENEKNDKDKKIAELERQVKDQNKKVANLKHKEQVEKKKSAQMLEEARRREDNLNDSSQQLQDSLRKKDDRIEELEEALRESVQITAEREMVLAQEESARTNAEKQVEELLMAMEKVKQELESMKAKLSSTQQSLAEKETHLTNLRAERRKHLEEVLEMKQEALLAAISEKDANIALLELSSSKKKTQEEVAALKREKDRLVQQLKQQTQNRMKLMADNYEDDHFKSSHSNQTNHKPSPDQDEEEGIWA

SEQ ID NO: 898 - DNA, 6121 bp, Homo sapiens
cggcggcggcggtagtggcggcggcggcggtgcctgggcggcagcagcagcagtagcggcagccctgaggacggtgagacggccgcggcggcggcgacagcgcggaagtcgcgcgggacccagagcttcccccctgtcgctagtgctgaggctttcgcctttcctacccagcttcttgctcacggcccgggctgggctgggcagggcaacgcgcccccgggcaggggcggagctgtagatatggtgtaagatacttcttcaagattggacagctggggaccttcttctgattaaccttaaaccaacttgtagccatagagacacctcacaaggttcccatttttgttgttgttgttgttgattttctgctcacacctttcctgaccttgcaaccatgtatggaagtgcccgctctgttgggaaggtggagccgagcagccagagccctgggcgttcacccaggcttccacgttcccctcgcttgggtcaccgtcgaaccaacagtacgggagggagttcgggaagcagtgttggaggtggcagtgggaaaaccctttcaatggaaaatatacaatctttaaatgctgcctatgccacctctggccctatgtatctaagtgaccatgaaaatgtgggttcagaaacacctaaaagcaccatgacacttggccgttctgggggacgtctgccttacggtgttcggatgactgctatgggtagtagccccaatatagctagcagtggggttgctagtgacaccatagcatttggagagcatcacctccctcctgtgagtatggcatccactgtacctcactcccttcgtcaggcgagagataacacaatcatggatctgcagacacagctgaaggaagtattaagagaaaatgatctcttgcggaaggatgtggaagtaaaggagagcaaattgagttcttcaatgaatagcatcaagaccttctggagcccagagctgaagaaggaacgagccctgagaaaagatgaagcttccaaaatcaccatttggaaggaacagtacagagttgtacaggaggaaaaccagcacatgcagatgacaatccaggctctccaggatgaattgcggatccagagggacctgaatcagctgtttcagcaggatagtagcagcaggactggcgaaccttgtgtagcagagctgacagaggagaactttcagaggcttcatgctgagcatgagcggcaggccaaagagctgtttcttcttcgaaagacattggaggaaatggagctgcgtattgagactcaaaagcagaccctaaatgctcgggatgaatccattaagaagcttctggaaatgttgcagagcaaaggactttctgccaaggctaccgaggaagaccatgagagaacaagacgactggcagaggcagagatgcacgttcatcacctagaaagccttttggagcagaaggaaaaagagaacagtatgttgagagaggagatgcatcgaaggtttgagaatgctcctgattctgccaaaacaaaagctctgcaaactgttattgagatgaaggattcaaaaatttcctctatggagcgtgggcttcgagacctggaagaggaaattcagatgctgaaatcgaatggtgctttgagtactgaggaaagggaagaagaaatgaagcaaatggaagtgtatcggagccattctaaatttatgaaaaataaggtagaacaactgaaggaggaactaagttcgaaagaggctcaatgggaggagctgaaaaagaaagcggctggtcttcaggctgagattggccaggtgaaacaggagctgtccagaaaggacacagaactactcgccctgcagacaaagctagaaacactcacaaaccagttctcagatagtaaacagcacattgaagtgttgaaggagtccttgactgctaaggagcagagggctgccatcctgcagactgaggtggatgctctccgattgcgtttggaagagaaggaaaccatgttgaataaaaagacaaaacaaattcaggatatggctgaagagaaggggacacaagctggagagatacatgacctcaaggacatgttggatgtgaaggagcggaaggttaatgttcttcagaagaagattgaaaatcttcaagagcagcttagagacaaggaaaagcagatgagcagcttgaaagaacgggtcaaatccttgcaggctgacaccaccaacactgacactgccttgacaactttggaggaggcccttgcagagaaagagcggacaattgaacgcttaaaggagcagagggacagagatgagcgagagaagcaagaggaaattgataactacaaaaaagatcttaaagacttgaaggaaaaagtcagcctgttgcaaggcgacctttcagagaaagaggcttcacttttggatctgaaagagcatgcttcttctctggcatcctcaggactgaaaaaggactcacggcttaagacactagagattgctttggagcagaagaaggaggagtgtctgaaaatggaatcacaattgaaaaaggcacatgaggcagcattggaagccagagccagtccagagatgagtgaccgaatacagcacttggagagagagatcaccaggtacaaagatgaatctagcaaggcccaggcagaagttgatcgactcttagaaatcttgaaggaggtggaaaatgagaagaatgacaaagataagaagatagctgagttggaaaggcaagtgaaagaccagaataagaaggtagcaaatctgaagcacaaggaacaggtggaaaaaaagaagagtgcacaaatgttagaggaggcgcgacgacgggaggacaatctcaacgacagctctcagcagctacaggacagtctccgtaagaaggatgacaggattgaagagctggaagaagcactaagagaaagtgtacagataactgcagagcgggaaatggtgctagcacaagaggaatcagccaggaccaatgctgaaaaacaggtggaggagttactgatggccatggagaaggtaaagcaggaactagaatccatgaaagcaaagctgtcctccacccagcagtctctggcagaaaaggaaactcacttgactaatcttcgggcagagagaaggaaacacttagaggaagttctggagatgaagcaagaagctcttctggctgccattagtgaaaaagacgccaatatagctctcttggagctttcgtcctctaagaagaagacccaagaggaagtggctgccctgaagcgggagaaggatcgtctggtacagcagcttaagcagcagacgcaaaatcgaatgaagctaatggccgacaactacgaggatgaccacttcaaatcctcccattccaatcaaacaaatcacaagccctccccagaccagatcatccagcccctcttagaacttgaccaaaatagaagtaaattaaagttgtacattggacacctgacaaccctctgccatgaccgagaccccctgatcctccgtggactcactccaccagcttcctataacttggacgatgaccaggcggcttgggagaatgagctgcagaagatgacccgggggcagcttcaggatgagttagagaaaggtgaacgggacaatgcagaactgcaggagtttgccaacgccattcttcagcagatagcagaccattgtcccgacatcctagagcaagtggtcaacgccctggaagagtcctcttgaccctgctttatggggaagcctgaggtagtcaacccaggagccaagaaaagagaactacgaggaacaggtgcccggaaccttcttggcaccaaacactacaaacttcatcccaacttgctcacttgaagaagtgtgattccagcaccgtttctacatctgccatcttactctgcctttctgctttggatgtggtctctacactaaccttcttgatgtccagggtagataaagggtcgaatctctctgaagaactgccacctggtcatcagcagtggagaactgtgggagctggtggctctgccctgacagagagccatggagcagaggagcctctcacctcctgtcctctgacatgagaatgaaaccaggaatggacttggagttcaacaggctgagaggatgcctccaatggaccagagagctgagtgttctaatatcacaataggtgctttctcctaaaagggcaaaaaacaatctcaaaaagattagaaaaagagaaggggggaagggaagagaaaatcgactcttctttttactgtctcttctgcttactttccacatgagatgctttgtaccggggagctgtgagcaggcctcacgatggcttgggagcactcgttctcccaaggtctgagtcttcatccagccctgcctgtctgtcgcagccttcctcactctgttcctcggccagttaacaagaagatggtgtgaggtgttctccaccagtctctcctgtttgagactgttgacgttatcatactgaggtgttagatcaaatatctctaattgaagaacatgtgaggttgaaagagcaccagccagggcaacatagcgcgaccctgtctctacaaaaaattaaaaagagaacatacaaagttgacatatgagaccctgttgtccccgcctgcagctttgccccagtaacagatgcccgttgctcttgggctggtttcccctgaacacctccaagaggctgcctgccttgccagcacccgtgtcctgagctcctgcagcccagtggctgctgaagttgtgatccctcactcaccctgctagctttgcccttgactcgtcttctctgaacctcagcctcgtgcattgcctggaaccttcttctagcataaatgaaggtttttcctcctacacacattccttcctcggttatttcattcagagaatatttatgaaatgcctactgtgtgcaagtcatccatccttgaaaaggccacttctcagtgagggagagatgtagtggattctgtgagacatacctgctggagttgaagcagtaaatagcatgtccttcccctccccgatcttaaggtgtgttttctagaaaagttccctaatggaattcatgagtttgggggtctcagtcacccgcttgcctgtaggattccatttgatgattctggatttttgctgtttgttattgcccttagaggggctctgagtatctacttgtgggtggccatttcctgacatctgcatgtacctcgtggaattcagccagcttcatgttgcaaatcagaaagctgaccccaagactgcaaatcaatgaaggtattggcattgttaaggacgtagcgtagacaacagcagtcataaataattaggcaggaacttaacccaaatctagttctttgaccacctctaccaccagaacccagcagacactcacatctcctgataagagttgctggactcgatgtttttgttttgcattttctcctctccttccccacttactcagagaatttaaagtctgtagagtcagcacagccccatcagtccaggaacttcccaccaccagcccttgactgtcccattaactgacatggtcagatttccagctccccctactccctgctgtgaaacaatccctctccctgtgagaggaaactgtggagcgtttcttatcgaaggttaaatggactctgctcataaacctcttactgagatgcttcctgatagccaggctggccagagaggggtgcaggggttagatagtaagtggtgctcaattgagatttgcaaggactttgataccatttgaaatggaaaaattttgaacgggctttaacatgtttaagaaatatggatggggccggccacagtggctcacgcctgtaatcccagaactctggaaggctgaggcaggcggatcacctgagatcaggagttcgaggccagcctggccaagatggcaaaaaccccgactctactaaaaatacaaaattagccaggcgtggtggcgtacgcctgtaatcccagctactcaggaggcaggagaatcgcttgagcctgggaggcagaggctgcggtgagccgagatcgtgtcactgcactccagcctgggtgacagagactccattt

SEQ ID NO: 899 - protein, 1110 aa, Homo sapiens
MYGSARSVGKVEPSSQSPGRSPRLPRSPRLGHRRTNSTGGSSGSSVGGGSGKTLSMENIQSLNAAYATSGPMYLSDHENVGSETPKSTMTLGRSGGRLPYGVRMTAMGSSPNIASSGVASDTIAFGEHHLPPVSMASTVPHSLRQARDNTIMDLQTQLKEVLRENDLLRKDVEVKESKLSSSMNSIKTFWSPELKKERALRKDEASKITIWKEQYRVVQEENQHMQMTIQALQDELRIQRDLNQLFQQDSSSRTGEPCVAELTEENFQRLHAEHERQAKELFLLRKTLEEMELRIETQKQTLNARDESIKKLLEMLQSKGLSAKATEEDHERTRRLAEAEMHVHHLESLLEQKEKENSMLREEMHRRFENAPDSAKTKALQTVIEMKDSKISSMERGLRDLEEEIQMLKSNGALSTEEREEEMKQMEVYRSHSKFMKNKVEQLKEELSSKEAQWEELKKKAAGLQAEIGQVKQELSRKDTELLALQTKLETLTNQFSDSKQHIEVLKESLTAKEQRAAILQTEVDALRLRLEEKETMLNKKTKQIQDMAEEKGTQAGEIHDLKDMLDVKERKVNVLQKKIENLQEQLRDKEKQMSSLKERVKSLQADTTNTDTALTTLEEAEKERTIERLKEQRDRDEREKQEEIDNYKKDLKDLKEKVSLLQGDLSEKEASLLDLKEHASSLASSGLKKDSRLKTLEIALEQKKEECLKMESQLKKAHEAALEARDEMSDRIQHLEREITRYKDESSKAQAEVDRLLEILKEVENEKNDKDKKIAELERQVKDQNKKVANLKHKEQVEKKKSAQMLEEARRREDNLNDSSQQLQDSLRKKDDRIEELEEALRESVQITAEREMVLAQEESARTNAEKQVEELLMAMEKVKQELESMKAKLSSTQQSLAEKETHLTNLRAERRKHLEEVLEMKQEALLAAISEKDANIALLELSSSKKKTQEEVAALKREKDRLVQQLKQQTQNRMKLMADNYEDDHFKSSHSNQTNHKPSPDQIIQPLLELDQNRSKLKLYIGHLTTLCHDRDPLILRGLTPPASYNLDDDQAAWENELQKMTRGQLQDELEKGERDNAELQEFANAILQQIADHCPDIQVVNALEESS

SEQ ID NO: 900 - DNA, 6899 bp, Homo sapiens
cggcggcggcggtagtggcggcggcggcggtgcctgggcggcagcagcagcagtagcggcagccctgaggacggtgagacggccgcggcggcggcgacagcgcggaagtcgcgcgggacccagagcttcccccctgtcgctagtgctgaggctttcgcctttcctacccagcttcttgctcacggcccgggctgggctgggcagggcaacgcgcccccgggcaggggcggagctgtagatatggtgtaagatacttcttcaagattggacagctggggaccttcttctgattaaccttaaaccaacttgtagccatagagacacctcacaaggttcccatttttgttgttgttgttgttgattttctgctcacacctttcctgaccttgcaaccatgtatggaagtgcccgctctgttgggaaggtggagccgagcagccagagccctgggcgttcacccaggcttccacgttcccctcgcttgggtcaccgtcgaaccaacagtacgggagggagttcgggaagcagtgttggaggtggcagtgggaaaaccctttcaatggaaaatatacaatctttaaatgctgcctatgccacctctggccctatgtatctaagtgaccatgaaaatgtgggttcagaaacacctaaaagcaccatgacacttggccgttctgggggacgtctgccttacggtgttcggatgactgctatgggtagtagccccaatatagctagcagtggggttgctagtgacaccatagcatttggagagcatcacctccctcctgtgagtatggcatccactgtacctcactcccttcgtcaggcgagagataacacaatcatggatctgcagacacagctgaaggaagtattaagagaaaatgatctcttgcggaaggatgtggaagtaaaggagagcaaattgagttcttcaatgaatagcatcaagaccttctggagcccagagctgaagaaggaacgagccctgagaaaagatgaagcttccaaaatcaccatttggaaggaacagtacagagttgtacaggaggaaaaccagcacatgcagatgacaatccaggctctccaggatgaattgcggatccagagggacctgaatcagctgtttcagcaggatagtagcagcaggactggcgaaccttgtgtagcagagctgacagaggagaactttcagaggcttcatgctgagcatgagcggcaggccaaagagctgtttcttcttcgaaagacattggaggaaatggagctgcgtattgagactcaaaagcagaccctaaatgctcgggatgaatccattaagaagcttctggaaatgttgcagagcaaaggactttctgccaaggctaccgaggaagaccatgagagaacaagacgactggcagaggcagagatgcacgttcatcacctagaaagccttttggagcagaaggaaaaagagaacagtatgttgagagaggagatgcatcgaaggtttgagaatgctcctgattctgccaaaacaaaagctctgcaaactgttattgagatgaaggattcaaaaatttcctctatggagcgtgggcttcgagacctggaagaggaaattcagatgctgaaatcgaatggtgctttgagtactgaggaaagggaagaagaaatgaagcaaatggaagtgtatcggagccattctaaatttatgaaaaataagattggccaggtgaaacaggagctgtccagaaaggacacagaactactcgccctgcagacaaagctagaaacactcacaaaccagttctcagatagtaaacagcacattgaagtgttgaaggagtccttgactgctaaggagcagagggctgccatcctgcagactgaggtggatgctctccgattgcgtttggaagagaaggaaaccatgttgaataaaaagacaaaacaaattcaggatatggctgaagagaaggggacacaagctggagagatacatgacctcaaggacatgttggatgtgaaggagcggaaggttaatgttcttcagaagaagattgaaaatcttcaagagcagcttagagacaaggaaaagcagatgagcagcttgaaagaacgggtcaaatccttgcaggctgacaccaccaacactgacactgccttgacaactttggaggaggcccttgcagagaaagagcggacaattgaacgcttaaaggagcagagggacagagatgagcgagagaagcaagaggaaattgataactacaaaaaagatcttaaagacttgaaggaaaaagtcagcctgttgcaaggcgacctttcagagaaagaggcttcacttttggatctgaaagagcatgcttcttctctggcatcctcaggactgaaaaaggactcacggcttaagacactagagattgctttggagcagaagaaggaggagtgtctgaaaatggaatcacaattgaaaaaggcacatgaggcagcattggaagccagagccagtccagagatgagtgaccgaatacagcacttggagagagagatcaccaggtacaaagatgaatctagcaaggcccaggcagaagttgatcgactcttagaaatcttgaaggaggtggaaaatgagaagaatgacaaagataagaagatagctgagttggaaagtcattaggcaagtgaaagaccagaataagaaggtagcaaatctgaagcacaaggaacaggtggaaaaaaagaagagtgcacaaatgttagaggaggcgcgacgacgggaggacaatctcaacgacagctctcagcagctacaggtggaggagttactgatggccatggagaaggtaaagcaggaactagaatccatgaaagcaaagctgtcctccacccagcagtctctggcagaaaaggaaactcacttgactaatcttcgggcagagagaaggaaacacttagaggaagttctggagatgaagcaagaagctcttctggctgccattagtgaaaaagacgccaatatagctctcttggagctttcgtcctctaagaagaagacccaagaggaagtggctgccctgaagcgggagaaggatcgtctggtacagcagcttaagcagcagacgcaaaatcgaatgaagctaatggccgacaactacgaggatgaccacttcaaatcctcccattccaatcaaacaaatcacaagccctccccagaccaggatgaggaggagggtatatgggcatagccaatcagaggcttagttcagccattttgttcagaacgatcatccagcccctcttagaacttgaccaaaatagaagtaaattaaagttgtacattggacacctgacaaccctctgccatgaccgagaccccctgatcctccgtggactcactccaccagcttcctataacttggacgatgaccaggcggcttgggagaatgagctgcagaagatgacccgggggcagcttcaggatgagttagagaaaggtgaacgggacaatgcagaactgcaggagtttgccaacgccattcttcagcagatagcagaccattgtcccgacatcctagagcaagtggtcaacgccctggaagagtcctcttgaccctgctttatggggaagcctgaggtagtcaacccaggagccaagaaaagagaactacgaggaacaggtgcccggaaccttcttggcaccaaacactacaaacttcatcccaacttgctcacttgaagaagtgtgattccagcaccgtttctacatctgccatcttactctgcctttctgctttggatgtggtctctacactaaccttcttgatgtccagggtagataaagggtcgaatctctctgaagaactgccacctggtcatcagcagtggagaactgtgggagctggtggctctgccctgacagagagccatggagcagaggagcctctcacctcctgtcctctgacatgagaatgaaaccaggaatggacttggagttcaacaggctgagaggatgcctccaatggaccagagagctgagtgttctaatatcacaataggtgctttctcctaaaagggcaaaaaacaatctcaaaaagattagaaaaagagaaggggggaagggaagagaaaatcgactcttctttttactgtctcttctgcttactttccacatgagatgctttgtaccggggagctgtgagcaggcctcacgatggcttgggagcactcgttctcccaaggtctgagtcttcatccagccctgcctgtctgtcgcagccttcctcactctgttcctcggccagttaacaagaagatggtgtgaggtgttctccaccagtctctcctgtttgagactgttgacgttatcatactgaggtgttagatcaaatatctctaattgaagaacatgtgaggttgaaagagcaccagccagggcaacatagcgcgaccctgtctctacaaaaaattaaaaagagaacatacaaagttgacatatgagaccctgttgtccccgcctgcagctttgccccagtaacagatgcccgttgctcttgggctggtttcccctgaacacctccaagaggctgcctgccttgccagcacccgtgtcctgagctcctgcagcccagtggctgctgaagttgtgatccctcactcaccctgctagctttgcccttgactcgtcttctctgaacctcagcctcgtgcattgcctggaaccttcttctagcataaatgaaggtttttcctcctacacacattccttcctcggttatttcattcagagaatatttatgaaatgcctactgtgtgcaagtcatccatccttgaaaaggccacttctcagtgagggagagatgtagtggattctgtgagacatacctgctggagttgaagcagtaaatagcatgtccttcccctccccgatcttaaggtgtgttttctagaaaagttccctaatggaattcatgagtttgggggtctcagtcacccgcttgcctgtaggattccatttgatgattctggatttttgctgtttgttattgcccttagaggggctctgagtatctacttgtgggtggccatttcctgacatctgcatgtacctcgtggaattcagccagcttcatgttgcaaatcagaaagctgaccccaagactgcaaatcaatgaaggtattggcattgttaaggacgtagcgtagacaacagcagtcataaataattaggcaggaacttaacccaaatctagttctttgaccacctctaccaccagaacccagcagacactcacatctcctgataagagttgctggactcgatgtttttgttttgcattttctcctctccttccccacttactcagagaatttaaagtctgtagagtcagcacagccccatcagtccaggaacttcccaccaccagcccttgactgtcccattaactgacatggtcagatttccagctccccctactccctgctgtgaaacaatccctctccctgtgagaggaaactgtggagcgtttcttatcgaaggttaaatggactctgctcataaacctcttactgagatgcttcctgatagccaggctggccagagaggggtgcaggggttagatagtaagtggtggtcgtttgtggtcagttacctcaattctgttcattgcagtgcccgtaaaccatgtagaaagctcccagcactgaaaggcaggagtgttagcatctcgctttatccaccataacgtaaagaactgcggtgtgataacagccttcacggggccacggtggaaccaagacagcaggcgaggccatgcctaaacaagtggtctggcacgggcactggccagctgctctctccaagcaggtggcccagatcccacccacgtggactttctcatcaggtgcagcgcctgccactctcagccactgggtgtgtgactctcctcttcatctcagcattctccatcacttcccctccagaaaaacggatggaaggaagccctctgtgacactgcttctgagaagaagcatttccgggaccgatatcatctgtctggtctctgtgaacagcaaggaatcttcttgaccgttcttgggcactggaggctggctaggagttcagtaataaacgtggccttcgtgctgtagggcagagtggatgcagtttgtagctttcagagtgtctcattgagtctagatcattgaaccaacacttaaccaaatgtcccactcccatcacactaggacttgtcattccatgcccctctcctagtggtcatggtttcatatgggcatacaactgctactgaagttatatagccttgaaaactcagtgcaggttgcccttaattttccccaaacccctccatcggcaagtctagttgccctttagcacctaaagatctgcaccccaaaccaatgtcaccataaagagggcacgaagaagagtgggtgtgatcccaacggggttttgtaactgaagaagcccagtgtgagcttctcatcttttcatatacctctaacccccggtactcattgaatcattgatgaggtatctcaattgagatttgcaaggactttgataccatttgaaatggaaaaattttgaacgggctttaacatgtttaagaaatatggatggggccggccacagtggctcacgcctgtaatcccagaactctggaaggctgaggcaggcggatcacctgagatcaggagttcgaggccagcctggccaagatggcaaaaaccccgactctactaaaaatacaaaattagccaggcgtggtggcgtacgcctgtaatcccagctactcaggaggcaggagaatcgcttgagcctgggaggcagaggctgcggtgagccgagatcgtgtcactgcactccagcctgggtgacagagactcca

SEQ ID NO: 901 - protein, 753 aa, Homo sapiens
MYGSARSVGKVEPSSQSPGRSPRLPRSPRLGHRRTNSTGGSSGSSVGGGSGKTLSMENIQSLNAAYATSGPMYLSDHENVGSETPKSTMTLGRSGGRLPYGVRMTAMGSSPNIASSGVASDTIAFGEHHLPPVSMASTVPHSLRQARDNTIMDLQTQLKEVLRENDLLRKDVEVKESKLSSSMNSIKTFWSPELKKERALRKDEASKITIWKEQYRVVQEENQHMQMTIQALQDELRIQRDLNQLFQQDSSSRTGEPCVAELTEENFQRLHAEHERQAKELFLLRKTLEEMELRIETQKQTLNARDESIKKLLEMLQSKGLSAKATEEDHERTRRLAEAEMHVHHLESLLEQKEKENSMLREEMHRRFENAPDSAKTKALQTVIEMKDSKISSMERGLRDLEEEIQMLKSNGALSTEEREEEMKQMEVYRSHSKFMKNKIGQVKQELSRKDTELLALQTKLETLTNQFSDSKQHIEVLKESLTAKEQRAAILQTEVDALRLRLEEKETMLNKKTKQIQDMAEEKGTQAGEIHDLKDMLDVKERKVNVLQKKIENLQEQLRDKEKQMSSLKERVKSLQADTTNTDTALTTLEEAEKERTIERLKEQRDRDEREKQEEIDNYKKDLKDLKEKVSLLQGDLSEKEASLLDLKEHASSLASSGLKKDSRLKTLEIALEQKKEECLKMESQLKKAHEAALEARDEMSDRIQHLEREITRYKDESSKAQAEVDRLLEILKEVENEKNDKDKKIAELESH

SEQ ID NO: 902 - DNA, 40767 bp, Mus musculus
  misc_feature (1)...(40767): n = A,T,C or G
ggggagaaggaaggcttccgtaaagggtgcctttcggtcctttcgctcctggggaccctcggaaaaagcccaccatatcgaccccacggctagcccctcccccaggctctctccgctcgatttcgcaccgttatgtgggaagcgaatccggtgagtagccggcgggacggggcgggcccagtgggcggggttgcctgagaagggcggggaggcgttcccgggaactcgcccccgcggtgcctcaggctgggggtttgcgttccggggtcgtggctgtcccgcgtcgcgggggcctcctgcgggccgtggactcgcagctttgagccgtgggagcgttcggtggccgcttctacgctgttgctttcctttcccgattgttgattttacttccgggggcttctctgtcttcgcttttttccctcattttatattttgtattctgctttccagttgaagttactggctttcgaacctgctagttcctttcgacccccgcaccctcgttgctccttctttttggagctacagagcatggaggatcctctatatgagtttcaggggatgacgttcttaaatgttttctttccgtggttagaacaatgatctggaatcctttgtttgccttcagtaggtcttatgtctgcaggcatttttttttaatacttgctttcattcattggttcgttcgttcattcattcgttcgttcattcaaactcctacccgccatgaatgaggattcagatctatttgtcaagagtattcagatcttgttatgggaatgtaatagtgagaaaaatgtacgctgaacttaaaacttcggggtcgatgggcagaatcgcatttcaagaaatttgtggacttagtttgtgaaactacctcagaagctgagctaaccattaatttgacttcaataaccctctaagtcaatacttgaagtaacccttttgctttccctcacaaaaccagtaacctacttcctacttaagtgtattatcagttaagtctatcagtaaattttcccacgtctgaaagttagtacctgattagaaatgagcccatgaattgggattcagtccacattgtagttccattccatcccattccatcatgacagttaccagatagttttgattcatacactaatactgtcatcagatcagggcagaggaaagtatacgtttggatgtgattttagcaaaattgggatagctgttcatacatacacgctgttcactgttaactattaagtgtcatcagtatccatctcttacatgtcaatatggagttggtttttaccagccgccccgcccctttgtgttgatttccccacaacatacgtcagcagtgtatatattctgttcaaggtcacgtacttcaaatcctctgagttgtgtgttcaactagagaacagctcctgttgcacaagaaatgcttgttgaattcttgacagtgactggcacaggaatgcactaagggttctgtgctcactctgtacctctttccttcaggatcacacttctatctgtattgttgggccatttataccctggtgagaattacaaaggatctagtgagggtttcatgtgtttggtttattataaaaaccattttcttggggaaaaaaagggggggtgggagggagcactcttctgtgaaatcataggtaagacttttaagttttgctaagcaagctgacttttgttattactaatgaacacacagccttgtgttttctgtgctctggcccatcctcatatggctgagttctgttggtattgtttttctttattttggttttggccttgattgtttaccttttcttctcctgtgagcaccagaatgttgtcaataaacacagcttagtttttgaaaaaaatatctcatatgtttatgggtgttttgattgcctgtatgtttgggtaccacatccatgcagtgccctcggatgccagaagagggcattacattccctggcattggagttagctgccatgtgggtggtgggactcaaaccctggtcttctggaagaccttaaccatggaactgtctctccagcccccacagcttagttttgatttgactttctttatttttttttaataaacttggcattcgtggcgttcactaataatttgtgagtttcttttgatggacggggcacctgcaaagcttgtctagctctgcccaaggaataaaattgccatcgtaagccatgaacatctgggagaatttaaaatccaagtagaaaagcaaagcaaaccctaagcactgtgtacagtgccaggtacagagaaagtgcttccaagaccaaagagggaggggttgtcatagttactgttttattgctgtgaggagacaccatgaccaaggcagctcttacaaaaggaagcaattacttggggacttgcttacagtttcagaggtttaatccattatcatcgtggtaggaaacatgatagcatgcaggcaggtgctggagaagtagctgagagttttaaatcctgatctgtagggagggaaaaagggagggagagagacagagacagagggagaaagaccaagagaccaactgatctggcttgggctttagaaactgcaaagtccacccccagtgacacacttcctccaacaagaccccgatcctttcaaacagttccgctccctagtaactaagcagtcaaatacaggagcctagaggggtcattcttgttcaaaccactacattctattctcagcccacataggctagtagtcacatcataatgcaaaaatgcagtcaacccaacatcagtccccatagtctatcccagtcttaacacagtgtaaaagttcagagtctcttttgagacttatggcattctcttaattgtaaccccttgtaaaatcaaagtaaaaaaggagaccacatattttgaacatgcagtgacgcaggatatatgttactgttccaaaagggaggaaatggagcatagtgaggaaatgctggaccaaagcaagactgaaagccagcagagcaaactccaaattctccatcactacgtctgaggtcagagggctcttaggtctccagttcctttcagctttgttgactacatcacacttttctgtctttggctagttccaccttcggtctgtagctgctcttggcaggtgtctcatgattctggcatcttcaatatccaagcgtctccagtgaaatgccaacttcactttcacagcttcactcagtgacttctctgggccttcatgaagagatagccttgacacacacctggcctcaggggctttccttagctgaggagggaggttccacaacccctttctgtattcttgactctaaagctagaaccacatgactgaacctctcaagttctgctgcttaatgaggctgctacttggccccactccttcagttatatttgcatcagctttctgtaattgatggatgccttcattgcttaatctttaattcttgttcacaaattggaatcttagctgggtggggtgattcccagagggcaccattccttttcatctgtgtagcatcaagcttttaagctttttatcaccatgaacactagacttggctccaacagaatattccctgctgctccttttctcctcatactacattttaggtttctcttgtcctgcttgctccttttcattatagatctgtgggggagtgattactaataaccatacaacacagtcactactagggtatcttaaaatcttctctgccaacaccattaatccaaaactcttcaggttagcctcacgcagattttttttaaagatgagggcacatagcaaaatattcagtaagtatccaaattgccaaaataccacagtagtctctaggacacttactaatgctcttcaccttgaaacctcttgagctaggcccacattgctttcagcactactctcctcaatgctcctactaggatggctcattaagtctcaattaaagcattcagctgctttcctaatccagattccccaaatctacatttccattacaataagcgtggtcaatgcttttgccacaatatccaactcccagcaccaacttctgtcttggtcactgttctgctgctgtgaaggaagagtcaccatgaccaattcagttcataaaagaaagcaattcattggggcttgcttacactttcagagtttagtccattgtcaggtggggaacatggcagcatgcaggcaagtgctggagcagtggttgagagatttacatcctgatctgtaggcagaaacagagggaagttctagaggggggagagagagagagacagacagacagacagaagcagacttggcaacaggctttagaaacttcaaagcccacccccagtgatgtacttcctccaacaaggccatacctactccagctaggccatactcctagtccacctaattctttcaaacagtacactccctggtgacaaagtgaccaagtatataagcctgtgggggccatttttgttcaaaccacggcaagggatgggtgggcattggcacaaacgtgtgggctatttcccctgagtcagaaagtacattttacacatatactcacaggttgtgtgaagatggatgtcctgaatggtgtagcttgatctcccagtattctaggaataacacagctgtctctgtattcttgacattcttataattattcttatgttatttagttaagcttagaggataacctggatttgctgagactcagaacaaagtagttgttacaaaacagaagccctgggtcaggaacatcaaaacaacagcagaagaacataggcagtgacatcgtgtggctggtgccttgctgcatagggttgcacttggattatctagtaatttggttttgcaagaattgttaaataattatcctgatctatgtgcatcattatactaaggttcaaagctcagtaaaatttctaagtataagcccatgtttgaaatctagaactttgtagttctagaacattggctggttccagaatataggatattattgagtggaaaaggacctgtgaggaaagaccctgggagtcaggggttaaggaagaattcctcatttataaacaaccccagacttacaagtggtacaacactcatgtttctagaacatttttctggtgatctgtcacatgatcatgtgatgtgtctgtctgccggattagtatgacagattcagaacagcaccaaagagcctaatagtctcggtgtaggaagggtggcagatttaggctgcagggagaagacttggtgggtgatagagatttggagcaatgagtggccaactggcagagtctgacccactgagtctgaaatgctaatgctaaaatctttggtttatgcaattcacactccacaactaaatcttctgttcaaataacctttgttagcacttgctcgtcttttgatccagcaaccagttgatgattgtgagggtttatgattatgccttatgggttttcagtgtgatgtagaaagacagacctaacataaatattcacagataaaccctaagtccagctatgaaggaaaaagaatgacagggtagcaaaagctcaggggtgggctggggaatcagggagggtatcccgtgagtgtggggacttttagagacactgaccaagagccgaccagatgaaggttgcctgggaggtagagcagtggagatagcacatgagaagcccttgaggctgagtggaacaggacccttgagaaccagataagtctctgaggctggaacacagggaaacaggcccagtaagaggaagccacgctgtacatggttctgtggaacgtgattggaacttccaacttcatgttgaacaaaaattaaacacttaatcagttttccctaagataaaatgatagttttctctatcatcttggttattagtttgacatacctgggacgagggaacctcctccatcagagtgatctgtgggccactttttgattgctaattgatagaggaccagtccactgtggacggtaatgtccctaggcaggtgggcctgggctgtgagcctgggagcaagtcagtcattcttccatcatttctgcttcaggctcttgccttgtcttccctcagtgatggactgtaaactgtgaggtgagcaaaccctttgctcgccaagttgcttttgatcgtggtgtttattgaagtacagaaacccaactgggacaaatagggagagttggcttgttcaatccaggtgtggcctgacataatcataagggcccttctaagttcaagaagcactaggacaaggaacaaggcagagttaaggaggcacagtgctggctaaggaggaaagggaggggtagcaagccaaggctgttggcttagcttcttaagttgaagaatcttgtttgaagccatgaagcttgtagtaagctttcccaggagcagcagaatatgaacagggaggagccaagaggctgttaaagactcagaggctctaccacagggcagagtatcagaagttctaccacagggtagaaaaccagaggctctactgtggagcatagtgtcagaggctctaccatgaagcagtgtcagaggctctaccacaaggcagagttttagagactctcccagggagcagagtagaggagaaaatgttttgtactaggtaggtggtgttgggatgacagaaagagagatggagggattcaagctacactttatatgatgtgtgctaggaattgaatccaaggccagtgctgtgccactgagctgtgtcttcagcccaggaattttaatatgatttggattaagtcatactgtgttcctcaaaggttcatgtgttaaaagcttggtcccctaagtgaagctattactgtctaggacagtggttttcaacctgtgggtcaggacccctttggggatcacatatcaaatagcctgaatatcagatatttatattattattcatagctaattatagttatgaagtaacaacaaaattttatggttggaggtcactacaacgtgaggaacgatactaacgggtcacagcattgggaaaggtctagggattgattggattttctctgccagttaaagaattaaaagccaagaagaacctggagttcaatatgtagcacaagggaaagtctgacacagcagaaaagagcagacacaatcagtggtaaagaaaacttttattagtggtgcggaaacacacgtgcagccagcacactgaaagatcccacaaagtagaggggtcctcaggaagccagagcctgttgcttaggacctggctgttaaagaccttgaagaggcttctctaatttggggttcataaaatttgaagagagacatggtggctgaatggcctacaacagtgtgtaccgtgtcctgctggccttgaacttgttgaatcagtccatcaccaggagccatgggtgggagtaaaaccaacaaggccttgtcttaagcgagggtgagaaagaagttgccatcttggaaattctccatctttattacagtgttatggttcctctacctacatgtctgcccatttaaggagtctgcctcctagtccctcaatgctattggaacatagtggtactttaagaggcagagcttagggctggtgagatggctcagtgggtaagagcacccgactgctcttccaaaggtccggagttcaaatcccagcaaccacatggtggctcacaaccatccgtaacaagatctgactccctcttctggagtgtctgaagacagctacagtgtacttacatataataaataaataaatctaaaaaaaaaaaaagaggcagagcttagtaggtgtttcttaggtcactgtgggtatggagtcccacaagccccttgaggtcttgcaagaaaggatcaagcctgattctacctgtcctttctgcttctcgttgggatgcttgcttgttcttggaggtgctttcatcattgtcacctgccaccaccatgagccaagaggcactgtgccattgaaccttctgaaccctgagcttgtagccagtcagttatatgtgcccatgtggcatcaagtactaaagtcacgaagggagctggaaattgaaatagaagttttagcccctaagctcctgggaaaagcgttctgtaaatgtttgcactcctgcaaataccaacattatgcatgtgtacgtgttgttattattgccatttggctttgttttgagaaaggatctgtggagccccggctggcctcagatctgtggcaatcctcccgtttcagcttcccaagttctgtgtttacatatgtgtactattctatttggtttagattaccatttttacattttagataatagaattcacttaatattttcattattgaaaaaggcatttttgcagactcttataacgtccctgtatctaagcttgaggtataggttagactcagatgattgatttttcccccctacggagtattttactaaatttaaaaagtaccatgcccttagtgccagttgttgagacttatatttgcttgctctgtgaggtgttttggactgaagatcaaacacagcttgagatgccatgggaagatttttccctgaagagtctttctagtgctctgtcaaaccaagcagtcttccagtattaaacagctctggctgtgcctcgagcataggagcaggtgggttcctcagtcatctttcggctgcctcagtgccaggaaagagcgaaaactgggctagggtctgaaaaaccagtcttgtctcagcattggagtattgggggtctgggcgtggagctcactggtagagagcttgcctgacagtcacaaggccctgagtctctaaaactacataaactggacacggtggtacatgctggcggggtggaggcaggaggatcagaagcccatggttgtctttttacaatatagtgagtttaaagctagtctgaactgcataagatcctgtcttttaaaatggagtattgggtccttgaggttgtaggttggggttcttttaaactctatatgcaacatggagtgaaagagaactcactgtatgcaagagaggtgatttcggcttgtctctgtcatggtctggaacttgaggaagtgagctttgcaatgtctgccttgagagaagcccaggagcaggtccgaggtgtgcgcctccttacaccagtttgtccagatatttatgcctggggtgtattgtctgctttcccgggagacgtggagcttcacaaaggtcagccacatggggactgggatccagcgattctcagcagaagtcctgcctcctcagctctggtgaccgcatggctggagtgttttctgagaagcaactgtgtgctgtgttctgggaagggacactgtagctcgcatatgcttttgtctagacttacacctgtaacttcaacaacttctgagtcctagaaaatcgttgaccctaaaacaggaatgcctcagagatgcaggagacagctgaaaacaagatccagctgtgtagcccaggctgactctgagctaatcctcctccttccagtatccctaatgctgaaattacaggtatgtgctaccgtgtgtgggtcgggatgtgcatctcagtgaaagacacaacgcttctccttaaggtcaagaacagagtgcagatgccctttcccgcttgggaattactttagaagttctcaggtaagaaagcaagacaagcaaaggaagaggtgcttccgtgctaggagaaggaagtaaagccctcacgtgcctttctcagcctgggcccctgttgtgaggcggttccgctgtgaactcactgcagcgtacctgtacctgccgggtgtcagcagctgtgctggccgctctccctggtggcttcactctgtgagtcagtccctctaggaagcttcccatgttggcatttaacacctttcaaatccagaatctctagttctcatagtccccattgtcgttgtatctgcgtgccactccagagctagcacttgagagccgaatcattgggaaaaggatcagctttattcaaggccagggccctgagaagagggcacaacccttgagttacacgagcagatggttataaggagggaaaagggctcgtgggggacgacccttcagttaacacgagcagatggttataaggaggggaaaggctcaagcggctttgttctttgctcgggcccgatcctgacagtcagccttcactctcaggaccggttccagtaactcctcagacaaacactatttcctgccatttaaaaagcagggcagtttacatgctttgcgtcagtgcatgcccagatgttatctaaaggccaccagatgtttggggttccataaatcccaaggcagtgttactgttttagttgcttaggtgtgacttttcttcagagagtagaatggtagacaagggagaggacatgaccctgcaaagggcaatccccaacgaaagggctactgttgcactaacgtcttttctttaactttacatgggtaatagacaaagtctctttttgtagtccaggctagcctggaatgtgctttgtagcccaggttggccttaaactttccaactttgtgccttgggctcagagacttgccaccatgtatagtcaccatctctttaggggtagtccctgtttggtgagacattttcatcattaattgccctatttctagttacatgtcttatacattcttgtgcatgtgtgtgaatgtgtgagagtgtgtgttagtgtagttctgggtattcagtgaaagtaactaaatggtttattttgagacagagcctccctatgcaaccagggctggccttgagctcatgatcctcctgcctccgcctcctgagtgttgggatcacaggtaaataacctcacgtctgaaccctgttttattcggttagttctgacctctcctagtggccgctggagtttgggccccatcaccgtgtgtagcttgggtacttggctgaacttactgtatgagtgcagcttccctcacactgttcttgctgagtcagcattgcaggttgagcttggctcaagtcccctaggcagtcgggtgtttgctccttactttggttgtgtgtggccgggagactggtcttgtggttgagtgaggattttgtgggctgtgtatggggtgctattttactgtttacccagaagtagtttcatgaggtttccttttggattactcccaagaggacctagtcctgggattactctgtgtgtgtgtgtgtgtgtgtgtgtgtgtgtgtataaacctgggtttttagtcttccacactgctaagggtgactgagctacatgtttaattgttgtatgaaaatggcgtaacaaaacccattgctttgtaagctaacttgtaaagctaacccttggggatgatgaagtggcctcaagagccttgctgccaagcttgatgatctgagttggattgctgggatccacatggtggaaggagagagatggctcttgaaaattgtcctctgacagccacacttgaggcatgacccacaagtgcaggcagggcacacagatacgtgcatagcacatactaaataaacagcaacaacaacaaaagaacaaccagcccctgccgcacagccttgcccatgggtgagaacagcttcctctgtattcagtgtttatctaagtgatgatgaagccctgtgcctacctgtgtctcctcctttgtagatggcatagatgccacgcaggagcatcttcaggtctgtccagtatcttgctccattctttcctagatgagtacaagcctggaactcttaaagtccttcggtctccatcagtgactgctctaagagggccctgtcctgctctctcctctcctctgtcggatctgatgagtctgccgttgtgcttctgtccacacctcgctttctttggttttcatgaagctgttcagttgctcagaatgcccttagtcttggagtcttctgctctctctttcacatagagctgctccttcaggcagagatgtagacttgcttccttgtgttcctttgcccttgggaagggttcccatgtcacttcgcctgcagctgagtggggaagcctctttgctaatagtgacattgtagtccttgagaaggcagtagtgagagagctagcagcttctcaccatcttggcttcctcttcttggcatgaaacttcacccagggagccaattggactggtgatggtcagggtacagtgtctctgggtccctcatttaaacagaccttccaccatgtgtgtgaactaggagagggagtttttcttttgttgtctctctgaaatagagctgtctcatggactggggagatgactagcactaacaacctaaaccgcccttcctcagtctggagggacaggggccccatcgttggctgagcacagaagagtcagcaggacagatgacgttcattttcttgtatgtattccatcacttgtggaccctcctgagcgtactcagagttaaatgactttgaaaacatactagttgaaaagctgatcttttgggaaaggatccccttccagaggtccttaaccaccccttagcagtatttagtagcagtttttagagacatatgtatatgcatgcttgctttctctgtctctgtctctatctctgtctgtttgtgtgtctgtctgtctgtctgtctctgtcttgatgacctgagttccattcctgagacccacatggtgaaaacagagaactgatgcccacaagttgtctaatgacctccacacatgtgccatggcatgtgtgtgctgtggttcatgaatgcctacatatatgcaataagtaaacaaatgttactttgtgtatgtacacagaagtgtgtctgttttgagacagtgtctcccaacatacttgccttgaacttgtctttttctgtgttagccccacaaatcctgggaattgtgctgtgagccccatgataccaagtgctgattcttctttatagagaggcaaaaatgcctttattgccaagtgtggcttccttaagtatgcttattactaaagcaacttgcatttctagtaacattcttattagaagtaatcagtccagaatgcaacattatgttccgggagatggaccaggatttgacttgaactcatctgccctgttgcttttcagttgcttgattcagatggcgtgtacccaggtgctatgaatacagatgggtggccttggagacaggctccaccagtttgcacatttgaaaatgggaaagatgctttgccacgtgatgctagctgtttcttctttgcagccttctgcacaggaagtgtcattttctcacagttaggaacaggaaaatcaggccagatgtggcattgtaattgaactggcccattcatctatcatgcattaagtgccgcctttgtgttggatggcttgcatatgttcttttgattacctgtagacatgccctaactagagctgttgttactatggtgacagcattctaaattattttatttaagccaaattatacagaatagccattcctttgtagaggaaactcactataaaagatgctaagggttttatgggatgaagtgaattatttgaaagaaagctaacacatatgtgaagcttggcagcagaggagtcaaggactggctgtcggtggaaatgagaccatggggtaggcacctggagggagacagaattctagcaggcctcaaaggcttnnnnnnnnnnnnnnnnnnnnnnnnnnnnnnnnnnnnnnnnnnnnnnnnnnnnnnnnnnnnnnnnnnnnnnnnnnnnnnnnnnnnnnnnnnnnnnnnnnnnnnnnnnnnnnnnnnnnnnnnnnnnnnnnnnnnnnnnnnnnnnnnnnnnnnnnnnnnnnnnnnnnnnnnnngttgtgttcctcaggttaaccttgaactcctggactcatgtcttaccccagcctcaatagctgggatatgggctgtggtggctggcttgtagactggcctgccatgacagctcaagcacagagtcagggcagagcacactgttgtagccacgggagggaacctttctgttaaccctgtcccttttctaatagagaaaatactgaacctgtagcccagtattatcttagctatttgcttctagcttgtgtttccaagttttcagagtacttttaaaatacaaactaaacctgctcccacccctggctttctttctccatctcctgcagtgaaatggccaaacgggatgaacagtgctggaagaagaaagcagaagtgtgcaatagctaacggggcagtggagttcacagtttaggtcattgtctttattatctggccaagacacataaggtaaatggttcattctaacctgaagcccccaatcccaggccattctgtgttttcatttcttagcagttgatcaactttgaagtcactaaggagtgacaacaaggacaaaatcagaaaagtgatcttggagtgttcctaggcatgaataaaaaaattaaactaaacgagcccccttctgagagcccagggactcacagagagcacagtgagcagcacagtgagcagcacagtgagcagcacagtgagaaggacagtgagcagcacagtgaacagcacagggagcacagtgagcagcacagtgagcagcacagagagcacagtgagcagcacagtgagcagcacagtgagcagcacagagagcagcacagtgagcagcacagtgagcagcacagtgagcagcacagggagcagcacagtgagcagcacagtgagcagcacagtgagcagcacagtgagcagcacagtgagcagcacagtgatcagcacagtgagcagcacagtgagcagcacagtgagcagcacagtgagcagccacagtgaacagcacagtgagcagcacagtgagcagcacagtgagcagcacagtgagcagcacagtgagcagcacagtgagcagcacagtgagcagccacagtgaacagcacagtgagcagcacagtgagcagcacagtgagcagcacagtgagcagcacagtgagcagcacagtgagcagcacagtgagcagcacagtgagcagcacagagagcagcacagtgagcagcacagagagcagcacagtgagcagcacagtgagcagcacagtgagcagccacagtgaacagcacagtgagcagcacagtgatcagcacagtgagcagcacagtgagcacagtgagcagcacagtgagcagcacagtgagcagcacagagagcagcacagtgagcagcacagagagcagcacagtgagcagcacagtgagcagcacagtgagcagcacagtgagcaannnnnnnnnnnnnnnnnnnntactggtttacttattggatttttgaaagcgaatcttctatgtagctctgactgtcctggaactctgtaggtaaaccactctggcctcaaactcaaagagagccacttgctgctggctcctaagtgctgggactgaaggcatgcaccaggaggcccagagctttgtttgatgtttctccatctccctttctaagaagctgcagagcttgtctcccatcgactagactgcgatttcgacatccaggcactcacaaggcttgaccctgctcagcttcggagaccaggcccattcagggtggtacggccagagttagactatgcaaatttaaatgaataatttaaagatgatgatagtaagtcaaattccaaatgaagttaaatcatttttatcagccactgggtcccttttctgatgacttcatcacagtttctacccaagaatgtcagcttttttttctttcagagattaagtatgcatcagttaatgctctagtcagcactgtacacacccattgctcatgcagcataaagcagcatagtgtgtcgcttacgtgtctagaccctgtggccagtctgcctaagccgagctccctgctgtgcgaccatttatactaggagtgcctgtctcatagaggttgttgttaagccgaaagacttcacctctacagttcttaggtgatcacttgacatgtagtcaggaccatgtaagaattagagattgtcaccactgctgcacttatactctggtcaccttgatgcttagaagacactgggacaggttatcatatctattcaaactttcctgggtacatgaacgcgtggacacactcacgcatatatccatgtgtttatgaaagcaagtatagatatattttaactaaaacattattgcattattctttacctttatagcctttttttattcttcatgtcacattttagaaatgtctcttcatgccattaaatgagatgactgtttggagtagcaaagaggatgcattctggtcttaagcagttttgatgcaggggctcctaacaagaccatgggcaaataatgacctccctcctgggctgcatgggctctgacatctcccacctaaggaggatcatcagcctggtgtatttgttaagctgcttccagggccaggatgcagataggtgtcatgtggcactgtgggaaagacgttggaatctggctcttggtagggaaatagaatattccataaagaacattggtcattaatgggtatttccttctccgcctctcgctggctttccagaagatgtttcacaagacagaggagttctttcccaagaagacagacagcgatgtggacgacatggacacatcggacacacagtggggctggttctacctggcggaatgtgggaagtggcacatgtttcaggtaccctgccccgagcttcacaggccagggctcactggtgtgttgagtcatgctcatggaaacctggaaagaaccagccctttcctaatgggaagcagagtagctaggagcctgtgtcctcccctggctgtaggaaacagtggtgagcttagacagggagcatgcctgggtgatggactccggccggatctggtggaaaccgggagggaagagtggtcatccgtgttcagcacctgctctgggtatcatgttaggtactttatgcatcctgtgtgtcctcacaacagctctgaggtagatggtgcttctccatcttctgtcaaagacagggactcaggaaagtggactgcttatgcccactcaagagtctccactcttgagtgcccacacaggaacttgtagtttggggatttgtttttttcctcccattttatggttaccagactggtgaaaggttttctttgagccacgtggagtaatcctgaggaacttgtgaaaaggctgttacagagaccctcgtcccagtagccgtttcccccggagtcgttaataacttcccacgagcagtcttggcgtgcctttccctgtgtttgtgggagggagagcagcaggcaggaggatccctcattctctgtcactgggagctcagctccacttctgcggccaacccatcactgtgaacagctggtaaatgcaactttctggtttgtcttaaagccggataccaacattcaatgttcagttagcagtgaagatatcgaaaaaagcttcaaaacaaacccttgtggctccatttcctttactacttccaaattcagctacaagatagactttgcaggtatgttttcccgcctagtcgtgtgtttctagaatattcctagactctcagcacagtgaagactgcagctctgaagtgcaggattagcccagatgtcttgaagcatgaagtaaatcctcctgttctctgctcaatcaaacctgcactgtcaactcttgagcagccctgccattgataaaagcatgtttctatgttcttgtctgttaacatatgtgctgttggccatgtgttttgagttcatgtaaagctctttataacttttggttttgtctttgctttttgttttgtttttgtttttgttttttgttttttgaggtgaggtctccctgtattgctgggctggtcttaaactcaaaatcctcctgcctcagcccttggagtagctggattgcaggtctgtaatgctatgcctgtcttatagcttttaatttactctgcaccccagcagcctggagattgctttgaattgggaagctttttatcttacagatcaagcagataataaaagaggaagtcactgttggctggtgactgtctcaaggcaaagtgaagccatgtgacctttctgctgctacttaggtcaaatggctgcctctttcagtggctgctcttggggtggttcctcatttccctggttctttcacggatgagcccagctgatgtgcagatcagcctcagtttggacgcatgccaccctgtctttcaccccccgtgcagggccgtgttatcaggtgtctcaggaaagcactgttgaattcagcccataagtcccaggctgccttcacactgtttatggctttgatgtgaaggaggtgtgagcggggcagtgtctcaatcactgtacatctagtggctctacacctcagccttctagctattcttctccagttgctgagctgtgtctttccaacgatggtggtgctggtgtgctgagaatggagcagaaggcccgaaatgcttttccagaagtggaaagggtttggcccgaaatgccatcctacaaacctgctttccttgcagttgctcataatcaagaataaatcaaagaatagatggataaattaaatttaaaaagaatgaaaccatcatatttttactttcaaccaatcctgactttaaaaactagcattaggaaccaggccgcccatgggggacaccggcattgatgtttctgttctaggcaggcagaaggtgcttggcagatgttaccagagttctgtactagtgtgtacaagcacagttttggagggaaaacagacacagcgtgatatagacaagcgtcaggcttcagaaaggggctgccacttgttaaagtgtgtggtaggtgttcagcaggccactgtgtctaagagtagtcgctagtgagctatactccttggggagatcccaccaggaaatagaacttatccagaatgtctttctagacactcagaatgtacttcagttggtagaatacttgcctagcacgaatggaaccctagcagagcataaaccaggcttgctagtacatgcctgcaatcccagcactcaggataaggaggcaggaggatcagaaattcaaggccagtcttagctacataatgagttctaggccatctttgcggacatgagaccacatatcaaaaaaaaaaaaaaaaccaaataaaaaaaattccttgctaaagtatcccagcagtatgtggcagccagcgaatgaatggtacagttttccacatgttttcagggttaaccccagtcaccctaccactgaccagcttttttttccctgtgaaagtcatggaaagtaaattcagatggagacagctgtgacaatgacgctacaggtttggttttgtgtactgagatgagaatggtgacagtactctggtgagtacaggagtggcagagcacactcagcaccagcatttgacaagtgcagtggcatcaggtgtgcaacctgactagtattgtgctaagattcacagcctggttgggaggtgataaaatggacccagtagatagtgccatggctgaggtgtggacagaaggagctggccagatggtggtcttctgttactgagatctatggctccctctccctccccctccccctctcatctctccctctcatctcttcctccccgcctttgatttaggtcttcagtttaaagaggagtaaagaaacatgtacatttgaaatgctgttcattgtgcagattttatatgaaaacagcctctttctaattttcaaattattagggaaaccaaagtgtacttctacgtgtaacaaatccagtagaagattttaggtgattttgttctatactcttaactttcctgcctttagaattcttgtattttggtgtcaatttaacacacagaggaacaccttgtgagataagcatcttggtgtgggccttagatcaagcactgaaggaaggcgctgcctggcacctttgcaacatgataaaaaggtcacataccagctgtcagctctctccaaagctgtgtaaccttcatgtattgtggcactactctgcactgtgtgctgctgtggctaatcggatgtgtctatctttgtcttcagaaatgaagcagatgaatcttgtcactgggaaacagcgcctaataaagagggctcctttctccatcagtgccttcaggtactaaaacgggtcccacggagggtgggcgggcgggcggttgggtggggctgccctccccctgctctttcttactctgtggcagaaacctaggtagactgacattccatggagtaacctttgcagtattaaacctcgtgttcactgatggagtcatcgttatcttctgtcactgtttcctttcattcttgtttgtcatgtgtaattttcttcaattcttagactagtgtgcatgataattacaaggtgccatatgttttttgcttaaaataggctattgagcttatgtttgaatataaactggacatatggtcacagaattttccagaaatttgaccataaatcttagagaactgcccatttggtgtgcccctgcactaatgtagattcccattgggtatctacttgttcatctgtgcctcttgtatataacaccagtccacggtgaccaaaaacctggggcagcacagccactgtgggcagcagtgcagcatcttccctgaagcacctggggtgcacgatttcctttcggttccctttgccatctatagactgagaaagaatggccaagagccaggtgtagtaaatactttatttgttgcaaatgggaagggaaagcaagtgaaaaaatttaagagtatatctcctattttctagaacgaccactcaagcaaatattgattttctttttctatttggagaacttaggatgcagctcagaaacattattcgagcgagcgtatgagttgtaaggagtcgccttgctccttctagggcgtcctaggaaaagtagagcaaagaaaagggttgaagaaactagaaagaaaataaacactttttctttatcaagatgtttgacttgcattctaacatcataatttaaaagataatgatgtctttcctgggtctgtggaacacagagaatgtttctacctgctgcaacatgtatgcattcctcatgggcaggaataggatacagcaagcgttatcctctgtagtgtgtagtctggggatgagacacaataatgggagggattagtaggtatgatgttatatacatgctgagccatttccttctgtcccagactatacaaactgaacaacagagacagaaggggctgactagggggtggggtgtgtgtgtgtgtgttagggtgtaaccggagctgaggacaacaattgaggcaataatgacaggggaggagttaagtagggaagccccaggggatggtagtcaggaggtgctgatgcagaaaggttagcggcaggatgcaggatgatgctgggcattcctgaaagcctggtgaatatgtgccctgtgaaagccatgggtacatacacgttctttaaacctttccgtacagctggaagacacattgaacaaagtgggggggtggggtgggggggtgggagagctttcaaaaaacaactcagtgttgaaattaatttaaataataactcctttagtatttgaagttcttctagaactcccttaagaaaatttgaatgttcctcctattatactcataatgaagaaaatatgagtttatgccagactcctttgttagcagactgactgaaatgccaaagtgggctaacatgttttcctggagaggttgctggacggacgataggtaccctccacattcctggtgagaaggtcaataagtgcaatgttccaaggctccatttgggcatctatgcatcagagttgtcagtcagtacatcctttgactctggagtcccactttagagacgtccttcttgggcacacgaaataacagatgggtagctttggtctttgcagcactctgactggagtagcaggagttgaagcaaactgagtagcaccaggagcgtgcagttaaatcagtgatggttctgtcaccaagctctcctgctatttggcacccaaatcctccggaactgcccacttcccctgcatcaatgcagagccacattgggcagtctatagatgacacaccaagccccgaggaagacactccacagcagaagctcttgagcccctcttcccctggtctgggatgcttatcttcttttacgctccctctggctgtgcacagatgggtggaattgtgtgtgtctgcagcagagcaggcctttactcattgagtgttgattaagtgccagccatgtgctgcacttccctctggccatgagaagaggagactgggtacatactgataaagagtttgataagaattgattaaatgaacaacaacaacaacaacaaaatgggtgttttgtgctgccatttgtgttgggtaaaaattggctttctgaactgaggaagctctgaaaggacatcgggatctagaaacaatgacttgtgcacgcctttagtcccagcacaggggaggcagaggcaggtggatctctgtgagtttgaagccagcctggtctacagagcaagttccaggatagccaaggatacacagagaaacccgtgtcaaacaaataaacaaacgaaagcagaaacattgtgtgtgtggagatggagtgacgtgtaagaactgacagaatattggctggagctggagagagggtcccactctgcccttcttggcacatttggaacatttggttgtgagcctagcctctaacagctgatccatctctccagcccatgggacattctttgaatggttcccagcacccacacctgtacctcacaactgactgtgactgcagctccaggggttggatgcctcctctgccttctgcagccacccacacccacgtagcacactcatacacagatacacacacatacaaataaagtcttaaaaaatatatatatggtattgggattttttctaaaacttttatgaaatttgacaaaagggagctaaagtttgtaagtttgtaagtttcttccactaacttttggtttccaaggaaggttggtatacctgttgactgtttgctagtgaaatctctcaccatcctctctctctgtctgtgtcctgtggcatgactgtatctgatggcttttaagatttgctgctgggcaagtcaggatgcattgtctgcagaaatagtcggcagagaagagagggctgggtcaggtcttgtgggacagaggaaggggaggctgagccatcctggaggacagcagtgactgctggaattctcagtttcattcagtaggaatatgaagaaacactttgattttttttttaaagtcatcctaatttttcttagaaatcccttttctttggctgaaacattcttcacattttatagaaatttcaacaaaataaattgaattgcctgtttttgaaatgttgaagctgtgtagatttgtatattcccatcatcctttataattcagcatgttaaaattaggaaacagtcattcagtaaatatttttaagtgaagccaagggttaaacttaatcccatttgtcataatgccttgcaaacagaaacctcagctgtggaggaaaggctaaaccccgacatgattctaacctgcttctgacgctctgctctgtcttttgctgtttgaagttacatctgtgagaatgaggccatccccatgccaacccactgggagaacgtgaaccctgacgttccctaccaggtaggagcaggtggactgtaggacaggcgggcctgggccgtcagtggacgaggcctgctaaactgtcatcttcctctcccagctggtttccctgcagaaccagacgcacgagtataatgaagtggccagtctttttgggaaaacaatggatcggaaccgaattaaaaggattcaaaggatccaaaacttagacttatgggagttcttttgcaggtaagccacttcctcatccctcctttctctctctcatctcattcttctaagttatagagatggccacacacagaggttagctgtactgacttaaaaaacaaacaacaaaccaagagttagactattcttcttgtagctttttgcttgttttgtttgaaagctgctcttctcttgccatgccgtaattttactttacatttatttatcttattttatgtatataactattttgcctccatgtatgtctgtgcaccacgtgcatgcatggtgcctgaggaagtccgagaagcattatatgtcctggtcctggagttacaggcagatgagccactctgtgggtcctgcaagagcactaagtgctcttaagcacggagccatctctgtagccccttgctggcctctcagctctcctccatccttggagagtagaagagagcttttctccagtagagttcagccactgcggtgggagaagcgtcgtctttgctaggtccagaattgcatcttgtttgaagtggagctctgtagcttttctgtggcttgcttgcttcagcccttagattgaattagaaatctttgacccaaattagaaacactgacttaaaaaacaaacaaagaacaaggagctacactattcttgcctgtagcgtttttgcttgttttgtttgaaggaacactttgtaatttaccttcaaattctcttgcttcattcagagtttgtgctgtgggtttttaaatctctattcattactaaatctaagttagaaatgactgttagaattctccaatgtgcctctaacctaaaaataaagctcattatataaaatttaatttgttgcccaaactaaccctgttgtgttgtacttttacaataaatattacttaaaataagtggtcctctgaaatattttaaataaacatttgtagatgtgatttgatttctggtatttttattataagcttttaatgatttattccaaaaaatttcaaatgaacacagaagtaggattctaccatcataagcaccattgtacttgtgatcttgttcagtatttgttaaggcttgccctataagtcaggtgaggaggcatacccagctagcccagcacacagaaagataagacaggaggattgagttcaggggctacagagcaattttggggccagctcacattattgcatagtgagaccctatttcaaagagacaatcaaacaaacattcgtcaaaattagactaagattaaccacataattggttgttttgttactgaaaaatatttaaagcaattcccaggttgtcacccatctcatttgcgtgtacttgagagttcgactgactttcttttagtgattattatagttctgtttcctgttgctatggtaagatatctggaccaaaacagataaaggtgaaagttgatttggcttacagttccaaattacagtccatcatttcaggaaagtcaagtgataaggaaagtaaggatgttgaagcagcctgtcacattacacctacagccaagtgacaaatgaacgcgtgcatgctagtgcttagcctgctttctccactcttacccagttcaaattctctggcctagggaatggtgccacctgcagtggaccatctcagttaacctaatcaagaagatccctcaaagacatgcccacagatcagcataacctaagctattcctcagtgagactccatccccaggtgattctacaatcagaactaagcatggcagtaagggtatatgggattctgtgggcccaactctccgggcctcagtttgtttcagaaattcttggaagaatttataataacagtggggttttcagcttgtgctttttatagttttgagtatttgaccaaacaccttttgtttttgatagtgactgactttacctgaatatagaaggttttattccgtttgtttgggggaagacagaagcctctgctccctgtgtctttattctttcatgtttttattccttcaatgaaagaataaaattttttctaaagtgagttggtgaaacttttatgttttcattttttatgattagatttatttattttatgtgtatttagtttttgcctgcatgtatatattgtgaaccacatgcatgccgagtgcccatggatgttaaaagagtgtgtgtcaggtcccctgggactagagttccaggtggtggtgagctacattgtgggttctaggccctgaacctggtcctctgcaagagcaacaagcaaccttaactactgagccatttctacagcatctgttatatcttctttttaaaaagaatttgtttttctttttttatatacattggtgttttgcctgtatgtatgtctgtaaggacatgggatcatggagttacagttgtaagctgccagttgtatatgtgtaatttaacctgggtcctctggaagagcagtgagtgctcttaaccactgagctacctctccagcccctatttattgttctcagttaagcctatgaactggagttctcacgcatctccttcatagtcagaactcaataaaaccatgtagtaaatgtagtgctgagtccaacagcatttcatactaagagcttactagaaattttccttgatttatgccctttgtgatcttctgtaatatcaacccatagacacctaccatgacagtgtaaaatattgaggcttatggtagaggcagcctgtcactctgacatctccctgaagagctaaaatagccttactggtctcattgatgtggaagctatgacacaccatctggatagccaggccctgagtgagtccactctgattcacactggacattcttacttccctccttccatttccccacaggtcatcggatctactgttttatgataggcagtactgtaggttcttgggatttgatggtatataggtctgtaggtcaaagaaccaggccactgccaacctgagatgtatggttgagcacagattctcatggaaacataaaaggcatcagtttacccttgcccataaaaggaagactctgtgtcgtggcatggcgtgggaggtggggggagggtactagggagaatgtcctaaagctgctgtttattgacactagcctggggacaggagaacatcttagacatgggaatatcatgacccaaaatttagataaaaaatgggcacaaaaaaattcagagactttcaaatagaagaacattagggtgaatggccttaaaaacctagccaagaagtagagtatgcaggagcaagtagtgcnnnnnnnnnnnnnnnnnnnnacacactcttttaacatccatgggcactcggcatgcatgtggttcacaatatatacatgcaggcaaaaactaaatacacataaaataaataaatctaatcataaaaaatgaaaacataaaagtttcaccaactcactttagaaaaaattttattctttcattgaaggaataaaaacatgaaagaataaagacacagggagcagaggcttctgtcttcccccaaacaaacggaataaaaccttctatattcaggtaaagtcagtcactatcaaaaacaaaaggtgtagggagggagggaggaagacagagagaatatgaatgaattatatatgtatgtttacaatgataattcaccaggttatactgtaggaaaagctttaaggtagtggctctcagctgggagtgatttttcctaccaggaacatgtgatcacaaggagacatttttaattgtcctgtggtagagtgtaggagctcttggcacatggtggatagaggccaggaatgctagctatcctgtaataggcaggtcagcctccacaataaagacctaaatctatccccaaatagcatttctgctaatgtggtgagccctggaatcacagctcgaagccggggaaccagtttaggaaatggttctgtaattacactgagactttgggtggcctctcaaccaaggtggggactgcagtgttggaacaacggcaatggcttggaggtgttcaggatgtaagatcatagggcttggtgggtgatttttgtttgtacactgggtgagtgagggagactggcacagctactcctagatgttggtttcttcaccttactcgactagaggagtttgagtagaagagagacttggtctttgttgagatcatgggagggagcagcagtagatactcaatgcttgcctctggaaattgatttagactagtgacaaagactagaacatacagggtactagcaacaagggatgctaaggtgtgtgtgtgtgtgtgtgtgtgtgtgtgtgtgtgtgtgtgtgtgtgtnnnnnnnnnnnnnnnnnnnnnnnnnnnnnnnnnnnnnnnnnnnnnnnnnnnnnnnnnnnnnnnnnnnnnnnnnnnnnnnnnnnnnnnnnnnnnnnnnnnnnnnnnnnnnnnnnnnnnnnnnnnnnnnnnnnnnnnnnnnnnnnnnnnnnnnnnnnnnnnnnnnnnnnnnnnnnnnnnnnnnnnnnnnnnnnnnnnnnnnnnnnnnnnnnnnnnnnnnnnnnnnnnnnnnnnnnnnnnnnnnnnnnnnnnnnnnnnnnnnnnnnnnnnnnnnnnnnnnnnnnnnnnnnnnnnnnnnnnnnnnnnnnnnnnnnnnnnnnnnnnnnnnnnnnnnnnnnnnnnnnnnnnnnnnnnnnnnnnnnnnnnnnnnnnnnnnnnnnnnnnnnnnnnnnnnnnnnnnnnnnnnnnnnnnnnnnnnnnnnnnnnnnnnnnnnnnnnnnnnnnnnnnnnnnnnnnnnnnnnnnnnnnnnnnnnnnnnnnnnnnnnnnnnnnnnnnnnnnnnnnnnnnnnnnnnnnnnnnnnnnnnnnnnnnnnnnnnnnnnnnnnnnnnnnnnnnnnnnnnnnnnnnnnnnnnnnnnnnnnnnnnnnnnnnnnnnnnnnnnnnnnnnnnnnnnnnnnnnnnngagctgcagaaactaatggaaccaggattgtattcagggccacatcctgaagtgccagggaagatgaatactggacatgtcttcaggtttgcagcaaaccttgatgaaggggaaagtaatgttggctattgtgtcatgtggataagtaaagattgacaactcctgtaggaagtttggcactggggagtggagaagaaataagtaaagtgtgcaggaagaagagtggttttgttttatttctgtaatggttaacataatgagaagaaacctataaacaaggagaggcaagaagataaagggggagggcagttgattggttaaactctcaaggaagcttgatgggatgagattcagtgaccatgtgaccagaaaggaggtagacacatgtcaaagagagagcctggctagcctatagcactctaacacagtttctatggtgaagtgaagtcacctacgtagaatgaagtactggagatgtggataaagggaaagaaaaaagaggagcttacatggccaccataggaagtggggtgggtcagaagaacctcaaaccacaggagttcctacactgaagcttaagccacaggtgaacatggagcgtgtgagtatccggagggtcttgtggaagtcacatgtgacttagaggtacagttggaagagcagcaaggggaaaaggctggagcagtcagagctgccaggaaatgagagcagtgggacccctgtcctgacgaggatgtgggttttgatcaagcagaagatgtcagacctggctttgtatcagagccctctttgggattctttaacaggtagaggggcccatcacccaatccagacctactggctctgaactcgtttctgctatttgtatctgtaaagagttctgtggtggttctggtgttcatctgaaatggaaggcagagattctaaactcagatgaacaccctcagtccagagcatgggggcactgcttccctgagacagtgtgtgagccagacactgggcttttttggaacattggtcctcagaagaaggggacactgaggcatctttgaaagctgggtaccatagtgctttgtgtagattcataagtagatgtggtctgatccactgggcaaggttgggaagcatttacggtaatcttaggtctttccttgcaagtttattcaagtttctggcagaccaaaagcgtggtctgtgagcttgcttttcctgtgtgtattaataggggtgcaaacctttaaacaccctgccttctctgtttctgcctggtatctgtggtctctccattccagtagccactcagactctttactctgtggtataatacatatgagaggaacattccaaaccaagattcattttgggttattacattgcagtgtggctggtcgccctggccaaacttcacttcgggaagtgataacaagtgagcatccttttacaatgtgtgtgtgtgtgtgtgtgtgtgtgtgtgtgtgtgtgtgtgtgtgtgtgtgcgtgtgatgaatttatacataccataggtgtgagaagccctcagaggccagagggcctcagaactcctggacttggagttaccagtgattatgagccatctgatggggtactgggacccaagtcctctgcaggagcagtgcttttagcctcagagccattgctccaactccagataccttggctcttagagtggaatctagtcattacaactcataaagctcgaccttagaagtggatgtattaatcacgtgattgctttaacaaagcaacaaccatggtatggattaatgaaagccaaacttcatatattattataataaatcctatgtggggaaagccctttggataatttaactgggcctctctaaagtggctgagaaagtttcttatgatgggagcaatattttccaggcagtggtgcaaaaagaaagagtaatcggctcttggaaactctttgctaagagactgatggtaagcttgcttgcttcttgagagtggtccttgtgtggtttaggtatcagagtaattgtagcttcatagaaagagttaggtagtgtttattctgtttctagtttatggaatagtatgaggaaaattggcatcaggacttctttgaaggtctggtagaaatctgtactaaatgcatctggctgtgggctgttgttgttgttgttgttgtgaggtttctaatgatttctcccatttcgttgtgtgatatgggcttgtttagatagtttacctgctcttgatttaactttggaatgtggcatctgtctagaaaactatccatttcatctagattttccagttttgttgagtatagacttttataataggatctggtgattttttgaatcccctctgtttctgttgccctctcccttttcttttctgactttattaatttggatactggctctcagccctttagttagtttggctaagggtttatctatcttttgattctttcaaagaaccagtttttggttttgctgattctttgtattgttttgtttgtttgtttgtttctatttggttgatttccgccctgagtttgactatttcctgccttctactcctcttgggtgagtttgcttccttttgttctagagctctcagatgtgctgttaagttgttagtgtaagatccctccagtttctttaccaggatatttagtgctatgaacgttcctcttagcactgctttcattgtgtcccgtaagtttgggtatgatgtgtcaacattttcattaaattccaggaagtctttaatttctttctttatttcttccctgaccaaattatcattgagtaaagagctgttcagtttccaaatgtatgtggactttctgtaggttttttttgtttgtttgtttgtttttgttttttgtttttttgttttgtttttgtttttgttttttgttttttggttttttttcaagacagggtttctctgtatagccctggctgtcctggaactcactttgtagaccagactggcctcgaactcagaaatctacctgcctctgcctcctgagtgctgggattaaaggcgtgagccaccacgcccgacctttctgtagtttttgctgttattgaagaccaaccttaggccagggtgatctgataggatgcatagtattatttcaatcttcttgtgtttgttgagggttgttttgtgaccaattatatggtggattttggagaaggtaccaagaggtgctgagaaggtgtattcttttgtttttgggtgaaatgttctgtagatatctgttaaattcatttggttcataacctctcttagttttactgtgtctttgtttagtttctgtttcaatgacctgtccattggtgagagtggggtattgaaatctcccactctaattgtgtggggttcaatatgtactttgagttttagtaacgtttcttttatgaatttgggtgctcttgcatttggggcatagatgttcagaattgagactttctcttggtggattttcccctttgtgaatatgaagtgtccttctttatcacgcttgataacttttggttgaaattctattttattggatattaggatggcaacttctgcttgtttcctgggaccatttgcttggaagatctttttctatccttttactctgagatagtacctgtctttgttgttgaggtgtgtttcttgtatgcagcaaaatgctgggtcttgtttgcatatccagtctgttagcttatgtctttttataggtgagttgagtccattaatattgagagatattaaagagagatgactgttggttcttgatatgtttgtttttgtaggtggctttatgtacttgtgactctctgcttttgactttgttgtgagatgcttaatatcttgtccattcattgatacaggtaccttccttgtgttggagttttccttctaggatcttctgtagggatgtataggtatatagatactgtttgaatttgcttttgtcctggaatattttggtttctctatctatgttgatggagagttttgctgggtatagtagcctgggctggcatttgtgttctcttagagtctgcatgacctctgaccaggctcttctggctttcatggtctctgttgaggagtctagtgtaattctgataagtctacctttgtgtgttacttggcctttttcccttgcagttttctttgctctgtgcattcagtgttttgataattatgtgacaagaacattttcttttctggtcccatttatttggtgttctataggcttcttgtacctttatgtccatctctttctttagattgagaaagttttcttccatgattttgttgaagacattttcaagtcctttgagctgggaatctttgttctcctctattccgattattcttagatttggtcttttcattgtgtcctgaatttcctggatgctttgggttaggactttttgaatgttttgaattttctttgacaattgtgttaatctcttctaccctatcttctacacctgagattctctcttctatctttcctaggttttcaggtttgcctccatttgtgtttttttttttttttattgtttctacttctacttttaggtcttggaccactttatgcaattccttcacctgtttacctgtgttttcctgtatttctctcagtgagttattgatatcctccttaaaggactctatcttcatgagataggattttaggacagattcctgattttcagatgtgttggtatattcagggcttactgtggtgagaaaattgggttctgatgatgcctatgaattttggcttctgttgcttagggtcttgcgcttacctttcacaatctggatatccctggtgtttgttgatctgcgtgattgtatggagtctgcctcctttgtccctgggttgcttctagtcgtctgatagacttttggccctagctatatcagaccacctgtggggccttccaactgggggtgggggctcttcacaggggcagagaagctgctgatctgttgcagtagatcttctgggaagccttcatatggttgggtcttcagtggagcagtcaagctgttatccatctgcactgagtgcagctgatcttcaactgctctgagtgcagccggtcctctaggatatatcaggatatggagtcttcacaggagcagaccaactaggggtctgccccagcagcaaggcatttcatttctgacatcattagaatgtgtgtcttttagttgcctgttatgattaaatttgtcaatttctaatatgggcattttattttgttacttaaattttacttttaaactgaaataagcctaaagaattagatttatctgtcagttgttcaggtatgattagctgggaggggtctgattcgaaaaatcttgagaattgtatttgacttcacatagtatggtagccatttcatggcacctttagctcagtccactggttctggtcacaccagggttgatgagagctgggctgtttggtccctatcaaagaatgtaaaccaagaggtagccagcaaagtctagttaagtaaagatgttttgctgtggagaagggtctggaagctttgctgaagtgtgaggaatagctaggggaatagtgtgtgtttcctggagaacgaagttgagggggttgttcacagttttgggggtggggctatctatgtagttattttatgaaaaaaaaaaaaaagagctgctctgtgtttagaagaatgtcctaggccagtcagtacaacaaagaggtgggttctagtgcagtgttgggaggcgtgtactttgttggagttccagatgatcacagggtgttccagccacgcatctttggcactagaatggattgaagctgctgcctgcccatcatggttatgttacggaagtgctctgtgccccagccttcctatagaaccctgctctttaaggttataaaaatcacttactggtatattctgagtgtgcttttgtgtttacatgtattatgtttttaaggaaaggctcagcacagctcaggtgagctaccagagaagtcagagagtgcactattgtaaatatctttttggtgaagtatttcaaaaccccaaatgccacaggcagcttgcacacccctgcatgcccatcatcagatttgacatctcagcccttcacatgttgtcttcatcccacatctctcaggcagaggcaacaggtttcctccatcccatcccgttcttgtttcctctcaaaaggagatgctttcttgcctgcagaatgtatgtttttatttcctgggtgggcatgtagatctgtataattaatgaactgtgttattttgcaaaatactttgacttttcccacattctacttaggcttattatcttttgtatttatagtgcacatgaacatcgtttattttaacttttgtttctgtgagtcaaggtcttactatgtagctatggcttgtctggaacatactatgtagactcggctggcctcaaattcacaaagattttcaagcttctatctcccaagtgctggaattaaaacaactccctgaatacctgactcctactgtttctatgtaaatagataagtgtgcctccttctatggaaggcttttaggcttttggttttgtcttttctgagattactatgacagtcctccatctctgtgcactggagatgcgcttgcagagaaggatgctgaactagagcttgatgctttgtagggttctgaatccagtcagctgctcagactgggcatgagaaggataagatggagttccagctctgagaaagaattctccacctaagacctaggagctctgggttttcgcctatagcctcgttttcagacatctgtagtgcctagctaccttaggccatcaattctctccctccctccctccctcnnnnnnnnnnnnnnnnnnnnctccgtcccccctccctctctccctcccctttcctcttttcatctttgcttcacagtgctgaggaatggccccaggctttccccacatgccagagagtcatttgaccaccgagctccatacccactcttctttaaatacaattttcagccttcaatcacaatgctagctatacatttttaaaaactcatgcaacctagactaacttcaaaatcatttttttttttaaaagcgaaggatagctttgcattcttggtcctccggtctctgtatcttggacctttggattgcaggcattacataccatacctagctcatagctatcatatttggtgagatggtttttatgtatccaagagcatttgaaatagtttctctgctaggattcctctgtccactcatttatatgatttatacttttgtctcttcctttctgttgctctttgcctttaacattttaaataaataaataaataaatattgctcactggtatattttctgtgcttttgtatctggatgttttatgattttaggaaaaaggctcagctcaagaaaaagagaggtgtcccccagatcaatgagcagatgctatttcatggcaccagcagtgaatttgtggaagcaatttgcattcacaactttgactggagaatcaatggtgtgcacggggctgtctttggaaaaggtaatatccgagtctcagtccaggtccagtcagaggggagagctccctctctggagaaaattggttgctttacaattcagagtttccagtaatgaagctaaaagttaccagactaagggatctagacaaacaacagcatttctgagccacagaaaagcacttgctgcacacacaaggtggaagagcgatgtgcacgtctgccatattcaatagctctggtcatccaggtggggtaccacgtgttagagaagccttacagtatctgtacagtatctgtagtgctgagtcagcccttcccatggatgagcctacaactgagctactctacagtaaatgcatagagtgatagaaacgcattaattactctctagcatagctgctagcagttttgatagttttttttttttcggttggttttgcttgttagaacacgataggtaagaggagtgggcaagaataccagtgtgcactagaggggggagtgggtgaagccccctcttctttctagcacagtgcaaatctcagttctctgcattgtggccgtgactgaagcagataggggaagggtgagaagggcaagggacaggcatgtgctcccccaacctgtcatttgtgccttattttcagtgaaagagctgactgccacataggattaggatttgaaacagtgagttaatttaagagtaagatctgagcagctgctcacttaagctggtctgacaccagttccatcaatattgggtggttatgaggctttgcaattcatgtcccttttaacacgtgggtcccagggagactgaagatccaaaccacagcagtggctttatacggtctcagaagttcactcttcagttaactcccggttctagaattacttctggattgccccatgtgtagccagcagcttcttgggtagaggagcattgtacagaacttagctgggtgatgggtgaggggtgtggaggaggggctgaggaaggacgcagctcaggcagagggctgccaggtgaaattctcacctgccacgcttctcaccagggagtggtttttgtgtcttatttactagatttcctagcaaggtctcttctggaaacacaggtgtggcaccttgtttcttatggggcacaggagggcactggtgaggcctggtttacccacagctgcctccacgggatggtggtggggagattatgtcctcttcttcagtctgcagaggaggaagtcccacatctgtccctgtggtgtgactcatgtttgtcagaatgctgttcccctgacagaatgttgtctccccgagtttcatgttttccccaaagtaaccttggccctttctgttgaaggaacctatttcgctagagatgctgcgtactccagtcgtttctgcaaagatgacatcaagcacgggaacacattccagattcatggggtcagcttgcagcagcgacatctgttcagaacctataaatccatgtttcttgctcgagtgctaattggtgattacataaatggagactcgaaatacatgagacctccttccaaagacgggagctatgtgaatttgtatgacagctgtgtggatgacacctggaacccaaagatctttgtggtttttgatgccaaccagatctaccctgagtacctgatagacttccactgaccctgcctcccaggctcagtggtcagagctttgctctctcattacaggaggatttgatcctctgtctcctagccactaatataaatattggattcttttgaaacagatacagaaaagaaagcggcctcagtatataaagaagtactggctgtcaggttggttatatgttgttctgtttctgtctgttccggttttgttaaaggccgatgctgttgccatcttaacatacaggagaaagagctacttctcaaaacagaataggttgagtctctcattaccatgatcagacagtcttcaaagtgcacacgcatgtgaccaggtcaaatgattttagtttttgtaccctattaggagaactggacttttataaattgaattttggcattattatctatcaatgaacatgtgactttgttggtcttctgaagggggaattaaaaatcccgaaacagcccctggtgctcagcgaagtaagaaacaaggacattgtctgctgtgctggtaggtaagccagcagaagagagacagggcagagcctgcttctcactgctagaggaaagtggtctgtagccccagagcagtgcacactattctcacccatctcccacagttgagctgagcactgctgctaagggtcactagctcacagttcagcttcgagcagtctgtcgtccctgccccaacttatttatttcctttgttttccaagccctgcagaggctttattggtcctcccacaacccctgagacacacatagctgttccatggtgattcctaagaaccacacgtgttaatagttggtgtcattctcttttgaatgattgtgaagaacatgagatgctgggaagaagtctgatttcttctttagagtagtgattgacaacttccaacccctgagcagctatgtgcaactgagagttgtgctcgtggctttgtgtacctgtctgtttgcctgctgttctgtcccaaagaggaagtgatctgtaccagctaactgcccagcggttttctagcagagatgagatagcactcaggcatgatgctaagtgttcaagtgtcagacagggagctgcctgtatgattgtctccccagcgctgctttttccctgattccttgtggggaaggaaggtcattcctccagtcatatcacccagaaccttttcctagctctcaatactgaatcttgtctctgctatccccatccagctttgggttcgaggacttgagcacaggttagcttctggtgcctgtattgttctcttcagtcactcaaattgggaagcatctagaaagaatatatgtgtgaaacaggattatggatagtggcttttgtaaggatagccattcattcagctttgtaaaccatcagattctccttctggcccagaatgtgtgttatcgcacagtgggaagtacaagagtggctctcgggaaattatgcacagtgctttggcacacggtggcaggaatgactccctggctcaaatgtggaggtccaccattggtttaagaaaggctagaaaggacgcatttcaaagccaccagtggtccctgcagcagtgcctgaaggcagagtggctaggttgcctggccgctttcaagaatcagtgttagaggcgttgggagttcagagtgaacagtctctcttctagttcttttctcctggttttgtttttgtttgtttgtttgtttgtatgtgtgtgtgcgtgtttgtttgtttttccagacagggtttctctgtgtagccctggctgtcttggaactctctctgtagaccgaactggcatgcaatgtgttaaagtccctcttacatggctgtctgcccgccttcctctcccccccaccccccagctccatgcacacttctctcaatacttgaatggaatgattgttgtagttgaggttgtttccttctagacctgtgcatccgtgtcaaggtgactgagaacgcaggcagtctgtgcaatcactctcccgtgttggcatgcatgagggaggttgggggggggggtgtcagagaggccaccgtaaagaagcattgcaccgctgttgttgggacagactgccaacccccttcataaggaagacgtgatctcggtacgtgttttaaaatataataacgtagaagtcactcgtgttaacgttgtactgttttgtctgttccatgtatagaagaacatcactccctctgctcatcccacggagtgggagggagagcaaagggagctcgtgcagagtggcgagctgtgccgcaggctggctgaataaactccattgagtacaaacttgtcctttctctgcggggagtctagcctttgggtaaaaagaaatgtgtttatgggaaaatgttttcctgaatcttttatctcccaccaggaatgtttgagattagtggattatttcatttctagactggtggtggaggtggtgatggagaattctgatattcaatgtctgagtgtattgtttctacaattgttgattaaagttttctgtatcagg

SEQ ID NO: 903 - DNA, 3701 bp, Mus musculus
ggggagaaggaaggcttccgtaaagggtgcctttcggtcctttcgctcctggggaccctcggaaaaagcccaccatatcgaccccacggctagcccctcccccaggctctctccgctcgatttcgcaccgttatgtgggaagcgaatccgtgaaatggccaaacgggatgaacagtgctggaagaagaaagcagaagtgtgcaatagctaacggggcagtggagttcacagtttaggtcattgtctttattatctggccaagacacataagaagatgtttcacaagacagaggagttctttcccaagaagacagacagcgatgtggacgacatggacacatcggacacacagtggggctggttctacctggcggaatgtgggaagtggcacatgtttcagccggataccaacattcaatgttcagttagcagtgaagatatcgaaaaaagcttcaaaacaaacccttgtggctccatttcctttactacttccaaattcagctacaagatagactttgcagaaatgaagcagatgaatcttgtcactgggaaacagcgcctaataaagagggctcctttctccatcagtgccttcagctggtttccctgcagaaccagacgcacgagtataatgaagtggccagtctttttgggaaaacaatggatcggaaccgaattaaaaggattcaaaggatccaaaacttagacttatgggagttcttttgcaggaaaaaggctcagctcaagaaaaagagaggtgtcccccagatcaatgagcagatgctatttcatggcaccagcagtgaatttgtggaagcaatttgcattcacaactttgactggagaatcaatggtgtgcacggggctgtctttggaaaaggaacctatttcgctagagatgctgcgtactccagtcgtttctgcaaagatgacatcaagcacgggaacacattccagattcatggggtcagcttgcagcagcgacatctgttcagaacctataaatccatgtttcttgctcgagtgctaattggtgattacataaatggagactcgaaatacatgagacctccttccaaagacgggagctatgtgaatttgtatgacagctgtgtggatgacacctggaacccaaagatctttgtggtttttgatgccaaccagatctaccctgagtacctgatagacttccactgaccctgcctcccaggctcagtggtcagagctttgctctctcattacaggaggatttgatcctctgtctcctagccactaatataaatattggattcttttgaaacagatacagaaaagaaagcggcctcagtatataaagaagtactggctgtcaggttggttatatgttgttctgtttctgtctgttccggttttgttaaaggccgatgctgttgccatcttaacatacaggagaaagagctacttctcaaaacagaataggttgagtctctcattaccatgatcagacagtcttcaaagtgcacacgcatgtgaccaggtcaaatgattttagtttttgtaccctattaggagaactggacttttataaattgaattttggcattattatctatcaatgaacatgtgactttgttggtcttctgaagggggaattaaaaatcccgaaacagcccctggtgctcagcgaagtaagaaacaaggacattgtctgctgtgctggtaggtaagccagcagaagagagacagggcagagcctgcttctcactgctagaggaaagtggtctgtagccccagagcagtgcacactattctcacccatctcccacagttgagctgagcactgctgctaagggtcactagctcacagttcagcttcgagcagtctgtcgtccctgccccaacttatttatttcctttgttttccaagccctgcagaggctttattggtcctcccacaacccctgagacacacatagctgttccatggtgattcctaagaaccacacgtgttaatagttggtgtcattctcttttgaatgattgtgaagaacatgagatgctgggaagaagtctgatttcttctttagagtagtgattgacaacttccaacccctgagcagctatgtgcaactgagagttgtgctcgtggctttgtgtacctgtctgtttgcctgctgttctgtcccaaagaggaagtgatctgtaccagctaactgcccagcggttttctagcagagatgagatagcactcaggcatgatgctaagtgttcaagtgtcagacagggagctgcctgtatgattgtctccccagcgctgctttttccctgattccttgtggggaaggaaggtcattcctccagtcatatcacccagaaccttttcctagctctcaatactgaatcttgtctctgctatccccatccagctttgggttcgaggacttgagcacaggttagcttctggtgcctgtattgttctcttcagtcactcaaattgggaagcatctagaaagaatatatgtgtgaaacaggattatggatagtggcttttgtaaggatagccattcattcagctttgtaaaccatcagattctccttctggcccagaatgtgtgttatcgcacagtgggaagtacaagagtggctctcgggaaattatgcacagtgctttggcacacggtggcaggaatgactccctggctcaaatgtggaggtccaccattggtttaagaaaggctagaaaggacgcatttcaaagccaccagtggtccctgcagcagtgcctgaaggcagagtggctaggttgcctggccgctttcaagaatcagtgttagaggcgttgggagttcagagtgaacagtctctcttctagttcttttctcctggttttgtttttgtttgtttgtttgtttgtatgtgtgtgtgcgtgtttgtttgtttttccagacagggtttctctgtgtagccctggctgtcttggaactctctctgtagaccgaactggcatgcaatgtgttaaagtccctcttacatggctgtctgcccgccttcctctcccccccaccccccagctccatgcacacttctctcaatacttgaatggaatgattgttgtagttgaggttgtttccttctagacctgtgcatccgtgtcaaggtgactgagaacgcaggcagtctgtgcaatcactctcccgtgttggcatgcatgagggaggttgggggggggggtgtcagagaggccaccgtaaagaagcattgcaccgctgttgttgggacagactgccaacccccttcataaggaagacgtgatctcggtacgtgttttaaaatataataacgtagaagtcactcgtgttaacgttgtactgttttgtctgttccatgtatagaagaacatcactccctctgctcatcccacggagtgggagggagagcaaagggagctcgtgcagagtggcgagctgtgccgcaggctggctgaataaactccattgagtacaaacttgtcctttctctgcggggagtctagcctttgggtaaaaagaaatgtgtttatgggaaaatgttttcctgaatcttttatctcccaccaggaatgtttgagattagtggattatttcatttctagactggtggtggaggtggtgatggagaattctgatattcaatgtctgagtgtattgtttctacaattgttgattaaagttttctgtatcagg

SEQ ID NO: 904 - protein, 253 aa, Mus musculus
RYRKKLQNKPLWLHFLYYFQIQLQDRLCRNEADESCHWETAPNKEGSFLHQCLQLVSLQNQTHEYNEVASLFGKTMDRNRIKRIQRIQNLDLWEFFCRKKAQLKKKRGVPQINEQMLFHGTSSEFVEAICIHNFDWRINGVHGAVFGKGTYFARDAAYSSRFCKDDIKHGNTFQIHGVSLQQRHLFRTYKSMFLARVLIGDYINGDSKYMRPPSKDGSYVNLYDSCVDDTWNPKIFVVFDANQIYPEYLIDFH

SEQ ID NO: 905 - DNA, 81728 bp, Homo sapiens
atcttgagaagctggagctggtgatggttgtgttaaaacacacccctccacacagtgccttttggagtataagaaatagtgacacctagcttttaactcagtgtatgccctgtcctgcctcttagttatctgtagggcgttattaaaccagagaagcaccacccctactccctcacaaactgaactgaagttctatccatagacatttgctttatttgctgggcagaaataatggacttcagggataaactagcagaaaatagcggctcatgaattggtaggggaaaggaacaaagggccaggaaaggtcatgagtgataaagcagtgagccacgctgcttttttttttttttaagagaaacataaatttatcctagggagtacactggaatccaatcgaggttaagtaatcagaactggaatcagaagtagatggcttaaaaccacattgagagatggcatgaggcagcaactaggagcgtgggctctaaatccacgcaccaaggctccagtgcttgaccttggacaggctaactgatctctttgtgtctcagatcccttagaggtaaaatgagggtaataagagtagctacttccgtggggtgcttgtgcgaattatatttgttaacagagcttataacagcgtcaggcacatactaactgcctgacgttgttataagtgtcacttataacactgcttactaaatgtaagtatttgttaattattataccacgccctgttcaatctgcatatcatcctcccactcctaattttccaaacacacatagacacacgtagacacacacacacacacacacacacacacacactctctctctctctctctctctctctcccctcactcttccttagcatgtgaggcatattgctgcttgggaagcttgtaccagctgctccctctgcatggaataccttttgtctagatatctattacttttacttccttacctcctccaagtttttccttaaatgttctcttctcaacgaggggcatcctgagtactcccaacattccttatcctgatctatgtttttttctatagttcttatcaccttagaacacactatacgatgtacttatttattatctattattgtctatctccacatgtccctaccccaaggcctgcccacccactagcatgtaaatcccataaaggcagaggcttttaaaatctattttgttccctgatctattcaagaggctacagacagtgcctggaacgtggagggtgcttgctaaatatttattgaatgaagaattgaaggctaattcatattagataatctgttgtaatttcttgacacccctgggtgtgctcattagaaacaggctaaaccctcacatgtctggagtgacctaagtccaggcagtataccttttggctgccctttccaccacccgaggcttttacttacctccttctctcctaattttaaaaattatttcttatggaagtcttttcctgttttctgttctgaacctcaaagcttctcacgctcttttttaagtcatttctgttgtccctttctggatcattcctattaagtccttttttttttttacaacgtgatgaccaaaaccctaatgtggcattcctggaaggaaagccccagccaggaatgtcacagctccagagtcttttcagaattctccatcctctaattaggatggccacacatctcagctgctgcttttgactgccgctgtgagctgaatgctgatgtccatcattgtgcgtagataatttcccggagcagcgaaaactaataatcagtggtattctcaatagagcctttccatttagtgtgggtgagttatttagcacttcatttttttttaggttgaatttaattccttgtcatgtttcctaattaggaagatttgtgagattcattttgattttttgaaaaattcctttccaggaatgcttatctcggcttcggtgaatgtttcatctgcttatttcacctcttaattcctgctggggttgttaacgtgtcagacttcaacagcagggctgattctggggctgcctcattgttggctctttttcagacggaggctgggtctttatattcaaggcggatgggcacaaatgcagctttctctccccttcctccctcaccctctcctggcccccttggctttccttttgcgccttcttcctttctgtcgaatccagcctgtctcccatatcctttcctacagctccccaaattctggttgtaaatgtgacctttatggataaaaacagttatgataataacagtaaaatgataggtaatactgtatcctgcatctcaccacttactccgttctctttcctccttctattgtcttagaagagattgattttttttctcgcaaattcaccttgctgctctcttcatccatctacctgttttctccgtctgatgattttcatttccccttgggaatttcctcctaactctctcagcatttgaaaatctaacaaacttcatggggttccagggagggctgccatcactcatgattcctgggccgggtttagcatggcttaagacatttccacccagaacacatgtagaaaatatgaaagataaagtaaaatgtttagttttcctgagaaaactggtgaccctggtcagtatgcatagtttctactgcagtggctctttgcctggaactatgaagcagaaggaactatgatgatacataccctgcgttaggctacgtatcaggggaaattgcaggccttgcacacagagagtacagtcatctcttgatatccatggggagttgcttccagaaccttcctcggataccaaaatcctgggatgctcaagtccctgatatacaatgatgcatataactaacacatatttgcatataacctacacatatcttcctgtatactttaaattacctaacaacagtacagatgctacgtaaacagttgttatactgtattgttcagggaataatgacaagaaaaaaaatgtccatggtcagtacagacacaaccatctatttttttctcaatatttctgatccatggttggttgaatgcatgattgtgtaacccatgggtatggagaaccaactatacaatggtattcccccagccccaatttcacttcctgcgatttcagttttccgctgtcaaccatcacctgaaaatattaagattcaagagataaataattcatgtttaaaattgcatgccattctgagtagcataatgaaatctcatgccattcccttcccgttttccccaagatgtgaatcctccctttagtcactatttccatggtgtctgcaggcgcaccttcttttatttattgcactttgctttatcatgtttcacagatgttgcttttttttttcttttcctttttcttttttttttttttttaacaaactgaaagtttgtggcaccctgctcaagcaagtctatcagttccgattttctaacagcatgtgctctctttatgtttctgtgtcacattttggtaatgctcacaataatccaaatttttcattatcattctatctgtcatggtaatctgggatcagtgatttttggtgctactattagaattgtttcaagatgttatgaaccgcactcatataagatagcaaacttaactgataaatgtgtgtgttctgactgctccatcaaccagccctttccctgtgtctctccctctcctcgggcctccttattccctgagacacaacaatattgaaagtaggccaattaataaccctacaatggcctctaagtgtttaagcaaagggaagaacacacgtctctcactttaaatcaaaactagaaatgattaagcttagtgaggaaagtgtgtcaaaagccaagataggccaacatctaggtctgttgtaccaaacagccaagttgtgaatgcaaagggaaaattcttaaaagtgctactccagtaaacacacaatgataagaaagtgaaaaaaactgtattgctgctatggagaaagtttcagtggtctggatagaagatcaaaccagccacaacacagcctaatccagagcaaggccctaactctcttcaattctatgaaggctgagagaagtgaagaagctgcagaagaggcttgaagctatcagaggttggttaatgaggtttaagaaagaagagatctccatgcgccgggcgcagtggctcatgcctgcaatgccagcactttggggggctgaggtgagtggatcacgaggtcaggagatcaagaccatcctggccaacacggtgaaaccctgtctctactaaaaaaatacaaaaaaattagctgggtatggtggtgggcacctgtagtcccagctactcgggaggctgaggcaggaggatggtgtagacccgggaggcagagcttgcagtgagccgagatggtgccactgcactccaacctgggtgacagagtgagactctgtctcaaaacagaaaaaaaaaaaagaaagaagccatctccataacataaaagtgcaaggtgaagcaacagggctggtggagaagctgcagcatgtgatccaaaagatctagttgaaattattgatgaaggtggctccactgaacaacggattttcaatgtaagcaaaacagccttctattggaagaacatgccatctagcactttcatagctagagagtaaaagtcaatgcctggcctcaaagcttcaaagaaaaagctgactctctttttaggagcaaatgcagctgatgactaagttgaaggcaatgttcatttaccatttctgaaaaccttagagcccttaagaatgatgttaaatctactctgtctgtgctctcgaaatggaacaacaaagcctagatgacagcacctctgttgacagcatggtttattgaatatttttagcccattgttgagatctactcaccagaaaaaaagatttatttcaaaatattattgctcattaacaatgtgcctggttacccaagagcacagataaggatgtacaaggaaattaatgttgttttcatgcctgctaacacaccatccattctgtagcccatagatcaaggagttattttgactgtcaagtcttattatttaaggaatacattttgtaaaggtatagctgccatatatagtgattcctttgatggatttgaacaaataatttgaaaaccttttgtatataatttaccattgaaaataatattaagaatattcatgattcatgggagaagattaaaatgccaacattaacaggagtttgaaagaagttgattgcagtccttatggaagactttgagggatttaagacttcagtggagggcagtcactacagatgtgatggaaatagcaagagaactagaattagaaatggagcctgaagatgtgactgaattgctgcaatctcatgatgaaacttgaaccaatgaggagttgcttcttacggatgagcaaagaaagtttcctgagatagaatctacttctgccgatcatgctgtgaacattgctgaaatgtcagcataggactgaaaatatttcacaaacttagttgatatagcagcaacagagtttgagaggagaggattgagttcaattttgaaagatgttctactgtgggtaaaatgctatcaaaccaaatcacatgctacagagaaatctttcaagaaagaaagagtcagttgatggtggcaaactttgctgttgtcttattttaagaaattactgtagccaccccagccttcagcaaccaccatcctgatcagttagcagccatcaagatcaaggcaagaaactccaccagcaaaaagattatcacttgctgaaggctcagatgattgttagcattttttttttgagaaggagtctcactctgttgcccaggctggagtgcagtggcgtgatcttggctcactgcaaccttcgcctcccaggttcaagtgattcttgtgcctcagcctctcaagtagctaggattacaggtgcctgccaccacgcctggctagtttttgtatttttagtagagatggagtttcaccatattggccaggctggtctcgaactcctgacctcaggtgatctgcccaccttggcctcccaaagtgctgggattacaggcgtgagccaccaggtccagccgattgttagcattttttagcaataaagtatttttaaattaaggtatgagcattttttatagacataatggtattgcacacttactggactatagtatagtataaacataagatttatatgcatcgggaaagcaaaaaatttatatgacttggtttataataatatttggtttattctgatagtctggaagtggactggaaatatctctgagctatgcctgcccattagtttcttggtagctgtcttggttatcaggttggaaaaaaaagtgtatactaagtttggtactttctgtggtttcatgcagccactgagggtcttggaatgtatcccctgcagataagggggaactgccatcatctgctaaagaccacaagagtttgggctacagtgatggagctcactcttgagtaagttatgggagagttcggtaaagttgttttctgtgaggatattttaggaagtcctagatctattatgttgcctcagcaagataagaggtgtctcattgggtataagcccaaatacctgaaagggcctaggaaggtaatttaaacgagactgacagcccattcccagtctaaaggagtcaacatggcttcagtcagttgttgacatatgggaatacagtgtgaaagcaaaactggaggcccatattattaaatttgaaatttcccagttttaaaatagtggccatttatttaaaaaaagtttaaatactttgtgtgtgctaaataatcattaaggacgcttccaatacttgctgtttaactcagtggtcctaaagcagtaaaaataagcaaaaaaatcactaaaattcgtatagccgttttcacttcccttcatgttacttaggtatagagcagtatattttaaggaattgttcactcaatatgtactcaaaccagttgtgttctctccatcccactctcctaccaccagctcaggcaactccacatcttcaagaaaacaaagtacagctccagcctcacaaaagattgaggacctggctctaacctttctagttaaacctgctttgtaaaaattcgcttccaacttcaaggaagagctagttcctaaattacttaaactgctactgttcattcttcaaggctagcattactctgataccaaaacttgttacagacaagcacaaaaatcagtaacaatggaccaattttattaattataaatacattttaatcctaaataaaagattaacaaatcaaacccagcatggctttcatttgatcaaaaaataatagaacatgacaaagcagagtttatttcagaaatgtaagaatgtgttgaacactaggaaatcaatgagcataattcattatataaaagagtcagagtaaaaaacaaatatagtgatagaggctaagagacagttggtaaaattttgcactctttcctgatttaacagcatgtagtaaaacaggatagaagaaaatttctttaaagatgatagtgtattttcagaacaccaactagcaggcgcagtggctcacgtctgtaatcccagcactttgggaggctgaggcgggtggatcacctgaggtcaggagttcgagaccaacctggccaacatggtgaaactccatctcttctaaaaatacaaaattagccaggcatgatggcatgtgcctgtagtcccagctacccgggaggctgaggcaggagaattgctggaacccaggaggcagaggtggcagtaagtccagattgtgccactgtattccagcctgggcgacacagcgagactccagctcaaaaaaaaaaaaaaagaataccaactagcactagcaccaaatgggcacatgcttgccttactgcattaaagctggatatccattatcttgtcctgtagtcttaaacatttttctgatgttttgaccaatgcaataggaagaaagaaacgcattatttgcaggtgataatgattgtctgtgtacaaattcatagagatgagctgtcaagctattagaactaacaagacattttttcatagtgtggtaggatacaaggtaaataaacaaaagtcaatagctttcctaaattacagcaataagaaatatctcacttacaaaaaaactataaaatatctaggaacaaacttcccaaggattatgcaaacctatgtgatttttttttttttttacagatgctgatgcagatctgaaaaaaaattgttaatgcatctaaagatacagaaaacaagtatttctgaatggaaagacccatgatattgaaaattttgaaaaagaagagaattaggagaggttcctttatgaaaaggcaaatatattaaatatgtaatgattataactgtggcatattttaggaataagcagataattaatagaggagaatgttcagaaacagatatatacgtgtatgtatacctatgtatatgtatatgcaaatttaggttgtaattaacagtggcacttcaaagtagtgaggaaagaatattcactaaatgacatgggggcaactggtcaaccatttggcaaaaataatctcttagtaaactattttatttccaggaattaattccaagaagtaaatggacaaatgtgaagaaatgcctgttgaaggatttttttgggatagtgaaaaatagaaaaccactcaaacgtctattcagtagattatttcaaatgtgtgtgtctatttgtgtgtacgtagtatacgcataagttatggaatgccatgagtctactttaaaatatggccgggtgcaagatggctcacacctgtaatcccagcactttgggaggccaaggcaggtggatcacctggggtcaggagttcgagactggcctggccaacatggcgaaaacctgtctctactaaaaatacaaaaattcgcgggacgtggtggcgcacatctgtaatcccagctactcaggagcctgaggcacgggaatcgcttgaactcgggaggcggaggttgcagtgagccaaaatggcgccactgcgctccagcctgggcgacagagcgaggttctgcctaaataaataaataaaatgatgaaacagatttaaacttaatggaatggaaggatagccacataatctttaaagtgaaaaaaaaatcaggttctaaatctataggtattctttgattacatttttttcaatgtgtagaggcatagaaaagtccagaaggatctataatgagctgtttaattttcatttcctatggggtagatcctttgttgcatggaagattatttcactctgttagctctctttacatcagtaggaatacatcctcatggttttaaacatcttgagggagctttcctgacactctactctaggtaaatatgctcgcatagcactctctattcaccatattacctataaatcatattgcactttttaacttttctaaactactttttgctttcttttctagattataaaatcttgagggcagggatagtatgtaaaggttcccttgtgagcaaataaccgtcacttattgaactctgtgtgccaaatactgtgctaaatgctttcaataatctcactcatagggagatattactaccatctccattttgaggatgaagatattgaaagattatgaagtttctcccaaatgccattgccaggcctgtgtgactcttggtcgttacacggtgatcaataaaaatttgtttcataggaaagaaatacagccagccgtggctttaagatcactgggtgatacagttggaccagaaaccctttaaactccttcgtcagacacagactcgcaagccccgcccaggacgaccgcccgcgcgcgtacggataagcgtgcaggggcggggcgagcttgtaggagtggggcggagacagatctgactggccaacgtcgggcggaagtcgggaggttgggtggtctgtaaacgctggcttgtgacagggagggggaggaggaaggccttcgtaaaggttgcatctccgtcccttcgctcccggggacccgcaggaaaaaaaaaaatccaacacccaggccccgcggctagccccttcccacaggctctctccgctcgattttgtcaccgttatgtgggaagcgaatccagtgagtagccgggcgggacggggcgggcccagggggcggggttgatgagagaggggcgggagggggtcaccggaactgcttccccgcgctcgcttcagtctgggtgttgagttccgggaccggagttcccgggccttttggcttctgtagtctgtacctttttaagcagtggaagtgcctgggtggattctccaatgctttattgttttcttgttacaattatttattttacttcccgtgatgtttcagcctcatcccttcaccatttgttgttgttgttgtttttgagacggagtctcgcactgttgtccaggctggagtgcagtggcgtgatctcggcccaccgcaacctccgtctcccgggttaaagcgattgtcgtgcctcagcctcccgactgccttcactgttttttgaaactttgtgttttgctttctaattggagtaactggccttggaacctgtagtcagtcatttgcctcaggtttacctgccagtcccaccagtctaaagcaagggaattgggacccccttgtcttgaatgggcctaagaggagccatcagttctccttttcccttcttggtggacagtcgtttaaaacttggagtatggactgtatgttcttagatgttttcgttcggtggacaaagtgatctggagcatttcaactgcaagtctgccttcttccttggctgactctggtattttcattatgacttcatgtgtctttgtctactttgcttttatacatttatttatttaaagtgcaacgtaggggccgaaaactttagtacctttcctcaccacccattgtaaggatcacagccaccactccttaaaacagaagataggttaacaaggtaaaagcagagcaaatctaatcaaagttttacaccaccaggcacttcagagaccagggagatctctatttttatgcgtaggacccatgaagaatagacaactgtgtaaaaatgtgactggacaaaggatatactctaatgttaataaactgaggaaggaagcccagcaaggtctgtttgttcagattcttcttggcctctctgtgtatcatttcttcctcctacggaggaggaaggtcccttctggaatgagggtcttagcgacctactatcaggcaaggtagattagagaatttctttatggccagttcctatagacaatggcagggaaagcttaatagttccagtttttatggcttgctttgtaggagagggatcctagtttctatcactcaccttggggaagaattctggtttctgtgactcacttctgggacgaaagatgggcaggagacagaagggcaggagatcagagggagagactgcttccgaggctgcttctgaggccttccaatctcttttagttcaaagtattcagcatgccaaagtgtcatacttcggggtagtattttctgagccccaacacaaccctcagagagtgggatctatttgccaagagtattcttctgttgttatggttgaaactgcctggtaaggtggcagatgtatggtatttaaaacttaggagttgactggaaaaatggtagaatcacatttcagcaagttgttggactaaatacagtcgtgcgcctcctaacaatggggatatgttctgagaagttcattgctgggtgatttttttcattgtgccaacgtcatagagtgtactttcataagcctgctacacacctaaggctatatggaatagcctattgctcttaacctagaaatctgtacagcatagtattgtactgaatactgtaggcattcgtaacacaatggaaagtatttatgtatctaaacatagaaaagatacagtaaaataaagtgttaacaatctttgggaccacttgtatatgcgatccatggttgactgaaagcttttatgcaatgcataattgtgtatgaaacataagaaactactcctatgctgagataactgcataaatttactttaataacccctaatttccatatttgcaataatttcctataatcagtattcttcccctctcatttctggaatatatttccagataagttagaaagtttatcagtacatttccctatgtttttaagttaagtttttatccagtagaaactagtctgttggtctggatttggtagttgcacattatggttccttcttgtgcatcatataacaatagtcatcatcttagtattttcgattcatacgtataatactctcttcaagctgcattagaggaaagtaattacttgtatttgattttagcaaaaataatttagaataatgagaatgtgctctctgcttatatattcagtttcactatctgtcatcaacaaccttcattttgtatttatatctttatgtagctattattccctttttgttatcagtccttcttaatttttccataacaaaccctttagccacccaagtatatgtcttactcaaggttttaaatctttcactatattgtaagatccacaaggacaggggtttttctctgttatttttcctatagtatcttcaactagagaacagaacctgacacatagtaggcactcaataaatatttgttgaattcatgatggtggttgtaccagcaaggactaaagataattctttgctcctactatgaattttccctcctgcgtcacacatacatcagaatttgctgttggattatttgtgtgtttgtgagaattataaaggcattaatgaatgtcttatatacttgatttgttatatcattatctcatttctttgtaagcaatgggttttctttgaaatcacctgtgtgattttgctaatttcagcagagcaggctgacttttgttaaaagtggggaatcctccacagatcatctcacattcttcttttgccacccaaataagacatatttgtcttactgctactgtattttattactactaatagtttttcttcctataagcatatgaatgatatcagtaagcgcaatttggttttaaaaatcaacattctacgtgtgggtttctctagtaatttgttagtttattttagtttcgctttcctggtttcacttaccacaatttcacttaccagaagtcagctgcggtctgaaaatatgaaatggaaaattccagaaatgaacaattaataacttttaagttgcatactgtactgtgtagtgtgataaaatctcatgccattgtgctccatcctgcctggggccacgaatcatccctttgtccagcatatccacactgcatatactctacctgcctgctggtcatataataacatgtaatgtcactcacttatttattgagcacctgttataagctagttagtgcgaagtcccagggtttacagtggtgaacagaacagactaggctccagcctttatgggtttgcagtctggtgcaggcaggcagatattaaacaaataattatgcaaatacatttaatttaaattgtgataaaaagatatgaaagaaaaagagtactatgacagtgtagggggagctaatactagactgggcaatcaggaaaggccaccctgtgaaagtaacttttatagagatctgaaggattgagcaagcgttagccaggtaaaggttggctggaaggtggggagagctgttcagacagcagagatagtgtgagcaaagatcctgagaaagaaaggagcttggtgcttgagaaaaagagagaagcctatgtggctgggacacagtgcaccagaagacaagcccaggaggtaggaaccaggccatgcatggatttgaggcacatgtttaggattttgaactttatccttagaggagtggtaacacattgaaggaagtgtcatgaacatatttatgtttttaaaaagattactctggctgatgtgtggaaaatgagtttatgtattagaaaatatggtagacgtaataatggcctcctaaagatatccacatattaatacccagaatctgtaaatatgttgttacatggcaaaagggaggtaattagctaatcagctgaccttaagataaagagattaccttggattatccaggggggccccaaagtaatcgcaagggtccttaaaagtagaacatggggacaaaagacatggagtgactatggaagaatggtcaaagagatacaacatggctgactttggagatgaaggaaggaggtcacaagccaaggtatgtgggtagcttctagaagcttgaaaaaccacggaaatagattctctcatacaacctttagaagggaatcaaactcaccttgattttagcccattgagatgcatgtaagatttcttcagaaatgtaagaaaataaattagtgttgtttttaagccactgcgtttgtggtaatttgttctagcagcaaaagaaaatactgagggggataaggggctgtaggaagactaattaggaggttatagtgtagtccagggtagagacgaaggtgacttggactatgtggggaaagtatgaagtcacctatgaaggtgactactaagtggggagagaggagatcaattcaagctgcatcttagatgatgacttagctttctggcatgggcagccaggaataagatgttttcactgagccatatggaagataacaggagtttggttctggactcactatgtttaatgtgcctatgaagcatcaggtagtaaagtttggaaggcagttggttagggaggtaagtctggagctcagagaagaaggctgggctggaaattgaaatttgagcctcagtgtctataggtagtctgtcacccaagctggagtgcagtggcatgatctcggctaactgcaacctctgcctcctgggttcaagtgattcttgtgcctcagcctcctgagtagctagaactacacatgtgcaccactacacctggctaatttttgtattttagtagagacagggtttcactgtgttggccaggctggtcttaagctcctggactcaagtgatccacccgcctaggcctcccaaagtggtgggattacagtcgtgaaccaccgtgcctggcccccaataaaacagtattttagaaattaatgtttttattatcattgagaaggatgattttttttttgcagcttcttacaaagtacttatatctaatttgataatagtttgagatgtaggttagaccacattttgattactctgtatgtctactaaattaggaaatgttgtgccacaattatagattgtcaggaattgcaacttgtgtttgctggcgctgtcagatgtttaggaatatcaaggtcaaatacagactgaaaaattatcggaagatttctccctgaagattatatcttgtgctctttcagttgcgttattgagaagcctgtaatattagggtgaatgtttcaaccagcctgaatgtttggaagatagtaacaaatggattcttaagtcattttttgacttcttcagtatctggaaagtattttcccatgttttgttttaacatttagtcatgttctttatacacacaatagtgtaatcagtctcactctaagaagtgaagaaaaccatcaggttttgggaaggaatcacatcctagcaattgagccatttgcaacatagcttggtgactttgaaaaatatggtattttattctcagcattaaaaatcagggtattttggccctgaagtagtaggttcacgctatttaaaattctagatatatctctgctatactccacttaagcaggcctctagaaaacatagaattactttttggtattgtcagcattatgaagaatttttttgttttttaaaatctcatccctcatttcagaaacttgtcagcaccttttttccttgacagccagcaaacttgcgtgggaagaataatcttgcaaacgctgccatttccttctgcaacatctgagagcgcatactctgaatagtcaatatttgatgatgtttaatttccattatttccttcaacactcagttataatcaggaggcatattgttgactcctgtttcatataaagaatcttttagtaacataacagtgtatgtttttgctatttgtatacttcatgctctgtcaattttgaatgtgtggcacctttttcaacttatgtcatagctcacaaaagtatcattgtctaaataaaaactgtcttccctgtactataagttttcactgatatgtagaacaaaaagttgttgagtacttttaccttatatactgtatatgtgtcaaggactgatttatattttctccacaggtagtttgtccaattgtaaaacaaaatatatgctaaagcactcaacatgacagtaattgctcttctatattgtgttgcatgataatatagcatgataatatatgacatccagtagaatcatttaataaagaattttggtcaatagcttgtttcttctcaggcattaaatttgaattgactagcttctcagcagtatcaagaatttttacctgttttagctgaggaatgcgtcttttctcttggtttcttctttgtccttattaacaaagcaaatggactttgtgctttgtgtgaaaaataatctgaaagtttacttgagttttatagtactatatttaagtaaatgctaactatggctgatatgaatgtatcaacagagagtgaatataatgggatattatagtgaatggtaactttaaagaaaataaagtgattttcgtacaaattattaatcttacatttcaacttttcaaaatgtatgtagacaaatttatttcattactttgcccctgaaaatgcctgtgaaatatctcataatccctgaggaccgtcttttgaagattctgagagaaaacaagaagggctaggactgagccatgagaaactctaaaagttacaagctgaggagaagtcaaagtgcaaaggagactgagaatttatggacaaaaaaataagatgatctggagagtgtcatgtcatagaaaccaagagaagagttattcaggacagaggataaactgtgaaatgttaccgtgagataagtaagatgaggactgaaaagagcataggatttagtaatgtgaagctcattagacatcctaggaagtgtcttttgtttgtttgtttgtttttaagtgatgatgggtaggaaagattggatcagaagctagaaaagttaaattggagtgggtgttagcatagaaactgaagaaataaacatagtgtgtagacaaagagttacagttaataagccaccaaaggagacaagatgaaatcctaaaagcactcaatctgaaagaagatagaaaaaaaagagaacaaagaacaggtgggaccaaaaaaaaaaaagcaaataacaagacgtaaacttaaagctaaccatatcaataatcatactacatgtaaatggatcaaacaccccaattaaaatacagagattttcagattggattaaaaaaacaagacccaagtataagttgtctgtaagaaatacaatttgaatataaagacatgaatagaataaaactaaatagagaaagatacacagtgctaacactaatgaagagaaagtgtgagtggtttattgttgttaaggtagatttcagagataatgatattatcaaggataaagaatgtcatttcttaatgataaagagatcagttaaccagaaacaatcctagatattttagacatccaatattagagctttaaaatacatgaaacaaaattaatagaatagcaataagaaatagaaagatacccagttaactggagatttcagtagttttctccaaataattgatggaatgagcagatagaaaatgagcaacagtataacaaacttgaacaccactgtcaactaacttgatctgcttggcatttatggaacaattcacccatcaacagctgaatacatgggttttatttttttccaactacatagagaacgtgtaaaaatatatgccatattctggcccataaaacatatctcagtacatttgaaagaattgaagtcaagcaagatgtactttctgacctaaatggaattaagttagaaaccagtaacagaaagattgtaaaattcccaaacatttggtaaataaataacactttaaggtaacccatggattaaagaaatgaaaagagaaaatagaaagtatgaaaacaacatatcaaatttgtaggatggtgccaaagcagtacttagagggaaatttgtagctaaattaatggctgtattggaaaagaagaaatgttacaaatcaataatcacagctttctaagaaactggaaaaagaagaagttaaacaggagcaaggaaataaaggttagagtggaaatcactacaacagaaaacaacagtgaagatcaatgatactgaaagctagttctttgagaacatcaagactattaataaatttctagcccagcagatcaggagaaaaagaagacacaaattaccaatattaagaatgagagaggtaacatcactacatattctaaagacattaaaaggataataaaggaatgttatgaacaactttatatcaagcagtatgacaacttagatcaaatagacatattcctagagagatacaaactgctaaagctcactgaagaaacagataacacaaatagtccaacatctgttaaataatttgaatttgcagaaaaaaatcattctaaaagaaaattctaggtccagatggtttcagtggtgaattctaccaaatatttaaggaagaaataatactaattaacacagttttagaaaatggaagaggaggtaatacttcacaactcatttcataaggctgtcagacccttatttcaaaacccatcatagaaaactacagaccaatatcctgcatgaacatacatgcacaattttaaacagaattttagcaactcaaatctaacatatataaaaggattaatacatcatgacctactgatgtttattccaagaatgcaaggtttaatatttgaacagccatcaatgtaattcaccaggtaaacaaactaaaatgaaaaactatgtggtgattccagtacatgcagaaaaagcctttgacaaaatcgaatatcgattcctgattaaaattctcagcagcctaggaatagaaaggaacttgctcaacctgatggacggtatgtggaagggggttaacgcaacaggctggggttgttgaaaccttgcccattcttaagcttgtttccatgactgtcctttgctcacctccagggaactaagctcttgaaattttttgtcttaatagtgtatttgcatgcccgagtctttgagccgtgctataccagtttgtccagattgtttatactagcaatgcagtttacggtgaagacctgccttccctctgggaatctggagcttcagtaacaggtcagtcacacaggtgctgttatgtttacatgactgatacccagtaaaagccctgtacactttggctcaaatgaacttccttggttggtaacactttgcacatattgtcacacatagttgggagaatgaagtgtgtcccatgtgactgcaccgggaagggacgcttggaaccttgtatgtggtttcttctagacttcaccccatgtgcgtttcccctttgctgattttactctatgttctttcactgtaataaagtgtaaccatgagtagagcaacttttgagtcttgtgagtcctaggaaatcatcaaccctgagggttgtcttagggacccctgacacaaagggcatcttcagaatgcctttatctaacaacttaatggtgaaagactgactactttctccctaagatcaagaacaaggcaatgatgtccattctttattcagtattctactagaggttctaaggaaaaaggcaagaaaggaaaaaagaggcatctaaatcttagaagcaagaagtaaagctgtctttattcagatgacatgatgcctatgtaaaaatctaatggaatctttaaaaagctcttagaactaataaatgagtttcataaggttgctagatatggaattcatatacaaaaatcaatgtatctctatacagtagcaacatataatcagaaattgacttttaaaatgcaattccacttacagtactatcaaaaatatgaaataagcctgaaagtagcataaaagatttgcaagatctgtacattgaaacctacaaaacattcttgaaaaaattaagacctaaataagtcgaaagatataatttattcatgggttggaatactcaatattgttaagatgccaattttctccagacagattgataattcaatgcaatcccaggaaaagaaatcaaaggaactagaatagccaaagcaattctgaaaaagaagaacaagtttggagagcaaatgctacctgatttaatgattcaatgtgaagcaacaataatcaaaacagtgtagtattggcatcaagttagggaagttaattaatggaatggaatagaataaaaaatagggccacaaacaaatgattttttaaaaggtacgattcagtgggaaaaggacagttgttttaactaatgatgctgaaacaattggatacccatatgcagaaaaatgaacgtcactccatactttgctatactataaaaattatatatatagtatataaaatatactaataaaatatatagtatagaaaaatttataaactataaaatttactaaaaatggatcatagacctaaatgcagaatctaagactacaaatttccaggtgaaaaaaatagaaaaaaaaatacatatatttatttttttgagacagagtcatgcttggttgcctaggctgtagtgcagtggtgtgatcatagctcattgtaacattgaactcctgggctcaagcaatcctcttgcctgtctcccaagtagctgggactacaggtgcatgctaccatgcccagctaatttttaaattttttgtagagatggggttttgctatgttccccaggctagtctcaaactactgacttcaagtgatctagtctaaaactcctggtctcaatcttctgggtgcagcctcccaaagtgctgtgattacagggatgagccactatgcctggctgagaaaaatctttttcaaatcttaaaatttgtatttctctaatgactaatcatgttgaacatcttttcatgtattttccatctgcttgtttttttggtgtggtttctgccagcattggttaggtacggagtctcgctccatcaaccaggttggagtgcagtggtgctatctcatcctactgcaagctctgcctcctgggttcacgccattctcctgtctcagcctcccgagtagctgggactataggcaccctccaccacgcctggctaatttttttgtatttttggtagagacggggtttcaccgtgttagccaggatggtctcaatctcctgacctcgtgatccgcccgcctcggcctcccaaagtactgggattacaggcgtgagccaccacgcctggccacaaagattctttttagctacaatgccaggactatgatcgatgaaaaaaaaaagtgataaaacagactttatcaaaattaaaaacttctgctgttgaaaacatgcttctaggagaatgaaaagataagccacagacgggagaaagtatttaaaaagcatatatctgataaatgacttgtacatagaatatattaagaactctgaaatctcaagagaaggaactcaattttttaaagtgagctaaagatatgaatagacactgcaccaaagaagataagcagatggaaaataacaacatgaaaagatgttcaacatcattattctttagggaaatggaaaatagaaccacaatactgcccatctatcagattggcaaatattaagaaaagccttaatgccatttatgaggactttgccttcatgatctaatcacctcccaaaggccccattttcatatcacattaggagttagaatttcaacataataatttggcaaggacacaaacgtttagtctataacattctggccctggcccttccctccacgaaaaatttgtgtcttcgttgcatgcaaattacattcattttatcccaatcaccccagagtcttaactgataccagcatcaactttaaagtccaacatctcatctaaatattatctaaatcagatgcagttgagcccaaggtatgattcatcctgaggcaaattctcctccagctgtgaccctgtgaaaccaaatatgtgcttccaaaatgcaatggtggtctgagtttggtggcttgtgcctgtaatcccagctacctggcaggctgaggtgggaggatcacttgaggccaggagttgaagaccagcctgagcaacatggcaagactgtctctgaaaaaattgaaaaattaattggccagacgtggtgtcatgtgcttgtagtcccagctcctcaggaagctgaagcacaaggatcacttgatactaggagttcgaggttgcagtgagctatgatgtgtcactgcactttagcctggacaagactaaagtgcaagacaacagagcaagaccctgtctctaaaaaaattaaaaagttaaaaaatatagtggtgtgctagtcatagggtagacattccattctgaaagggagaaaaaggaaggaagaaaggggtgacaggtcccgagcaagttccatgaaatcttaaggctacaaaatgaatgattggcttgatgctctgccttccagagaagtggaagtgctgccttctggaccctctgatggggttggtcacaatccctgggctttgagaggtccagccctcatgagccatctggcctattgaaagcaaggcagtggtcccttcttttgttgaaccaaggaagcatcccggatgatctctgaattgcttttagggtccttccttgtcttaaagaagagcacacatttgcagctgaattgctctatggtcccatcctgaaaaatccaagaagtctaccaaccctccttcatttcttcccatctactattttttcatttcaaattggcagttgtcctgctggggcggtccacatccatactaatcttatcaaatgatcatttgaccacaaccttagtgttgtcctctgaacagactttctcattcttttcaatatgggtaggttgagaattttctgcatctttaagtactggttcttttttgcttaataattctgtctttaagtcattctctcttcttgcgttctatttaagcagtcaggaggacccaggccactccttcagcaaattgtttagaggtttcctcagccaaatatccaatttcatcacttgcaaatgcatgttatctttataactgttacatctttatgttggagtaacccttttatcatgataaaatgaccctactttttatagtaacactttttggtttgaagtctattttgcctggcattagtatagccactccagcttttttatgactgttgtttgcatggtattttttatttatccttctactttccacctatttgtatctttgaatctaaagtgtatttctgtggacagcatatagctggatttcaaaaaaatctaatctgaaaaatctacgttttgattggattagtttactcacatttaatactattatttaattgcatgttatattattatttacatctgccttttttttttttttttttagcagagtctcactctgtcacccaggctggagggcagtggtgcaatctcagctcactgcaacctctgcctcctggttcaagtgattcccctgcctcagcctcccaagtagctgggactacaggcgtgtgccaccacgcctggctaattttttgtattttagtagagacagggtttcaccgtgttggtcaagttggtctcgatctcctgaccttgtgatccactcgcctcggcctcgcaaagtgctaggattacagacgtgagccactgcaccggcctacatctgccattttactttttgttttctatttaattattttcaaatgttggaatattcacatctatataataatgtatcttggagatagtacccaagtctaaacatgaatttatttgtttcatatatgccttttacacacagttcaaaggtaattttatataatatttttcttttttttttttttgagatggagtcttgctctgtcgcccaggctcgagtgcaatgacatgatctcggctcactgtgaccccccacctcctgggttcaaatgatcctcctgcctcagcctcccaagtaactgggattacaggcgcctaccaccacacctggctaatttttgtatttttttttttaaatagagatggagtttcaccatgttggccaggctggtcttgaactcctgacctcaagtgatccacacacctgggcctcccagggtgctgggattacaggcgtgagccaccgcacccagcctgaatattcatacataaattcttaacagtaaaaggtatgacatacatttaatacagtgaaaaaataatgtgttcaggataactaagcagtgcaatagcatcaccaaaatacctttatcagatgttaaacaacagcaacagcaaacagtggcaagctttgtctccacctatgatgctgtgttttgattaaaatgctcctatacactgtattttttgactttaggtaaaacatcagaagcgattgagggaccaagtagtggctcctataggggcgaggaagcattttgctggatggcttttaaaaatgtttcctttagagtcatctaccttattaacaatggtttttgtcttagaaatctttctttgatgttataaattgacatgaattcttgtttggtatgaatgcacactgctccagacctttagtaatctcatcacatgttttcatcatgttgtctacagccactttctctgcatggttaatgttatctttatcactgttatcaaatcaccttgattcagaaccattttaattattttaccattgatactgaatgaacaactggagcctcattatcaatattagaaacatctttgatattcacttcttccagcttactgatagactctggaggtacattttttgcatatgtcaggaggttatatatcttttttgttttcccttggatgatatacagagtccttcgaaatcaccaattgttcatcatcaacactgaacatagtcttaggccaggttgtgtcaggcacgactatgtcttcagtcattgttttccgagtgttggcaactgcatttgtggcatcctccatgctaaactacttttgaaaactttctacacccttatctctgttcactgttgctagcatgctattcaagaatatatttttatatttaccctttattgatctaaggatatcctggtcacatgccttaattaatgaagtcacatttcggggaaagtacatgttataaacattattttttatgggaatttcagctggaggatgagcagaacagttgtcaaggaataacaaaatcttacagtctagcttcactgcagtaagcatgagccgctagtacaaaatgtttgtgaaactagtcagaaaagaggtttctggtgatacatgccttttcttttccttttttttttttagcataataatggactggtaagaaatttactccttgaatacagtgaggacgtgaggttttccctgtcaaagcaagtttacacttatatgtgtattagcacatcccagcacagttattctgtctttggcatccttaattcctgtaaaggctgtctcagcagctgtaattggtgtctttctaggataataatgtcaaaacagtgatgtttcattggcattatagacttgttctagtgtcagatgtttatcagcaatgaccttggcaaactcatcaatgaatttctctgttgcttcatgatcaccgtgttttatccctacatgtctttaaaaatttaatgctgtatcttttttttattattattattatactttaagttccagggtacatgtgcacaacgtacaggtttgtttcatatgtatacatgtgccatgttggtttgctgcccccattaactcgtcatttacattaggtatttctcctaatgctatccttcccccagccccccaccccccgacaggccctggtgtgtgatgttccctgccctgtgtccaggtgttttcattgttcaatcccacttatgagtgagaacgtgcggtgtttggttttctgtccttgcaatagtttgctcagaatgatggtttccagcttcatccatatccctgcaaaggacttgaactcatccttttttatggctgcatagtattccgtggtgtatgtgtgccacattttcttaatccagtctatcattgatggacatttgggttggttccaagtctttgctattgtgaatagtgccacagtaaacgtatgtgtgcatgtgtctttatagtagcatgatttataatcctttgggtatatacccagtaatgaaatcactgggtcaaatagtatttctagttctagatccttgaggaatcaccacagtgtcttccatcttccacaatggttgaactagtttacactcccaccaatagtgtaaaagtgttcctgtttctccacatcctctccagcacctgttgtttcctgactttttaatgattgccattctaactggtgtgagatggtatctcattgtggttttgttttggatttctctgatgaccagtgatgatgagcattttttcatgtgtctattggctgcataaatgtctccttttgaaaagtgtctattcatatcctttgcccacttttggatggggttgtttgatttttttcttgtaaatttgtttgagttctttgtagattctggatattcaccctttgtcagatgggtagattgcaaaaattttttcccattctgtaggttgcctgttcactctgatggtagtttcttgtgctgtgcagaaactctttaattagatcccatttgtctattttggcttttgttgccactgcttttggtgttttagtcatgaagtccttgcccatgcctatgtcctgaatggtattacctaggttttcttctagagtttttatggttttaggtctaacatttaagtcttgaatccatcttgaaaattaatttttatataaggtgtaaggaagggatccagtttcagctttctagccagttttcccagcaccatttattaaatagggaatcctttccccatttcttgtttttgtcaggtttgtcaaagatcaggtggttgtagatgtgtggtgttatttctgaggcctctgttctgttccgttccattggtctatatctctgttttggtaccagtaccatgctgttttggttactgtagccttttagtatagtttgaaatcaggtagcatgatgcctctagctttgttcctttttgcttaggattgtcttggcaatgtgggctcttttttggttccatatgaactttaaagtagttttttccaattctgtgaagaatgtcattggtagcttgatggggatggcattgaatctataaattaccttgggcagtatggccattttcacgatattgattcttcctatccatgagcatggaatgttcttccattcgtttgtgtcctcttttatttcgttgagcagtgctttgtagttctccttgaagaggtccttcacatcccttgtaagttggattcctaggtattttattctctttgtagcaattgtgaatgggagttcactcatgatttggctctctgttattggtgtgtaggaatgcttgtgatttttgcacattgattttgtatcctgagactttgctgaagttgcttatcagcttaaggagattttgggctgagacgatgggattttctaaatgtacaatcatgtcatctgcaaacagggacaatttgacttcctcttttcctaattggataccctttatttttttctcttgcctgattgccctggccagaactttcaacactatgttgaataggagtggtgagagagggcatccctgtgttgtgccagttttcaaagggaatgcttccagtttttgctcattcagtttgatattggctgtgggtttgtgataaatagctcttattattttgagttatgttccatcaatacctagtttattgagagtttttagcatgaagcgttgttgaattttgttgaaggccttttctgcatctattgagataatcatgtggtttttgtgtttggttctgtttatgtgatggattacgtttattgatttgcatatgttgaaccagccttgcatcccagggatgaagccaacttgatggtggtggataagctttttgatgtgctactggattcggtttgccagtattttattgaggatttttgcgttgatgttcatcagggatattggtctaaaattctctttttttttgttgtttctctgccaggctttggtatcagggtgatgctggcctcataaaatgagttaggggggattccctttttttctgttgattggaatagtttcagaaggaatggtaccagctcctctttgtacctctagtagaattcaggactgtctggtcctggactttttttggttggtaggctattaattattgcctgaatttcagatcctgttactggtctattcagggattcaacctcttcctggtttagtcttgggagggtgtatatgtccaggaatttatctatttcttctagattttctagtttatttgcgtagaggtgttcatagtattctctgatggtagtttgtatttctgtgggatcagtggtgatatcccctttatcattttttattgtgtctatttgattcttctctcttttcttctttgttcgtcttgctagcggtctatcaattttgttgatcttttcaaaaaccagctcctggagtcatttgtttttttgaagagttttttgtgcctctatctccttcggttctgctctgatcttagttatttcttgccttctgctagcttttgaatttgtttgctcttgcttctgtagttcttttaattgtgatgttagggtgtcgattttagatctttcctgctttctcttgtgggcatttagtgctgtaaatttccctctacacactactttaaatgtgtcccagagattctggtacgttgtatctttgttctcattggtttcaaagaacatctttatttctaccttcatttagttatttacctagtagtcatttaggagcagattgttcagtttccatgcagttgtgtggttttgagtgagtttcttaatcctgagttctaatttgattacactgtggtctgagagacagtttgttatgatttctgttcttttacgtttgctgaggaatgctttatttccaactatgtggtcaattttggaataagtacaatgtgatgctgagaagaatgtgtattctgttgatttagggtggagagttctgtagatgtctattaggtctgcttggtgcagagctgagtgcaagtcctggatatccttgttaactttctgtctcgttgatctatctaatattgacagtggggtgttaaagtctcccattgttattgtgtgggaatctaagtctctttgtaggtctctaaggacttgctttatgaatctgggtgctcctatattgggtgcatatatatttaggatagttagctctccttgttgaattgatccctttaccattatgtaatggccatctttgtctcttttgatctttgttggtttaaagtctgttttatcagagactaggattgcaacccctgctcttttttgctttccatttgcttggtagatcttcctccatccctttatttggagcctgtgtgtgtctctgcacgtgagatgggtctcctgaatgcagcacactgatgggtcttgactctttatccaatttgccagtctgtgtcttttaattggggtatttagctcatttatatttaaggttaatattgttatgtgtgaatcggattctgtcattatgatgttagttggttattttgcccattagttgatgcagtttcttcctagcatcgatggtctttacagtttggcatgtttttgcagtggctggtacgggttgttcctttccatgtttagtgcttccttcaggagctcttgtaaggcaggcctggtgatgacaaaaatctctcagcatttgcttatctgtaaaggattttatttctccttcacttatgaagcttagtttggctggatatgaaattctgggttgaaaattcttttctttaagaatgctgaatattggcccccaccctcttctggcttgtagagtttctgccgagagatccactgttagtctgatgggcttccctttgtgggtaacctgacctttctctctggctgcccttaacatttttttccttcatttcaaccttggtgaatctggcaattatgtatcttggggttgctcgtctcaaggagtatctttgtggtgttctctgtatttcctgaatttgaatgttggcctgccttgctaggttggggaagttctcctggataatatcctgaagagtgtttctagcttggttccattcgccccgtcactttcaggtacaccaatcaaacatagatttggtcttttcacatagtcccaaattttttggaggctttgttcatttctttttactcttttttctttaaacttcttgcttcatttcattcatttgatcttcagtcactgataccctttcttccacttgattgaatcagctactgaagcttgtgcatgcgtcacatagttcttgtgccatggttttcagctccatcaggtcatttaaggtcttctcttacactgtttgttctagttagccattcgtctaatcttttttcaaggtttttagcttccttgcgatgggttcaaacatcttcctttagctcggagaagtttgttattaccaaccttctgaagccaacttctgtcaactcgtcaaagtcattctccatccagctttgttccgttgcttgcaaggagctgcgttcctttggaggagaagaggtgctctggtttttagaattttcagcttttctgctctggtttttccccatctttgtggttttatctacctttggtctttgatgacggtgacctatagatggggttttggtgtgaatatcctttttgttggtgttgatgctattcctttctgtttgttagttttccttctaacagtcaggttcctctgctgcacgtctgttggagtttgctggaggtccactccagaacctgtttgcctgggtatcccagcggaggctgcagaacagcaaatattgcagaacagcaaatattgctgcctgatccttcctcaggaagcttcgtctcagaggggcatccgactgtatgaggtgtcagtcggcccctactgggaggtgtctcccagttaagctacacgggggtcagggacccacttgaggaggcagtctgtccattcttggagctcaaacactgtgctgggagaaccactgctctcttctgagctgtcagacacggacatttaagtctgcagaagtttctgctgccttttgttcagctatgccctgcccccagaggtggagtctacagaggtaggcaggcctcattgagttgcggtgggctccacccagttcaagcttcctggccactttgtttacccactcaagcctcagcaatggtggaaacccctccccaagccaggctgctgccttgcagtttgatctcggactgctgcgctagcagtgagcaaggctctgtgggcatgggacccgctgagccaggtgcgggatataatctcctggtgtgccatttgctaagactgttggtaaagggcagtatttgggtagcagtgtcccagttttcctggtacaatctgtcacggcttcccttggctaggaaagggaaatcccccaatcccttgtgcttcctgggtgaggcgatgccctgcccttcttcggcttgccctctgtgggctgcacccgctgcccaaccagtcccaatgacatgaaccaggtacctcagttggaaatgcagaaatcacctgtcttctgtgtcagtcacgctgggagctgtggaccagagctgttcctatttggccatcttggaatggacccccaatgctgtatcttttcttaaatttctgtaacatgcctgttgagtattcagtattcttttcaattttcagttcatcatgatctttgattatttcatgatcagcatactattaagtggcatggattctctgtgatgctgatggactatcctttcaatacatgaacaagattttgtttttagctttatgtaggatttttccatttttattaacttctgttcattactttcaacatagaactttcatagttggtccttctctttcttcagatcatatatatagtggtcatttcaacaccatactcttctgtaagatatttcagacttaacattgctgtccagttgctataacagcttgactttctgttttgtagataaatataaatgctttcctttttttcttatcactgttatccacagtgatatctgcaggcctttctgaccttgtcaacagtatctttatactgcagagcagagaataagaaaaaaacacagtaatgcacatagatattggcctcttgtggggcattgtgaggaacctgccattggcgtatccagcctgtacatataccattttattaccctttgtggacatgcttgcgtgggggaatctggacatgtgaggaaaatatatattacagctgaaagggcctgggaaagtcttttttcccttgaataaactgtatattatactctctcattttgactgtgacccatcacatgaagtcaggagtagaattttccacttgtggccttatgtaaagtctcaaaaagttttggattttggaggaattctgatttcagatttttggattaggggtgttcgaactgatataattatgctatatatattatgtctatatatgttaccaacccaactatacatttttattattactttacataattatatgtcttttaaggaagctgatagaaaaaaggggagaacaagtatgtagcatctatatttaatttattacatataccatcttatttactgtgattcttcttgtggatttgagttaccatatggtgttatttccttctccaatatagctttgttcccacctgccttcttgatgctgctattgtatatttaacagttctgtatattataggcataatgatatgtatttaattaaatacatatttaaaattaaatacatatttaaaaagttgatacataatcgatatacatattttcaggacatgtgataatttaataaattcacataaaatttacatatgaaatcagggtaataggatatctatcaccttaaatacttgtcttctttatgctagaaaccattcaaactattcccttctagctattttgaaatgtacaatagattattgtaaactacagtcaccctactgatctattgaacactaggtcttatcacttctaggtcttatttcttatatctaactgtatatttatacccattaatcaacctcttttaatcagtctctccccctgcccttcccagcctctggtaaccaccaatctactttgtctcttcatgagttccacttatttagctcctacatatgaatgagaacaggtgatatttgtctttccgtgcttggcttattttacttgacataacgaattctcatttcatccatgttgctgccaatgtcatgactccattcttttttacagctcgataatccattgtgtatataaaccacattttctttatccattcatccatggatggatacttaggttgattccctatcttggctattatgtatcattctgcaataaacatgggagtgcagatatcccttcagtgtactgattttttttcttttaggtatatactcagtcgtggagttgctggataatatggtagttctatttttttttgaggtacctccataattttccatggtgactgttcttatttacattcccaccaacagtgaacgagggttccattttctccacatccttgctagcattcgttattctttgtctttttataaaagctattttaactgaggtgagatgatgtctcattgtggttttggtttgcatttctctgaaaattagtgattttgagcattttctcatatacctgttggcaatttgtatgtcttttgagaaatatctattcaggtcttttgcccatttttaaattggattatttgtgtttttttttttcttttgctgttgaattgtttgagctccttatatattattattatgaatccattgtcacattgatagtttgcacatattttctcccattctgtgacttgtttcttcactttgttgattgtttcctttgttgtgtagactctttttagtttgatgtaattccagtgatccatttttgctttggttgcagtgcttttgaggtctcacacaaaaaatcttgcccagaccaatgttcttatttccccagtgttttcttctagtagtttcatagtttcagatcttagatttaagtctttaattcattttgatttgattttttaatgtggttagagatagtggtatagttttattcttctgcgaattagatagtctttattcagttttcccagcaccatttattgaagagactgttcccattctatgttcgtggtgactttgttgaaatgagttagctgtaaatgtgtggatttatatctgggttctctattctgttccattggtctatgtgtctttttatgcaagtatcgtgctgatttgattactatagctttgtagtatattttgaagtcaggtaatgtgaggcctctagccttatttttgctcaagattgctttggctattcagggtcttttgtggttctatataaattttaggattttttgcgtttgtttatttctgtgaagaatgtcatggtattttgatagggattatgttgaacctgtaaattgctttgggcagtattgtcattttaacaatattaattgtttcaattcatgagcatggaatatctttccatttttatgtctttaatttctttcataagcattttatagtttttcctgtatagatctttcattttagttaaattgactcgtatgtattttatattctttgtagctattgtaaattgaattgctttcttgatttcttttttagattgtttgctcttggcatgtataaatgctactaatttttgtatgttgattttgtaacctgcagttttactgaatttatcagttctaataatttttggtggagtttttaggtttctttaagaataggattatgtcttctgtcaacaaaggaaatttaacttctttctctccaatttggttgccatttatttctctttcttgcctaactcttgccaggacttccaatatcatgttgagtaacagtagtgaaactggacatctttgtcttgttcaagatcttagaagaaaggcttttaattttttcccatttagtgtgatactagctgtgggtttgtcatctggcctttattattttgagatacgtttcttctatatccagtttgttgagggtttttattataagaagatgttgaattttatcaaatgcttttaaagcatctattaaaatgattatatggtttttcttcttggttctctgttgttgtgatctgtcatgttgattgatttgcatatgttgaaccatccttgcatccttgggatgtgaatcccacttgatcatggtgaatgatttttttaatgtgttgttgaattcagttttctagtattttattgaggatttttgcatctatgtacatgggtgatattggcctatggttttctttgtttgttgtgtccttattgggttttgatatcaggataatgctgtctcgtagaattgagtttgaagtatttcctccttttcaatttttttgaagagtttaagtagaattagcattagttctttaaatgtttggtagaattcagcagtgaagccatcaggtcctgagcttttctttgatgggagacataattacagcttcaatcttgttacttattgttggtttgcttaggtttaattttctttatttttcctcttcttttctttctcttcttctgttttctttttctttcttcctacaggatctctctctgttgaccaggctggagtgcagtggtgcagtcatagctcactgtagctttaactgccagagctcaggtgatactcccacctcagcctcccaagtatttgggaccacaggcacgtgcccagctaatttttaaattttgtgcagagacagagttttgctatgttgcctagactggtcttgaactcctggccataaatgatcctcctacctcagcctcccaaagtgctgggattataggcatgagccactgcacccatcctattcaagttttctatttcttttttcttttctttttttttttttttaagacggagtctcgctctgttgcccaggctggagtgcagtggcgcaatcttggctcactgcaagctctgcctcctgggttcacgccattttcctgattcagcctcccgagtagctgggactacaggcgcctgccaccacacctggctaatttttttgtatttttagtagagacggggtttcaccgtgttagccaggatggtctcgatctcctgacctcacgatccacccaccttggcctcccaaagtgctgggattacaggcatgagctactgcgcccaatccaagttttctatttctttatgatttaatcatagtagattctatatgtccaggaatttatccatttcttctaagttttccaatttgttggcatgttgtccataatagtctctaataattctttgtatttcttgtggtctcagttgtcacctttttcatttctgattttatttggatgttctctgtttttctttttttttttaaatatatgcacacagttttatatataatgcagcatcacaccatgtagggcatttactcttattttatacattcagatatgtttgaaacacttcttaaggctacaaaacagaacatagaaaaataaacaggaatatattcaacacttacaaaaagtgatatgataaagaatataaagtactagtttccttttaacacttcaaaagatacgtatatatactttttttacaagtaacatcacaaatgatcacatcttcacatgctcttaaagtattatttgtactcagtgtaaggctattatcgtttttcatacacaaaattttcagctctgtaacacaatgcaatttttaatccattcaagtaagttcaaccccaaagttgctgcttcccagcattaagacatgcacccactcctcttctaagattttctaaaacttgtatttcggggagaaagacctcttttaaaaaataatcccaattagtgggagagtaaatggctgacactagtagcaaaaccttagttatttgaaaataacatattggaaatgagacattattaggattctaaacaaaaacaatagcatttagacataaagtaggaagcaaaacacagtacacagaaatagtgtagccaaatacgtattctcttcagctacactagagtggaccttgcttagtatccttaagtaaaagacaaaacatttacctcatctaaaaatgaagggtaaaacaaaagaggccaaaataaatattgctagtttctaggatggctgaatgttttctaaaccagaaatggttagaaaggaactttattgcaccaagtcaatcataagcaagtttgcagttcacaggcattttaattcaaccttgagtcacaaaggaaacaacacactgcaagaatacagtctgcattaaataagatatatcggcattgtggtctgggaaacctactcttgccaggacaaggcagggtctgagcttaggtctgccatgaaaatgaatttgtgggttatcagtaaacagtatgaggactacacagatgccagcatcctgctgccaaggagacatggggcaagagttgaagatttatttgagaggaaatgaagagacatacacaacaccaaagggaaaagggggctggaataaagttcagccaaagcacctaacacaaaaaacaggtgagctttggtcagtctgttcttcaaaatatgtatgatcataatatggtgaagtttcataatttccaactcaaaaatgcaaatgatcctcagttctatacttttgcctctattctcttataaagaaatatgtcaacatacagtatgacataaacagttaaaatgaaggacaaaagcttgcttagccttagtttgacctcagcataaggcaaaatcccgtggactaattaatacatttaaaaacaaacttaaaggataaaagcgaaaccaaccttcatgcaaagattaattttaaaactatcaaaagtcagttcttttattccggaggtcactgagaaaagtaccatctgctaaaattctctttcaagcacttcttccatcatatcctagaggtgagatatgggaaacagaaagcaaatcagtgtttccttcaggagctatatattctgttactcaattgaggtaagacaaagtgacaatgaagatatgaatagtatttccttccaatttttaaacattttcagaagctgagataaaaccccagtcaataaaatgcagcaacaacttattttggactcctgagatcaaacacattgaactttcaaatctggtgtttctatcaaaatgtgattttcattaaaatcaggtaagctagtcctacaaaaaaaagcataagctgaaagtggaggaccctctatcttctcattccttaactgagccaccagtgttaagaaagaaatggcttaagcggtaccttcaacaactattctagtttagaaggtgacaacaaattcctttcaatagattctctcaaaaaatgttttccacacaaccatcccagtctttacaattttttacctagcaccatcataataaaatgttatctttcaaagtgctctctaaaatcctgttacattatctaaatgctaatcactactcaaatcagcagttacacggacgttaggtaattaaaacagcacagaggtaaataaccattattacagtacagtggcgattcactgagcccagctggcatccaaacattcccataggttatcagagaacccagaaaactcatctgtttcagtttgtcaaattcaagtgaattgtattttcttaagtaatttgctttacaaaaaaagaaagtcaccgcatctggttttggctaggtgtattacacatggtatgcaaagagaaattactactatgttatttgcatagcactcaaacttcctgatcagaagataatctcaacataataaaagagtggattttcacattggtatgtacaaataaggaatataagctacagttatttttacaaaataacacagatgaatgaatactgtgttaattcagagttcaatctccaaatgaggacagagtacaacatgcaaagggaacctctagtgaatactgcaaagactggaagaaagcagaatggaagatgttacctacctaagggtaacaagctataaaatacaaagcaaaaccattttctagcagcatcctctagaaaagaactagaagtcacaatcatattatcttctatacgatagttccagccctgacaaggagaacatgcaagtgtaaagtgaaagtgatacataaccaatggtgcaaggggaaaaaaaatacacacacagtaactctagaaacctgtcaagctaaaaatttttaacatttcttctcacaaaatatttagaatctgtcagtgcattagtgttaaagtggcatttagaaaacttctgcagttctgactgatgcagattattttcaaaatgcgtagcatctacatttctttcgagtaggcaccatgatatttacaccagtgctaagaattcttggtggaaacagccatttcattggatttcctactatacttctgtgcaatctcaacaaataccaaaattcaaaaatataccttatgaatattaaaagaactatatacaacattgctaagacacagttaataggctgccttatgtgaatattaaagagaagacattattcaagtttgacagatatcgagatgaaaggcctttgggttggaagcattttaaaagacaacagtgttttaggctgagaattgtctgagcccagtttatgactaaggcattgcataataaaatagacatttctatttggtgcaacgttatgtttggaatctatagtgtgtcaaatggtgtattttcttgtcactttagtaagcactataaagcacacatttccaacatttgaaatcagacttataaacttataaggaaaaagccaaacactaaatctataatgttttatattaagctgcttataaaaatactttaacaaacatctgctttttacgaggacagtcacttgatagataaacagattctgaatgaagaaaaccggcaatgccaggaattaacctgcccccttgaactcatgtccacaatgtcttgtcgagtatgggagggaaggtaaggaggctggggagaggaaagagttccaactggggtttttactttattgtagttttttaaagccttcagaaacattccacctaagagtttctgttagaaaatacttcggcaacaaccgtcaagcgtgctgtcccctatggccatctcccatccctgatctcctcctatctcccctaaatggtcgccctctgacatttcgatggtactgataaccttcatcccgacttctgcttggctgtcctttccaggactcctcacttctcacatgttgatatccgcccctaccagaatagccccaatcacttttgtacttcctgctcccataagtttgattatagaactgcttggatctaccacttctcaaaatatgacacttcattttcattttctgaactctcttcttttggtctttgcactctgctatccacagagttggccccagggctgaccacatcagcagcagtcttaggatcttttactttttctgttttttctttcagactttgaatggtccttttaggttcaagttcaacaggcacaatttctctctctctctgtttagaatctgagtgggagggtgagcctttccctctgctacaggagggatggaagccaatgccatatctgcctttcgtgtctgggaagattgctctgtccggccttcgtctggcttactgctcacacttgcttcagggagagaatgtacatgttcactcctggctgctggaaactcatctactgtggaaactgaaccacaatctttagacagatccagattttccagagacagatccaattctcctttctcatcagagggcaggacaatattctgcctcattactggattttctatgaatccctgaaaagggtacccatgccaaacatgaggaaagaaaggaggtgcaataggaactgggcctaagaatggattgggtccaaaagatggctgggggaacatattcttgccactcagtgactcttcataatcagcatgcagaagctgcccaggggtctcagattcaagatcagcctggtaagacaattgtccgtgactttcagacacctgagatggagggataaccagaggtgaagaaaatgtcggcggtccaatcactggctgtagcatttgaccattaacactagcctcagtctgcataggaaagtgggcatcagtacaggtacaatcactttaattctgggcggcaggagcctctttgaaccagggattatgaagataaacagggacagggacctttgggtacatcctgcaggctgccaggtaggcctggtgcagagggtacaggtaagaatgtggggcccacacaggacaactgtatgccttcacaccaagattgaagaagaatcgaagaatattcttatctttaggtaggtcctccccagtctgacacagtgaagaaggtggtacaatggctcgatctcccttttcattacaaggaaacccaggatagagtgggtcttgataaaggctcaatgtctgaggcaaaggcatcaagggctggttaactgcctgtattgacacaggaactggagagggtgttaaatgagtttgggatacagcagaatcaggtccaggggtcaaagtctgtgtcactgaccgaccaggaattggagcagggacacctgttggtccaaaagttgtaggttcacttggccaggctggcacagtggctggtaaagaaggcactgcaggagttagatgtacctctggagaaactagaaggggagctggatttgacaaagacacatgttctgctggcttttgttctgcaggagaagggcactctaacttctttgactttgatggtgatgaaactgttgcatatttatcatcagtaatattctccaatatgcttggttcgggtcttttatccaactatgtccatgaatagagtctttgtcttttcgttcttctgtatccattctccgcctgcttccttttctatcacttacgtgtgatgattttctctggacacatggattgctactctgagaagtagcaatagttagattctcgacttgtgtgatcagaatcctcaactctttcacgatcaggttttcttatgatctgtgaaggtgtccggctaagatttttgtgctcactggagaatttctgagactgtgaccctgaagaatgactagagaactcacgttgtcttactcctgaaggatgctgcagtcgaggaggtagtgctaatggggcttttattggcttgcttggattctttggccctctgtaatccatatcagaatggaaattttgtccagaagtggaaggttttttcatcttcttccctgacactgtgttccagctttctgggggaggtgccttgaggttctttgatgtgtactttcccagttcttcaaccaaaactggtccattctcagaatgaactccttgaacgtctgcattcaaaaattttccattgtgatccaacctaacttgacatttgtctccaacttcatattgtaagccagcagcaatggaataatcacgtttttgctgagcttgtttagactccagccaaatttcatattccacatttctatagactgcaggattgagtgacttaagaacctttctagccaaaggcaggctagtagagttcccattgttcttcagctgctcgttgcctgacaaaggtttaaatccattcacatcagcagcagcaacagcagttttactcttgcagctgtcatcctctgaatctgatatttcactgttgtcttcatcagctacttccaacgtgtctagttccatcacaattttactaacatcagttttaaataccttctcatacagcaattcataaaggagagactgacacatagcagagctttctttatactttacgggatacacaatatcataatgatttccatttgaaaaacacagtaacaccttttcaggaaaattattttcagttacttgtgaaggagaaacattaggttccagattagttataaaatctttcctgtacataagagaaagggcacttatttccatttgtcctacccattcctgtggattttccaagcgctttaaatatccttcaaatgatccttctataatcgcttcaaatttctctctgttctctcgaagacagtgaatacaggccattctgacttcaacatggcgagactgagagtgcaatacctgctccgccacggcccggaacaggcacgacccgtccttggcgaccagtttccgatacaagcccagtttccgcagataggcgtccatgggcgtcgcgtcctcgcggggccccgcgccgccctggtcctcgccgtcggggacgccgacggccgcctccatgttgctggtcctgctgcaggccaggcgcgagggctagccccacatggccaggccgccggctgctcgacgccccggcctggggtaggcggcggctcgggctggggctcgggctccgcgagcggcggcaggcggcaggcggcggcggcggcccgaggcagcggtccgcgctctccgggcgcgtaggggagccctgcctaatgcatggctgtccgtacgcggccgcctcctcggagcgaacacgcgcccacgacaaacggggggagcgggattaaggaaaaccccgagagtgagtagtcacttcccgacggcctcgctgcccgactcaggacccaggccgggggtcgccgcccccacaagtttcctcgtctgtaccggtgtgaagcgagaaaagccccgccccaggcgcgcacgccgggccggctcaggtgaagcggggcctgcgtcccccgcgcgctccccacgccgggagccgaggaaaccaaaaaagaaagacgcggcctttcgtttccccaccacgctggagggcgccggaggggcggggagcgggtgggggctccccctggatcttctctttttttcttagccttgctaagactaagaattgtccatttttgtttatcttttgaaaaatgtggctttttgcaccattgatcttttatattgctttttaagtctcaattttatttatttatgctctggtatttattatttccttctgttaattttggatttggtttatttttgcttttctagttccttaaggtctgcattgttagattgttgttttctttttttagaagtgtacttttttgatacagctgtttattgctataaacttctcttttagtactgcttttgttgtatcccatagattttggtattttgtatctccactttcatttgctttaagagattttaaatttccttcttaatttcttcattggctagttggtcattttggagcatgttgtttaatttccatgtttttgtgtagtttccaaagttcctcctttctttggtttctagtttcattgtggtcagaaaagataagtgatacgatttctgcttttttgaaattgttgagactttttgtggcctaagatatggcctattctgaagaatatttcatgtgttgatgaaaagaatgtgtattctccagcaattgagtgaaatgttctgtaaatgacaggcctatttgatctagtatgtagtttaaatctgatgtgttttttgtttttgttgttgttgttgttgattttctggctggaagtccctttttattatttttttaagtttcttacttttgctgtattgcagtctacccctcactttaagtctattaatgtttgttttatatacttaagatcttgggtgttgagtgcatagatatttataattatgtccacttgcttcgttgaccccattatcattatttattgaccttctttatctctttttacaggacttgttcatagtctattttatctctttataaatatagctactctttgctcttctttgttttccaattgcgtggaacatctttatgccttcactttcatcctcatgtgtgtctttataggtgaggtcggtttcttgtaggtagtatatatttggatcttggtttttttttttcttcgccattcagccactctgtgctctttaattcgagaagcgagtccatttgcattcagggttattatttataaagtcgtccttactagttcattttgttgcttattttctggttgttttgtaactgctctcttcctttcttacatcttcctttctggttaagtgattttctctggtcgtatgttttaactcattagtttttatttttagtgggtctattataggtttttgcattatggttaccgcaagacttacaaacacatcttgtagattcaacaagttgtactatagagagattagagatctttgtaatttagctgttgagtatctttttttacccactaggcctgcctccttttaagcactagatggtgccttacgctcaggtttttctcagctctagtaaataattaggacactgcccatgctgagtgggagaggtaccagagaggttatcctggcagtgcgggaaggctgacttggagtttgtgcctgggaaacctgtggagtgaagctcctacaatgtggtgttgctgaatagccactctgatttggtgtcgtctcctttgattgagttacagagcagtttccagggttagggattgtagtcctacttgactcctttgtctctggctgttttcagggatagttctcccttcaggtactcccagtgcttcctgtagattgaggtagggacaggtcttctgtcagggaacccaagatggtgggaaagctggttggccaccttaatctcactttttccagtgtagaaatcatgaatcaggggaaagttttctgtatgcttgatgctgggctgattttgtggtgaggcatcgtgggtgaggaaatccaattccgttactgtctgctcagagttttttcattcctctgtgtccctgggaactgtctctccctacataatatttgcattctgggatattgctggcgataatcttggtgctgtgtatttgtttttggttttctgtgggggcagggagcaaagccagctttcttctgtgccaccatcttggaactggcagttcatgtattggtttatgtagttacttgtaaatcagtcaagagaggaaaggagaaatcagcaattataccttttaccagcgctcttttcttttttatcccccatggattattacgaatgcctagtatcatttcagcctgataaacttcctttattatttcttgtaaagcaagtttgctagcagtgaattctctcagtttttgtaattgtggcaatatctttatttcaccttcatttttgaaagatagttttgctagtataagattcttggttgataggcgctttttttttgtttgttttttactttatgtattttgagaatgatgtctcctaacttttggcctctagggtttctgatgagaaaagtcagctgttaatctcattaggattctcttatatgtgatcagttgtttttctcttgctgattttaagattttctgtttgtctttggctttcgaaattttgactttgatgtgtctgcatttggatctctgtgtttttcccttttggaatttattgagcttcttggatgtgtagatttatatctatacacacacatatatatgtgtgtgagtgtgtgtatatatatatatgtgtgtgtgtatatatatataaaatttacaaatttggatagttttactttctttaaagtttttcctgtgcctttttctctctcctccgcttctgatactgtagttatttatatgttggtgcacttaatggtatcccacatttctctaatgctctgtttatttttctgcaattttttctttcctttcttgcatttcatctgttacataatgtctattaatttatgttcaagtttgctgatattttcttgttcacaaatctaccactgagcctttctagagtgtttcattttacttactatacttttcaactccagaatttccatttgattatcttaaattatttctctctttattgatattatttatttgatgagacattgtcatcataatttcccttaacctgttaagcaaagtttcatttatgtctttgagcatatttgtaataattgctttgaagtgtttgtttgcccagtctaccacctgtgcctcatctagaggcagcttcttttggttttctatgtgtattgatcacatctttatgaagtttttttatgtctcataatttttttgttgaaaactggatattttaagtaacatagcaactctggatactgatccctattgtggttgtttgtttggttattggtttatgtgtatataacagtgatatagctgaacaaattctgtaaagtccattttcctcacagtgtgtagcttctgatatcccagctcagacttttcccctcttaacctgactacttatgtggcatttctggattggcatagactatgtactggtcacaggttgtgcttacattccctgaggtaggtagatttttacccttaagtgttaaatgtgtgtgtggcttggtggctgctattatagttcagggagtttacatttttttttgtcctgcatttagccaggtgctagaagcttggaagttagttcctgagagggcccaaccttgagcatgtacacagtgttccagactgtcagggatgacagtgctgtttcatttaaccctggcttcataggaattacccctgggtcagagtagcttctgttacgtcgtgtttggccagaggtggtgattcagacccttgtgccaatgaagtttctccgctctgtcagtgggtacgtgtatagcttagagaacgttttcaagactgccccacgttctgccctgatcattcctgggtgtacacagcctagtgtttttatactgcctttctgactcctctctgatctaagagggctcttcttggctgtctctggttctctgcattaaacttctgcttgctctgcctttctgcttatattggagctcctagcctttcttaattgtttttcattaatatttccactgttttctttctttctttttttttttttttttgagatggagtgtcgctcttgtcgcccaggctggagtgcaatggtgtgatcttggctcactgaaacctttgcctcctgggttcaatcagttctcttctctcggcctcctgagtagctggaactacaggtgcacgccaccacacctggctaatgttttgtattttttgtagagttggggtttcaccatgttggccaggctggtctcaaactcctggcctcaggtgatctgcccatcttggcctcccaaagtgctgggatcacaggcatgaaccaccacacccggcccactgtttttgataatgcccttaggcatggggttctgctctctgttccaaataaagtcagtcctctcagatggaaatgtagagctctttgtccttatggctcgtctttacccctgagcaaagtctccatgccactgctcctggggctgaaggtgagagtcttttttccccagagtaacactccattcttagagtgggcagtggagtgctggtagcagcccttggtcttcttagctgactgctcctggcacaaaacctctactctgggaggaagttggggcggtggcagtcagggcccagtatttgcagcctgctgtacctggaatagaaattctaccttttgaatgggggctgtgtagggaaagagagacgggtcctctgtgtcacctctccagaacagagcttctacacctctgggctgaaggagaggagaaacaccagcagcctgcccttcccggggtaaaactagccacagactggaagcctgagggagagggagccctctgcctgtcttttgggtacatataccgcaggtagaggcttcataatacagacctggtaggatgtggggaatggtgcagtttgtaactcaaacgccacagactctgacttgttctgagattgagtacattttcttgaatgaatgtttctccactttttgtatgcccttagtacagtttccagagactttaaatgtttgttttttaaaaaaattttcagcagtttttaatttttaattaattaatttttgtgaggcagggttctgccgtgtcaagctggagtgcagtggcgtgatgttagctcactgcagcctcaaactcctaggctcaagtaatccttccatctcagcctctcaaggggctaggactataagcatgcatcagcatgcctgagtaatttttattttatttttttgtagagatggagtctcactgtgttgccaggcttgcctcaaactcctggcctcatgcaaacctcccttctcagcctcaccaaagccctgggataacaggtgtgagctaccacgcccggcctactagtttttaaaatgtagttttgccagttccactgagctccttattctgtcattctggaagttctcgttcatttttaagcttttaagatcaggtttgagatcttctttatatgtagaggcaaggaagttgttattaccaaatatgatttcctgaagatactatactcatgctaacaaaataaattatactttgttgtagtaaactaaaatttatatcagaaaacttgaaaccagtctggaaggcagccttattttccttatatagaccaggattttgactttaaactcattttccacacagcttttcaatttgatgattcagactgactgttcccaggctctgtaaataaagattctctttgtaacagataacattacggacaggctctaccagcatacccattgcccttgaaactttacaaaatgctttgccgctttgtactagctttttcttcttcccagcctgcttctaattacaaacaggaaaatcagacaggatatggcattgtgactgaacaagttcattcatctaacattattaaatacctgcttcataaccgataactggtgaatattctttttattacctataaatgtgtcctagcctagagccattcttactatggttgcgatattttaaagttattaatttaaatttgacttaactctttgagcataattatgcaaaatagtcatttctttggagagaaaacttactgtagaaaatggaaatgtttaatcttataaaatgcatctttttaaagaaacccagagcatctgtgaagcaaagcaattaaactaaatgttagcaacataggagaggagaaataactgtccatgtgtgaaaaggagacagtggggcttggtaacttaggggaagaagtgatgttcaggaggccttaggtgttgctttaatattctctgtactgctagctgtgaatctagacaaaaaattgtattattctctgcttcggtttttttcctgactttaattggaaaataatcacttatctctcctgcacattggattgtggacgaaaaaaatagtgtaatttgataaggaattgtataagatttgaagtgctttaggaatgttcaatacaatggtacctgtcccacccaaagcgatttataacagaaagctctgaaaggatgttgctgaaacactttcatttataacctggcctaaagcgaagtcttaggtaaggtgttttatagcggagcacacatgttatatgtatgctgtataaagggaactttcctattttctattctcttttctaatagagaaaagatagaactcgtaaggcaaatatttttcttaactattagctccaatctcattcttccaaatttttctggttattttcagaagaaaaactaaatttaggtcacactttctttccttctctctttctcacagttaaatggcccaatgaaatgaacattaataaaaaaaagcagtaggaattgtgaatagtttactggacagtttggtcttaaactttaaatcattgtctttattatgtggttaaaatatataaggtaaatagtgggtcctaaaccagaaggctttgatcctagggtgttctatttttcatttcttagaagccaaccaaatttaaaacatgaagaaaaaaatgggaaataatcataaagcattgcttgagtttccaaacatatataaaaaataacaaacccccttcattgaggtcaggcactgttataaatgaacttgtctcgttcatttataacattgtctcattcatttataacaacatcccaatgaggaaggagtctatcatttttcattttgtgaagagccaactgtggcctagacaaggcaattgaaacttattccaggttgctacagcttctaaaaataggatggacattttaaatgatgaaattaaaaggcaaatattttctaaattacccagtagtacatattctttgttaaaaaaatcaatgatacaggaaatcaaatttttaacaaatcatcaataactctatatgtttttatgtgtgtataattatacacacacaaacagagtgagagagagagagagatctgaaagatatgcagtgaaattatagcattggctaaccctggagaagaaaagtgagaaggtaccaggaatggaagtgatggttaaaaaagtctttagctttattttgaaagttctgattttttgcaagaagaatattttttatgtagtagttgtataaacttaataatttaaaaaccctcaaagaatgaggacaggaagccaaattccagattgagtttaattttctttgaccagcctctttgtctcctttctagagacttcttcattacaatacccaaccaagaatgtttaaaacttttcaaagataatgcatatgtgagttaattggtatagctaaaattatgaaatcattgataatgaagtataagacagtatatgacggcggctaagtgcgtagaccctgaagccaggatgttgggtttgaatcttgacttccttgttgtatgacctctctatgccttagtttcctcatttataaatttggggtactgatagtacctgtctctaggttgttgtgagacctaaatgaattttcatctgtgtagtccttagaacagtagctggcacgtagtaagtaatataaaggttactattattgttattgtatcctgacacttagaaaaactggtggtagattgttatatatacatccagacttttttctatatatgtgtgtaaacatttacatacacttacacagatacaggcacgttcacaggagtaagtatatttttattaaaattggattatactatttctatttttttgtaatcttttacactcaacaccatataaatatctttctatgccattaaatgaaatgactgtttaaaataaaaattagatgcatttgatcttaaccagcgtgatagcatgggtccttttgaccaaatacatgagcataagataaaattgaaaatgcttggggctatgctgaaacctgaagtgcttattgatgttgatatagcttacttaaatggttgaatagacactggcatattctacctaagattattattacttgcctaaattgttaagcaatgatgtccaacatttttaatgtttatcttcagagccaatatgaaagatagaaagctgtttttaaagtgtcatgggaggaaagacacttgaataccactctttgtaaagaagtaaaatgatctgtaaaaagtatacttgttattaatagaattatttcttcctccacctccttctggcttttcaggagatgtttcacaaagcagaagaattattttctaaaacaacaaacaatgaagtggatgacatggacacgtcagatacccagtggggctggttttacttggcagaatgtgggaagtggcacatgtttcaggtacctcctttcctttaatttagcagaagtgttttcgattcacttagcatcaccttgctgatgtatgtaaaatgagtataaatatagaacttgaagtcaaagcttaaggaaataaaattgtttaactaaaagaaaagttagaaattcttccagtgcttttccttttcttttccccaagttttcacactcatttatttagaagaaacaatagagggtgaatgtgactgagagttgcatggtgtcagtacatctgagcaactccaagtttggtttggtggacaaagagaaagggaagaacaaatccgtattaaacacttctgtatgccaggtattatgttaggtgttgtacattgattttctcccttatcctcacagtaacttggaagcagatgttaacattctgtcttacagtcaaggaaagtgaaactcacaaaagttgacataatttgtcaagggtcacacagctagttaaactgagatttgaatccgcactcaaaacctgtagtcttttttttactctactaaactatataaagaagatttaacttgagccacttagaaagtataattattggaataatctgtaaaaattgtaattatctggaaaaataactatatttctatatatatctgttattgaaggggactataaccagttgtctcttcactggagatccttaaaccattttcaatatgctggcttagttgtgattctccctgtgtgttgggaactagaacaggtgattagtaagtttccctcgcccctccattccctgtctctatgaccacagtaccacctctgtggccaagtcattaatgtgaacagctggtaaatgaaactttctggtttgtcttaaagccggataccaacagtcagtgttcagttagcagtgaagatatcgaaaaaagcttcaaaacaaacccttgtggctccatttcttttactacttccaaattcagctacaagatagactttgcaggtatgtttttttccctaatagttgtgtgtttttagtatattgatatgataaaatctacagctctgaaggtcaggattagttgatatatttgcaaacagtgaagtatatcttttttgttatatacaaaaatacctctataaaaattcaagttttaaaatcttgagcaacattgccttttataaaaggtgtgtttatatgtttgtatatattaatgtatgtgaagattgtcttatatattaagtgcatttaatacttgtcttctaaggaacacaaaacaccgtatcagttgttttattcatcccatcagtcttttgaaatagataagaacatttaagaacatttttactttttttttttttttttttgagacgtctcactgtgttgcccaggctggtgtgcagtggcatgatctcggctcactgcagcctccgcctcccgggttcaagcaattctctgcctcagcctcccgagtagctgggattacaggcacccgcccccacacccggctaatttttttgtatttttagtagagacagcgtttcatcatgttgacaaggctggtcttgaactcctgacctcctgatccacccgcctccacctcccaaagtgctgggattacaggcgtgagccaccttgcctggccagaacttttttactttaaggatcaaacagatgttaagtgagaaagtcataggtagctggcaatagtttcaagaacaacttttagctgagtgatctttctctcgatgtctttgtcagaaaacaatttctttaatggacattgccttctgtcattttctgattgatttggctcttccacagattagccagataatctggaaatcagccccactttggatttcatctgtgttatatgggcatgttttggggtatcccatgaaaaacctgatgaactgagctcctcaagtttcaggctgttagtttcagctatttattgcttagaggcaaacaagacctggatgggaggctttcttaataaaagtacattttgtttgctacacagcttggtcctttagctgttctttctcaattcctgtgagtagtgtctttatgacagtgttagtagtgtattgtggctgggtagggtggtgaaacgttaggaaatccccttggatgaaccaaggcccagaaacagtgaaggggatttgtccagtaagggattgatggaaccaaatatgcaataattattatcccaccaaagttgtttttcttgcttttttttttaattatcaagagttaaaaaccattagatccttgctcgtgacaagccattttttttttaatgccattaggcaaataagcaggatttaagaggccctgacatttgtccctctgttgcagtctaggcagaaggtatctggtaggcatttttagtcatgtgtacaagtatttttgaggaagaactgaaaccgaatgatatgcacagacaccagacctcatgtagaggatgaactgtatcaaagcatttgataggtaattcagcaagccacatgtttctgaaagaatattttttagtagactacactttttggaaacttgctctcagaaaaaagagtttattaaaaatatcattattaaggaatgggagttacatatactaataactggagttccccaaccctctgtgtaatgatcctgtttcagaggcatggatattagcatttcacatgtactctttgcagttatcagctccaaccattctgccactagccaactcaggttttctctataaaaatggtgaaaagtaaactaaaaaatgagatggtccaagaagatggcatcacaggtcttgctccacatgctgagatgatcttgctttttccctgaacagtggtaaatccagtatgtgtagagtctaggagaacacagaaaggacagaacacactttatactagccttagcctgggtgggtaaacataatcattttgaaatggaatgatgtcaattagatgagataaactggctagaatcttacattaagaatcactacttaactttgaggaatgaagaaatggacctggtaaatattggtatgactgaggcatggatgaaagcagaaaatgatacctttaagtacttagtctcttatcactagaatctttttatgtaagtttgtactgggtctagccaggttttctattttttaggtttagttatataattaaagagaaatcaggaaatgtagaaatttttgaaattctgtgagttgtacaagttttataatcatttccaaaatttttggagagatgaaagtacatttttcttcttaataaaccaaccacatttaatactgtaatttctctctttctagtactcttagctttcctaagtttagaactctcctagtttagtgtctgtttaacctaagtgtgatacagaaggggaatagaccgtgcatactgagcagtggatgaaatgagcatctttatgtgtgagcttacgtcaagcaatgaagctgtgcttccttgaataacacctccacaacgtggtacatagctagctgcatggtaaagtacccataatacactatgcttgccagctactcccgaagctccatgattcctgatcatcgcgtagcgtggctattaatcttcatgacactttatagtacagtgtacttttatgacttatctaatatcttgtctttgtatacagaaatgaagcaaatgaatctcaccactggaaagcagcgcttaataaaaagagcccccttttctatcagtgctttcaggtatggtaaagagaataggggtggaaagagtgggttttttttttcttactattggacagaaaaacaaatagactggaaatattttggtaggtcatttaataatattgatcttttaaatatcaaatcttgggccaggcgcagtggctcacacctgtaatcccagcactttgggaggccgaggcggcctgatcacgagtcaggagatcgagaccatcttggctaacacacggtgaatccccgtctctactaaaaatacaaaaaaaattagctggatgtggtggcaggtgcctgtggtcccagctactcgggaggctgagtcaggagaatggtgtgaacccgtgaggcggagcttgaagtgagccgagatggcaccactgcgccactccaacctgggcgacagagtgagactccatctcaaaaaaataaactaattaattaaaaaaatatcaaatctctcatttgttgacaaaatagcaacattattatttactctaagtgcttcctttcatgttatccttttccttcttgtatatttacattttttaattctttagaacagtttgcagttacaaaatgccttatggtctctgctctaaactcataaaataactcactgaggtaagtttaaattgttaacttggacgtactctctcagagccatacaattactggggccgtaagaattaggtagttgttcactttgtttccacctacattgatctccattggtcaactcctagaagtaatttcaaatttgtagagactaagggagccatagggaagatggtagaacagtggacaacagtattgctttctgttccctggaacttggttacaaattttcttttttgcttgctctggccataagaagtctgaaaaaggaggtataaatgtcagaagacaatacatatttattattcatgtgaatgaatggacttgaaggaaaaaatcttaaagcatgtctcctattttctaaaatgactcttcaagcaagtattgaaattcttttttgttcaaataatttaaaatgaaactggaaaaaaaaaaaggtagcatgttaattgcagggaatgcctatttgctccttccaaggagatttttgaaaggattaaagaaagaaatattttaagtttctgtcagtttgtttctcaagacttttggttttattttagcatttattttggttttattttagcatcacgatataaaagttattccaagtacttataaaatgaatgctctagtacttctgtggaatatagagaatagtatttccttactagctacgtcatatccacattctttagtacaaataatataataaaagaattacttatcttcagaaagtatttaatctgggagaaaaatgaaaaatgagacataataatggaagatgttattgtaattgtacattgtatctgctgtgctttggtggagacaagaaacactgtgatgggatcaaacactttgttctgtcacagactgtacaaaccatagaacaaagacagcacaaggagagaactaagcagaatggaggacaataagcaagataataataaaaggagaggactgtttaggtaagatacaatagggtgttgaaggtcagtaggtgctgatatagaaatatttatttactgtgggaatacattgagcatttatcacatgcaaggtaggtaatacatgcttcctgttggcaaggagttctttaaggctgttgactacataaaaactaaaaaaattttttggtcatagctaaaagatactttaggccaagtgtgttttaggcatttttttccctcacagaaaattggggaaatatttttattcattgttgtagttgaagggatattctccatattatatgaagtacttttaggactctctaaatagaagatcaacatgggcaaacaatttgaacagttcatacaacctcactcataataggagaaaaacaaattaataccagactaatttttactaccagattgactaaaattcaaaagtttgatcacacacctttttggagtggttgtgggaaaacagatgatttctatatttctggtgagaatgtcagtaggtacattcaaagacagcatttggttggtgtctgttaaaatcatgaaaaaatatattctttgactcagaaattctgtttcaaatatgttattttacagataaacaagtggacatgtaacatgacagatgaacaaatgtgttcctgtagcattttttttttttttttgagacagagtcttactctgttgcccaggctggagtgcagtggtgccatcttggctcactgcagcctccgcctcccaggttcaagtgattctcctgtctcagcctcccgagtagctgagattacagccgcacgccaccatgcctggctacttttttgtattttagtagagatggggtttcactctgttgcccaggctggtctcgaactcctaagctcaggcaatccatctgcctctgcctcccaaagtgttgggattataggcatgagccaccgcgcccagccagctttcttaatgcagtagcaaaaagttggaggcaagctaaatattattatggtgtatccacatggcggagttctgtgcgtctgtaaaatagaatgcattcattcattcatccagtacttactgagtgtgtactatgtgccaggctctgtcgtaagcactaggaataatgatgctctctatgcactgttacagaaagatctctaagaagctatgaagtaaaaaccaaaaaaacaggtgcaataaatgtatgctttatgctaccatctgtgtgagcaaaaagcttggcttgtattaacctaaagaagctctggaagaatacccaagaaactaattaccaggagatggggcaaaaagtgagacttggacataccagggactggagtgggaggaaaacttctcactgtatatttcttcacacatattaatttttaaatcacctatttgatttttttcattaaaataagtttgaaaaaagtaaactaaagatcggtttgaaatttattaatttatttagtaacctccaatcactggaggcgattggtgtgtcatgttcagccttttgctattaaatccctcaacatcactgtttttctgtattcacatcgggtggcttgaacatgtctgatagtttttaagatttactgactgactgtgctaataacccttaaaggtagtggactgttggagagaatagtgggcaattaacagagaagggtttaggtttgagttagaacttggagaacatcgaatgaatggttgaggagttttgattttattcaatagacaatataaatacgagtttcagccttttgttttcatcaggagcttgattttgtttttaatttctttgcctaaaatcttctttacattttaaagaaattttggaaatttcaaaaaaaacaagacagaactaagcaactgtttttgaaatttttatgatatatagggttggatattttccatcaaaagttcactattgaacacctaaaaagtagcacacatagacagtcaataatttttttttttttttttttgagacggagtctcgccctgtcgcccaggctggagtgcagtggcgcaatctcggctcactgcaagctccgcctcccgggttcacgccattctcctgcctcagcctcccgagtagctgggactacaggcgcccgcccccacgcctggctaatttttttgtatttttagtagagacggggtttcaccgtgttagccaggatggtctcgatctcctgacctcgtgatccgctcgcctcggcctcccaaagtgctgggattacaggcgtgagccaccgcgcccggccgacagtcaataatttttaaatgaagaaacggaaggctgtatttaattgcatttgtcacaataccctgaaaatgaaaattaagctttgaagaagggctaagttcttgacagtaattgtaatcggcttctgatattttgttttctcttttgctgtttcaagttacatctgtgaaaacgaggccatccctatgccaccacactgggagaatgtgaatactcaagtaccatatcaggtaagagcagaattgactgaatatacccatgaaagaaaccggaaatgactgcagtaaatctatgcaaatttatttttccagcttattcctctgcacaatcaaacacatgaatataatgaagttgctaatctctttgggaagacgatggatcgcaaccgaattaaaagaattcagagaattcaaaacctagatttgtgggagttcttttgcaggtgagatgatttctaatctgaaacttctcctttccactatgtcttttatggttaaaacataaatattgaattgtattaattttcagtggtgtagacatgctgtttttctcttgccgtattttgacctggtctcaaggctcttcagcattctcagggagtgaaagaggtgctctgtaaactttgcttgtagcattgcaatgtgagaagctccttcctttcaaggtttagagctatgcatcttggctgaaatcagcattacagaggagtgtcagagctgtttagctttgttgatatgacttccttggctaagccttttattagaagtctctgcaaacactgttttgtttttaaatcatactatcttgccaatagtcttttgtctgttttattttaaagaacactttaaaacataccttcaaatttcctgcttagcctaaagtttattttgtagatttaaaatctcaattccttactggatttaagtgggaaatgacccattaagttgggtgacttaaccaaagtaaagtccattacagaaaactttaagctattaaaggtattatccaaattagcctgttctgccatattttttatgacatgtaaaaaattaaaataagcggttctctgaaatattttcaattaacatttgtagatgagatttggtgtctaatatttttaaatatgtaagctgacttttaactttttattcagagaaattgcaaataaacacaaaagtagagtctaatataatgaacctcatgtatccgtcatcctgattcaacacctatcaagatttaccacacataaactatctccttttttgttattattgttgttgctgaagtatttttaagcaaatcccagaccataactcatttcatttctatatacctgagaattaggctgacttttgtttggtaatgatacatggaattctttcatggttctgactagttaatatggcctgcgtacatttcaggttttattctcataatagtttatggtaataaggggctttcagcttgtgttctttatagtcttgggtctattggccaaaccaacttttatttctgacaataactgagtttaactgagtttagacagtttaatttagttcttgtttagatgattcttttatagaggaagacagaagcctctgcctcctttgactttattctctcagtgaataaagtaagtttttctgaaatagtctgatgaaaatttaattcattattcttcatcagccctctgaagtggagatcaaattggtctcccccataacttgagtccccagttaaatcatagtggtaaaaatgtaccagtgactccctagaacattttatactaagaattccaatgggaacagttttactctggtgatgcccttcacggttttatgtaatgacataaattacataatgacatagaaatctgtgatggtaagtgaacctgccacctgccatgacagtacaaaatactgagtctcattataagggcagcgtgtcattttgacatcatcctgaagaactaaaataactttgtctgtctcactgtcacataacctatgactcaccatataggtagtcaggcccacgtgagtccatccagcaatagttttcaaattgcctaggcctctcttactttccccacttcttctaacaaaaatgtcttagtacctactttatgacaagcactgttctgggcacttgggatataatggtacagagaaccatagcttggagagccagaccattgtaacacagaaatgtaggggtcagcacagggagtcatgggagcacaaagtgaggggacccatccacctttgccaacaaaagtaggggatgtggagtggagtgggtagaattagggagccccagacaccagttggataggagaagggcatctcaggcatcaggggcagtaagaaccaaagtctggatataagagggagcgcagaaaattgaagcagcttcagattgaacagaaattaggtagaatggtgagagaggaggctagaatggtatcaagaggcagagcatgcaggagtttgtagtagcaccactggggtggttgtgtgatcgtctttagtagccttagttgagttggattgaaccagagtggaagtcagagagttagcgggggctagaccacgtggggccttataagctaaactaagaggtttggattttttcctgggacagtagaatgccattgtagaactttaagcaagagagtgatggatctgatctgcattttagaaaaataattaggctgtgtggtggagaagggatttaaagcagtggttctcaactgggagtgattttacctgctgggggacatttggtaatgactggagtcatttttgattgttaatatggcagggtgggggtgctcctggcatctactggatagaagccaggatgctaaacatcctacaatgcatgacacaacaaagaagaagcctttcacaacaaagaagtgtccaacacaaaatctcagtaattgaaatcccagttcatagcagagagaccagtttaggaaattgtttcagtaattaaactgagacacgttgggttgcctgacccaaagtggtatctgctgtgttggagcaaagaagagagttttgaggtattaagattatagaatggtagggcttggcgcctcacttattgtatgcgatggagtgaataagggagatgagaaagataactcccaagtttttggcttgttttacttgactaagggaatatcagtagggacatctttagggatgatggaaagggagtattagttgatatacagcagttgacatatgggtcaggagttcagaagagtggtgtagactagagacaaaggttttggagttgttagaaaatgtggggtaatagaaactataggaatgaagaagatgaccagggagcgtatgtacattaagaaaagaagagggccaagggtcaaattctggaagggatgaacagaggaagagaaaacccaaggaggaaactgacaaccacagaaagcgggagaaaaccaatagaagatgtaatcacagaagctggagggagaatgtggtttacacaagtaggtgccatctgtacgattacatactgaaaagatgtcaagtaagataaatttgaaaagttcctttgcatttttcaataagaaggccattggtaacttagatgaaggcaaggttggtagacatcatattgtgtatacagcaaatgttgacaactttttcaagaagcttggcagtgaggaggatgagagatgtgagaagacagctaatgtgggattattgttatgttatgtttttaaaatttaatcatgggagagaactgaacattgtaattggaaaggacctatggagaaggagaatttaaaagacttagagaaagagtggaagggcagttgatggattctagctcctgaagaagtgtggtgagatgaaattctgagaacatatgtcagaaaggagatagagaagggtggtccagttatgtttacagataagtagaggtagaggacgaaaagaggagttaggttaaggagttcttttctgataccttccgtttcttttgtgaaggaagaagggaggtcacctacagcgaatgaagtgtagggaggtgttgataagagggaaagaaaaggggaaagaggagatttgaaatggctactgtggaaaatggggtagaacgagctgtcttgggaaccacaggatttctgtcagcgttgagggcttagctaaagtatgtgaatttatagggcaaaccatgttatgtaatgtacttcagcagtacaaatgtaagggcagatagtggaaatggttggattgatccagagctgggaagtataaggcagcaaggaaataagagcatcttgttaataatgtgaatttagatcagagattctcaaagctagttgcaggtcagaatcgccagtggaatttactagcaagtagagatacctgtcacccgccacagatctactgaatcagaacctctgggttctgacatttttaccttaaaaaattccataagtggctctgatgttcagcaggatgacaggtgttctaaatctaggcaaatttattttaatccagagcatgaaagtattcttgctccagtgcagagcatgtggcatacacactttagccagtttggcactctagtccctaagaggtggataattttgagacatctttgagaagtgggtgcgacagtactttcagtaagttcgggaatgattgtggatctgggcaaaggtgggcagggttgtgaagaacttagtgtagttctgtgactttccttgcagatgtaactaaagttcatgaggccctggaaatcacctttagcctttctggaacaccaaggtcatagtctgtgaatgtccgcatttcgtggctgccttagtagtgggagtagtgggcactagaacaaactgtgctgtggggatacaaagctttaaccaccatgcccctgccctctgccttcaactggtatatatgcaccatctaatctagtaagtaagcgttgttttccatgcctgcctatgcccatactccatgccctttaacccacagtttatttataatatctaagagaaactccagtgaattttcaaaccgagattcaatcgaatttgtgcccgaaaagtagtgataaatgaatttttttttttttgagacagaatctctttctgacacccaagctggagtgcagtggcgcgatctcagctcactgcaagttccgcctccggggttcatgccattctcctgcctcagcctcctgagtagctgggactacaggcgcccgccaccacgcctggctaattttttgtatttttagtagagacagggtttcaccatgttagctaggatggtctggatcttctgacctcgtgatccgcccacctcagcctcccaaagtgctggaattacaggcgtgagcctctgcgcctggccttctttttgagatggagtcttgctctgttccccaggctgcagtgcggtggcacaatctcagctcattacaacctccgcctcctggattcaagtaattctcctgcctcagcctcccaagtagctgggattacaggtgtgtgccaccacacccagctaatttttgtatcttttagtagagacagaatttccttagagtggattctagtcattgcagatcatgaagcacaacattgacaagtttgacattacagaccatgaagcctggcattatgtatgatactaatgtttctttgagaaaaccagtatggattcactaatgccaaactaactaataggattaccatagtggtagatggataggccccttagacagtctagcttggtttctcactttatagtggttgagaaagtttcttttcaggaagacaagatggagaaatatgtgctggtgggtatttcaaagagaaaaactagtagacaaaaagtcttacgcaaagagtaactcgaaaggcatgcatgctctcttcttggatccttcaaaatttttatcagaaatggatgaaaatgtagagggcttgcttatcacacttgtgagggattcaaaactagaaggggtagcttatttgttgagtgagtgaatcagcagtcagaaagaccttggaagattgaaacagtgggtaaaaacaagtattatcttctttttttaatttaaaaaacttttttcgtttgtttttataaagggaacaaatgcgccttgtttaaaaaaagtgagaacataaagttctgaaaaaggaagttcttagtgaaagcatgctgactttttgtaaagtaaacatttgctaaatgcacgaccttctgatgtcatgcttaatggtctgaaaagactgtcacaaatagatcaaagcatatacatttaaattttgatacatactgccaagtgactcttgagaaagaccgtatgcgttttcatctctgtcaccatttaaatgcaggtatccattcccaaacatattcaacgagctgcctatcatttacagaactcagtctgagatacggatattttactgttatttaatttttactttttaaattactatatcaagtaaagcttaactgaaatctattgcattcagtttataaatcagttgcacagatttagcaagctaagagaggtctggtttggaaaagtcctgggagttttaaccgactacacacttgattatggatgcagtttgctgccctgttaccaaaatacattcagtggtgtcggtggagtcagtgctgtctgatgatatctggactgttgctatttcatgccaacatttataaactagaaagtatccagcagattcttgttaactaaagactgttgggataaagaaagacctagaagctatgctgtgtcaggagtggttgaaggaatggtgtatatttaaccaagaaaagaaagcctaggtaggtgttcaaatttgcaatgttgttttgtgtaagagtgatttgagttgttaatgttcataagagaataactaagaccaatcaatagaagtaacagaaggcagatttggtttggcattgagatggatgtactttccaactattacagctgatcacaaataaattgtgctgttttgcaaagtgagcacgtgatgctgtgagtacttgacactggatgaattgaagcaggcattaaagagctatcagaagccgggggaggggattctttttaatttttaaaatatgatttttatgaaatgtttcaagaatgaaaatgcagcaaatagtttgcagactcccatgtatctaccaatcagatttaacattttgatacttgtcacatttccttcctcttcacacagatacaggtgaagtgtttactccatccctgtcctactctccttctttcctcctgagattggtatggtgccttattgtttgtattttgtattttttactacctgtgtatgtatacctacataatacacagtattattttgagttctctatctctttttgcaaaattctttttacattcaatattattttttaagatttactatgttaatgcacatagatctacttcattacttttaacttttatatgtaaatacatgactatattcatttctctgtgaaataattttaggctgttttcagtttttgttttctgttacaatcagtcctacattaaatatgcttttatgtgttaggatagatttatccttgggaagaggattaaactggatggcttaatgtccctcccaaccctatggtgcaaaatttagtcaactgaaccaacattttctagtttctgaggataaaaagcatatgacatgatccctgctcaaggaattcactgtctaaagtctctgcaaactttgtattacttgtttgttgtctcatttttaggcatctataaaggttagctggtttagacaatcaattacctttatgatattggggcatagcatgggataactatagtttttggcataattttcaaccttaagtttcagtgttaactaataatttttgatgagatgatttatgtgtccaagaacatttgaaattatttcttttctagacttgctttgtccacttgttatttatattaaagtatttcctgttttacgctttctattgaaccttgctcattaagattaataaatgctacttatggtatatttctgtgtgcttttgtgtctgtgtatattgtgtttttaggaaaaaggctcagctcaagaaaaaaagaggtgtgcctcagattaatgaacaaatgctgtttcatggtaccagcagtgaatttgtggaagcaatctgcattcataactttgattggagaataaatggtatacatggtgctgtctttggaaaaggtaattatcagaattccaggtccaatttgagccccaggagagagtttcctctttttagaggaatataaatataaatatgaactgctttatggcaaatatatagagaatgataaaacaaatggattataattgcattgtgtacgagaatagatactagtgtttttgttttattttgtttttaagaaaatcataggtaagaatattagtgagcaataaggaatagtgggggaaaacttcacgttatttataatgttgtgaaaatccaagtttttcaatttatgtctggtactcaggcaaattaaggagagaggtgaggggaaaaggtatgggatgtacatttaattttctggtccttactttgtaccttgcttccagcaagagaactgactactgtttaggatcaggatatgctgcattttgaaaatgtaaattaatttaaaaaataactactaaaaaggccattccacttatttaactgtaaggaggtcagaaggtgttacataaatcccatcagtgttaggtaaatatgagactttgcaattcatttccacatttttttagagtaagaatgcccttaatgatgtctatctcttgtgtctaccatttcagaagagttggctgctttatcgagttttcatgtgtaggcagtgagccagtaaaatcatttttgttttggaatgctcagatatgaatagcattatactctctcagaaatcttttcatggatatgggattctattgtttccagaaatattactgaattgttatcccatatcatagaaatacggtttcttggggtttaaaagaatccctgtaggccatcggtttccactgtgctctctagagctttgctggatgttgacaagggaacagggtgaggaagtggtgaaaggaaatagaaacgggagggagggccaagcagtaaaactcagggccgggcatggtggctcacgcctgtaatcccagcagtttgggaggtcgaggcaggtggatcacctgaggtcaagagttcaagatcagcctggccaacatggtgaaaccctgtctctactaaaaaaatataaaaattagttgggtgtggtggcacgcgcctgtaatcccagctactcaggaggctgagggaggagaatcgcttgaacctgggaggcggaggttgcagtgagctgagatcgcgccactgcactccagcttgggagacagagcaagactctgtctcaaaaaaacagaacaaaacaaaactcaggtccaaccacacttttaatcattaaaccagttttatctgttttattaattgttttctttgtaagatttattttaaaaacagaagtctgatagctatattttggtgggggcaggggatggtgttggtggtgaggactggtctgtaccaacaaatctattcctatggcagtctatactacagctgtccataacagatggatttctattcttctcttaaagatctgcagatgaggaaattccacatctatttttattatacaattctatgcatctattctcctgacaaaatgtttttgcttgtttttaatatattcttcggagtaatcttggcttttcttggtcctctttgtttaaggaacctattttgctagagatgctgcttattccagtcgtttctgcaaagatgacataaagcatgggaacacattccaaattcatggtgtcagcttgcaacagcggcatctgtttagaacatataaatctatgtttcttgctcgagtgctaattggagattacataaacggagactccaaatacatgcgacctccttccaaagacgggagctatgtgaatttatatgacagctgtgtggatgatacctggaacccaaagatctttgtggtttttgatgccaaccaaatctatcctgagtacttgatagactttcattgatttcacttccaaatctcggtggtcaaggaagctttattcttttttgcaggaaggtttgctcttcagtcatctagccactaaatgttaattatctgatacttttgaaacagatatgaaaaaaagtggcctccatataaaaagacatactgacttcaaggttggtttttgttgttttgtttttgcctgtttcttgtagtcttgtttgttaaaagttgatatcattgatgttttaacacataggggtgaaagataccattcaaaatggaatcagctgagtctcaactaatgtggtcattgagatctttaaagtttacgtgtgtgttatcaggataaatgattttagtttaaatagacttattcgtataaatgttgaaaaaaaatacagacataaatgtgtccctttagaggaattgatcctttgtaaattgaattcaggtagtagtatcatccaccaatccatctgttgctttgttggtcttctgaaggggggatttaaaactctgaaacagtctgagcaccttgagagaaatcagaaacaagacaattatttgcagtgctgtcaaacaagccagaaggagaaaatcaaggtagaatgccccactttccagttgccttaggatagcaggctgcagcctcagacttgatcctgtcattctcctctgtctcccacatctgaattgataattgctgcaaaatgtcattagcctacacttcatccatcagggctcttggattcttacaccacgacttgctgtgcaaggtgtttattgcatcttcaaagtgaaactttaaattattattcaaacatttattttccttttgttttaaaaagagtccctacaatgatcacttctaagatttttttttaccttcccctctgcagcacacacagctattcaacaatgatttctaaaattcatatttcaaatttgtatctctccattttgaaacattatagaaagcatgggatgcttgagacaaatctggtttctcctttgaagtagctgttgacaacctactctcttgaaaagttagatataattcttaatcatgtttagtggaaatttgtttacctgttccatctgttttgctgtttcattgtaaggaagatgagaagtgttggaacagcttccctcccctaaaggtattctagcagaggcgagacagcaacttggcgggcatgttgcataggagttaagtaccagatggggaattgcccatgtgatggtgaagagtctctcacattgattttcttccttttctcctcttctctcctccttctcttctctcctctttctcttctcttctttctcttctcttctgtcttcctcttcctcttctcttcctctcctcttcctctttctctctcttcctttttctcttcctctttctctttctctttctcttctcttctctctctcttccttccttctttctttccttccttccttccttccttccttccttctttccctccctccctccctccctcctccctttttctttttctttctttttttttggtttggcagagtcttgctctgttgcccaggctgcagtgcagtggtgtgatctcggctcactgcaacctccacctcccgggttcaagcaattctcttgcctcagcttctccagttactgggactacaggtgcataccaccatgcccggctaatttttgtatttttagtagaggcggggttttgtcatgttggccaggctgatctcaaactcctgacctcaggtgatccgcctgcctcagccttccaaagtgctgagattacaggcatgagccgctgtacccggcctgattttctatgattctgcctttaaaagacagcacgtataccaagcctttttcagaaagcttttctcttaactccttctaatgctgaattttctctctattatcctcacccaattttggctgagagttagtgtacacaatttaacttcttagaaaaattccagtgtctatgcttatattgctcacttgaatcatttgaattagaaagggatctacaaataataaaagcaaagagtgcagacagattagggatagtaattcttaaagtgccatctatcccagatttccgttatagaccagcatatgtgtaattgtgcagtgggaggtaagtagtacccaggacattgcatgtacaatactttgaaacaaagtggcaacaaagatttcctggctcaggtatgcaccccagctgctggtttagatgaagtgctgagaatatttagaaaaagcgctttaaaaagcatctagagattatcatgaaaataattggagacaaagtcactaggctgctttgtgagaggcagcataccatggctctaaacccgttcacaaaaaacaatgttagagacattaggaattcaggttttgaaaatctttttttcgatttatttgtaatttacataccaaaaaaccacattaaaatagtcctcccttcaacatggctatcttttttcaagttttatatgcatagctctctcagcacttgaatggaaaaactgttacagcatttgggagttgtttttcttttagacatttgcagatcttatctcaaggtgactaggaacccagagctaagtatctgtgaggcaatctctgcgaacgctgaacttacctagttggtttctatgaaatatgtagaatgcactgcagtagccattgtaagaaggtactataccggttttttggggcttgttgttgttgtttggtctgagaatgtactgccaacccctcttttataagagagaactgattttgatacatattttaaaatatgatagtacagagttaatggatgttaaaattttatttctttgttttggtaagtagattaaatcgagaatcatataatcagtacatttgagaattatataaccagtatataataatactggacacaaccatttgccatcttttcctgttatcatcccatagagtgggtggggagaatgaatagacataaacctagaataatgataaatggtttttaaaactctatattgaatacattccagctgataatgacttttctttttcaccttggtgatatcagcctcagggtaaaaaaaaaagtttcataaatcttttagttataaacaggaaagttttatattagtgtgtcatttcatttctagactgttgatggtgatgatgataaagaatttggagccaattttgatatatgaatgtattgcttttacatgtgatgattaaagctctccattagcagttcttggttgtctgtgtatatcatatatttgtttctgtgacttatgtatctcatctccaccttgtattatttaaacctaagttttcagctcaatcttagtggacccaaggagtttgttgcctgtaactcatatgtaccccacttgcggatgggggaagtctcttgttcttagtttgaatcatcatgagcaatagctaatcaaataacctatgggaaaaatcatttactgtgtgctattataaaaaaaaatccccaaacaggccaagagttggcatctgcagcattttttattcttggtgtgctcccctggctcagcggaacagctctgtagggtgtgtctgccttcatccaaggagtatccttcctacagcccatctaacctccagccactcgcactgtgtctaccatcattcctgttgaactgagttaaacattccgttcaacctttggcaagaaaggatggtatcaaaggctctcctcaggttagaactgagagaaatgaggggcagaatgattgactcattgtgataaaaattcaattgagctttgattgttgatctagaagagccacatccttccaaattctgttccctagccattcgagtgtttgtgattacctcccaaattgctaggaataacacgagaaacaatcttatggtgatcctagttgtgtcgcctccagattttccactctccttaaggattatttgtttattttaaaatattttcttttgcttaaaacaacgagacagtcaatttctagatgaaattatacactctgtacttgtaaaagagataaaaggtaatgaaaaatagcacggaaaggaaaaaaaagacccttgtcaaaaattagtgttgattagaaactttaacaaagtgattttagttatttttatccctttgcactctatgcaggaagagttttggtgatacgagatagtctgccacactttcttatgaatcatttcataatgttacttggggcaacacagatggaagaaatgaacatttcaaagaactatgaaatacataattatttgcgggctgcctgattagtgtgagtaatatatgccgggagaggtgagccctgaatatccaggagagaagttgaaagttcatgttttaaccttgactttttagcagtggtagtttacttctcatgtcttcagaaactctaggatggaaggtggtttggggacttacatctctctctttcctcctgtctccttcctatattgagctctacttgatccatctcaggtaaaaggatgtctcagttatttctaaacccaaacagtaaattccttgtaactgatctgagtctcctgctgtaagattttgtaacccattttctcagctttaattgcttggcttccattttgtcagcactacaggccaagcacctggctatttgaattctctcaccgtgtggctgcgtatctaagaatttagacactgtcttacttatttttaagtggcttttcataagattggagcataggttttatgccaaagacatttgtgttttctgcagcttcttagcattgctggaccctctaccaagaggttatacggtaagctgattctgattctgtggcttatgctgacttcatgattgtaaaccaacttaaggagagtcaccatccagaatttaatgaaatcatctttgcaatattgattatacatccagactgcacttgtgttttcctttttaaaaataccttttcctgaagggctcattatgctttaatgtctcctagataacatgtggaagctgtaggcattataagcccacgtttgatgaacagtctcagagaatcagcgtgcaagctcatttcctccactttattcctataagaagaagatcaagcctcaacttgggagccagctgatctgaattttattcctggctttgctgtctgattcagtgtgaccttggataactcaccagagagggaaggttcacttttcagaaggtgaagtttatgatagaccaatcagactctcgttgagagaaaaagacctgacggagcacagctagattttcctaggcaacatctgacctgactgaagatgatttttgagtttgggtcgggaaaatacaatagcagggatcatgatgcattgagaagaagcaagggcttgcagtaggaaggaaaaagaatggacctggttgtccatgaaactctgccactaattagtttccccactccctttctagttcacagctctgaattcttgtggcgtgccagggactgaacaagtcagacatggcctctgctctcatggaacttaaagtctagcagggaagacataatgaactgtaatgacaagagtgatgaactttcctgaaggggaagttcaggccactgtgaggctctgacagagggatttcacctgtcctcaggaattagggaaggctttcctggggagtgacatttgaatgtgaagatagaaagataagtagatgttaattaagggaaggaggattttatgtcccccagccacacccatctgtgccatatcaggctttggagagatgagaaaaaccagataggggtagaagcaaagttggaacatttttttatcattaaaacaaagatgacagaatcaaaaccattcaaattgtgttgccccaaacccctgcgcctggtcctggggtcagccttaagggaaccaggacccagcagtaaggggtatgtggagaagggattgtgaagattttatacagtttaagggaatcaagaagcttgttgggtaaaggagttccttcttggcccccatgcctttgcttatgcctttttgcctctccctagaacacacagtcatattcctccctcttgaaaactctatttgaagcatgggctctggagtcagacgtccacgttgattcctggcgccaccctttaccacctgtttcacttgagcaggttgcttaagctctctgtgctgctgtttcctcatctataaagtggtgataataatagtgtctaccctagagggttgttgtgagaactggatgaagtaatacttgtgaagtgtttgggatgatgcccggcacgaagcctcagtaaatgctggtgggtattaatacgtaaggcccctcgtctttcaagaagtcttctatacctaatacaaccctcacaagctaggattcatacagtatttatagtgtacttggaagtagggacataacttttttttttcttagcatttacttggtcagtgccctttggccaaagaccaccaggagcaaccctgtaagttaaacaaattaggtttattactcatggcagccagagagcacacacaccctgaggaactatggggtgtcccggtaggagggtgcaagaaaagcttttgtagggtttgggctttggggatatggggaagggtctgaggagttaggatttcactctaattggatgccgtcagaaagcaggggcaattctatgatttggcatgttcataaatcttatctatagagagggaagtctagctgaggataagctgtaattagcaaagcagaagcagttgctcatctggctgagagaagtggttggtattctgtgggtggcacagtgaccttatttttgtctgttcttagacacaattatgaaatgaccttgttttgtctcattttattgtggtctcagaataaccttgtcagaggttggttttctgtgagatagtttaggttcatcagaataacatgccttagctgtgagtaccaggccagtttctaaatgtcagaggctgttctttttgttctcaacttgtctaacttttgtttgggctacttttcttcctcctgggaaattgtaagagaatgtatttactcattcaacaaaccagcaagtgggtacctgtactccataccaggcacgatcctaaacacaggacacagtagtgaaatctctgccttcaaggttctccaagtcttggataagaagtcttggataaaattgtgtttcagttaaccgttttgctagtttaaatgccttcttcagctttcccacaagtattccagcttgtactggatactttcaatgattaggaaatactacatgctgtagacaattctgaatgctagaaaattggttcttaccttgatctataatttctttttcttttcttttctttctttttttttttttttttttgtgaaacggagtctcgctctgtcacccaggctggagtgcagtggtgcgatctcggctcactgcaaccttcgcctcctgggttcacgccattctcctgcctcagcctcctgagtagctgggactacaggcgcctgtcaccacctggctaatttttttgtatttttagtagagacggggtttcaccgtgttagccaggatggtctctatctcctgacctcatggtccgcccaccttggcctcccaaagtgctgggattacaggcttgagccaccgcgcccggccttgatctataatttctttcctcgtatattccactgcttgggtctatatctatacattaaagacactcagaacgagttccctgcatgttctctagctgtttacgtagttgacccacgggcaatgtaggtgaactctggattttcatgattccttgctgtgctgactgctcttacattcttctcaaaagaatattttagtttaacaaataatttaatgttgattccattttccacatggatttagtgtttaggcctgttttgtccgactgaaggacagactacattatcagggcttttctaatgaaagtgtatgtaggcagttaggtgctactgcgtgtgagaacagcagacgctaggtggcagcatcttgcttcggaactggcacaacaaactgggcgctgagttcatagctgcattttagagagcagggtcaaaggaccttccagaagttatctagtccctgccaccaggtgggacaacccctggtcaaatccaccgacataggtatttatcccgtttatagtaactgctaggaaaaggacacatcttcccaataggaacctagtctattattttagaattttgcctggtgaaaattcttcctaaataaccgtgccacatactgtcatctaatctgttttccttctttcttcaggtgaagtcgcattaatttaagttaatttagaaaaagatcgttggccattttctgaggccgtgcgcagaaagactgttaccagtgagttccctgtcaaccttactccttcagctcacccatccacccatccctcaccttgccagaaagattctgaatcccctaacgtgcttctggctgtactccccagcttcttatttacctctggcactacctcctggctgtgttctccatcatgcttgagttatggagcccccaagttttgtcttccttgggggttcgggttaagaactcgggttcttaacattgtaaagttaacacctcagaacacaatatgccctctgagatatgatattctatgctctttttaaaaaaatgtgtgtcagaaaagatgggccataaacttagcttcaaattgaaacagggggcgtatcaactccagatgtttctgaagtccttctctcaaagtcttaggacttgaaatggtataccacaaatattttaaaggtataatttttatactcttcctacaaaattgaggtgaggccaatttgtgactgtggaagacaggaagaactgaatgcctgcgatcacgtttccatgtcagaaccaggcagagaccccaggcagtgtgattcccagtctagtgatctatcttccagtgtaatcgtgttgtgctgccgccatatatgcaagatcttggcactgatattgttcatttaaagaatttttgtagcaggagagtagtattgtgaaaggtgtgtgtcaggattttgtgtttgaaaagcaatgtgttctaataaaacacaggttttagagtcaggtgatcctggcaacagacccagatttgctgctttctagccgtgtagccttgcagaagttgaccggcttctcagaactgctctttcctcacagtttaatgctgttgtgagaattacctgaggctgtgtgagtatatggagcacttagcacagtgtctgacatatgctagttgctcaagacttagatacaataatcactgctggctgccgtgttccaggagaagggcctctgtggggccatgagtaaacccctgctagtctgggagaagtcacactgcagtggcatggtgtcagatctcaccctatccttcgcctctcaagaaacataagtaaggaacttggcatgcaggggagaaaaaacaagccacagaaaggccaggcaacataaatgagaacaaatctgtgattttgagttattaatgtccatttcccttggcttccaggcatatctgtttctcatccattccagaaaaccgttagtgggccagggggccagacaggtttatggataaggatagtatgattttgtatatctcttatacttttcattgccaacttcaacagaagcagcaatagtcacctgatacttttataatatctagatggtcatagatttagtgtatattttcaaactcaaggaaaataaaatatatcaccattttggactaatgacagggaaaatggttcagaagttgatgacaatactggtggcgggtgctgcaataaaattggataaatttgaaatactttggatagaaataatgaaaacaaaggaaacattcattatccattaattcactctcatttctggaaggaaggaagaaagaggaagaaagtcttagttttgttattatgtggttgcaggtgttaaaactaccaaacaaatcttaaaattagaagtttcaaattgttgctttggtcattaaatatttatttactatccactatgtgccagcagttatatgccaggccctgtgctggattaacatccaagatgaacaaggtgtggtccttaccttccagaagctcttggcctactgaggagatagttatgtaatcaaacaaataattccatgtgctaagtgctggtcagagacatgaattccctatcatgggaaatgcagaaagccaagggatcagctattcctggagagtagggtaggtgtaacctaagggtaataaggcaacgttttacctgaatcttgtaggaaaatagcgtgtgacagaagtgaa

SEQ ID NO: 906 - DNA, 1454 bp, Homo sapiens
tacttgttattaatagaattatttcttcctccacctccttctggcttttcaggagatgtttcacaaagcagaagaattattttctaaaacaacaaacaatgaagtggatgacatggacacgtcagatacccagtggggctggttttacttggcagaatgtgggaagtggcacatgtttcagccggataccaacagtcagtgttcagttagcagtgaagatatcgaaaaaagcttcaaaacaaacccttgtggctccatttcttttactacttccaaattcagctacaagatagactttgcagaaatgaagcaaatgaatctcaccactggaaagcagcgcttaataaaaagagcccccttttctatcagtgctttcagttacatctgtgaaaacgaggccatccctatgccaccacactgggagaatgtgaatactcaagtaccatatcagcttattcctctgcacaatcaaacacatgaatataatgaagttgctaatctctttgggaagacgatggatcgcaaccgaattaaaagaattcagagaattcaaaacctagatttgtgggagttcttttgcaggaaaaaggctcagctcaagaaaaaaagaggtgtgcctcagattaatgaacaaatgctgtttcatggtaccagcagtgaatttgtggaagcaatctgcattcataactttgattggagaataaatggtatacatggtgctgtctttggaaaaggaacctattttgctagagatgctgcttattccagtcgtttctgcaaagatgacataaagcatgggaacacattccaaattcatggtgtcagcttgcaacagcggcatctgtttagaacatataaatctatgtttcttgctcgagtgctaattggagattacataaacggagactccaaatacatgcgacctccttccaaagacgggagctatgtgaatttatatgacagctgtgtggatgatacctggaacccaaagatctttgtggtttttgatgccaaccaaatctatcctgagtacttgatagactttcattgatttcacttccaaatctcggtggtcaaggaagctttattcttttttgcaggaaggtttgctcttcagtcatctagccactaaatgttaattatctgatacttttgaaacagatatgaaaaaaagtggcctccatataaaaagacatactgacttcaaggttggtttttgttgttttgtttttgcctgtttcttgtagtcttgtttgttaaaagttgatatcattgatgttttaacacataggggtgaaagataccattcaaaatggaatcagctgagtctcaactaatgtggtcattgagatctttaaagtttacgtgtgtgttatcaggataaatgattttagtttaaatagacttattcgtataaatgttgaaaaaaaatacagacataaatgtgtcccttt

SEQ ID NO: 907 - protein, 331 aa, Homo sapiens
MFHKAEELFSKTTNNEVDDMDTSDTQWGWFYLAECGKWHMFQPDTNSQCSVSSEDIEKSFKTNPCGSISFTTSKFSYKIDFAEMKQMNLTTGKQRLIKRAPFSISAFSYICENEAIPMPPHWENVNTQVPYQLIPLHNQTHEYNEVANLFGKTMDRNRIKRIQRIQNLDLWEFFCRKKAQLKKKRGVPQINEQMLFHGTSSEFVEAICIHNFDWRINGIHGAVFGKGTYFARDAAYSSRFCKDDIKHGNTFQIHGVSLQQRHLFRTYKSMFLARVLIGDYINGDSKYMRPPSKDGSYVNLYDSCVDDTWNPKIFVVFDANQIYPEYLIDFH

SEQ ID NO: 908 - DNA, 1766 bp, Homo sapiens
gacggagtctcgcactgttgtccaggctggagtgcagtggcgtgatctcggcccaccgcaacctccgtctcccgggttaaagcgattgtcgtgcctcagcctcccgactgccttcactgttttttgaaactttgtgttttgctttctaattggagtaactggccttggaacctgtagtcagtcatttgcctcaggtttacctgccagtcccaccagtctaaagcaagggaattgggacccccttgtcttgaatgggcctaagaggagccatcagttctccttttcccttcttggtggacagtcgtttaaaacttggagtatggactgtatgttcttagatgttttcgttcggtggacaaagtgatctggagcatttcaactgcaagtctgccttcttccttggctgactctggagatgtttcacaaagcagaagaattattttctaaaacaacaaacaatgaagtggatgacatggacacgtcagatacccagtggggctggttttacttggcagaatgtgggaagtggcacatgtttcagccggataccaacagtcagtgttcagttagcagtgaagatatcgaaaaaagcttcaaaacaaacccttgtggctccatttcttttactacttccaaattcagctacaagatagactttgcagaaatgaagcaaatgaatctcaccactggaaagcagcgcttaataaaaagagcccccttttctatcagtgctttcagttacatctgtgaaaacgaggccatccctatgccaccacactgggagaatgtgaatactcaagtaccatatcagcttattcctctgcacaatcaaacacatgaatataatgaagttgctaatctctttgggaagacgatggatcgcaaccgaattaaaagaattcagagaattcaaaacctagatttgtgggagttcttttgcagatacaggtgaagtgtttactccatccctgtcctactctccttctttcctcctgagattggtatggtgccttattgtttgtattttgtattttttactacctgtgtatgtatacctacataatacacagtattattttgagttctctatctctttttgcaaaattctttttacattcaatattattttttaagatttactatgttaatgcacatagatctacttcattacttttaacttttatatgtaaatacatgactatattcatttctctgtgaaataattttaggctgttttcagtttttgttttctgttacaatcagtcctacattaaatatgcttttatgtgttaggatagatttatccttgggaagaggattaaactggatggcttaatgtccctcccaaccctatggtgcaaaatttagtcaactgaaccaacattttctagtttctgaggataaaaagcatatgacatgatccctgctcaaggaattcactgtctaaagtctctgcaaactttgtattacttgtttgttgtctcatttttaggcatctataaaggttagctggtttagacaatcaattacctttatgatattggggcatagcatgggataactatagtttttggcataattttcaaccttaagtttcagtgttaactaataatttttgatgagatgatttatgtgtccaagaacatttgaaattatttcttttctagacttgctttgtccacttgttatttatattaaagtatttcctgttttacgctttctattgaaccttgctcattaagattaataaatgctacttatggtat

SEQ ID NO: 909 - protein, 178 aa, Homo sapiens
MFHKAEELFSKTTNNEVDDMDTSDTQWGWFYLAECGKWHMFQPDTNSQCSVSSEDIEKSFKTNPCGSISFTTSKFSYKIDFAEMKQMNLTTGKQRLIKRAPFSISAFSYICENEAIPMPPHWENVNTQVPYQLIPLHNQTHEYNEVANLFGKTMDRNRIKRIQRIQNLDLWEFFCRYR

SEQ ID NO: 910 - DNA, 1565 bp, Homo sapiens
gggagggggaggaggaaggccttcgtaaaggttgcatctccgtcccttcgctcccggggacccgcaggaaaaaaaaaaatccaacacccaggccccgcggctagccccttcccacaggctctctccgctcgattttgtcaccgttatgtgggaagcgaatccagagatgtttcacaaagcagaagaattattttctaaaacaacaaacaatgaagtggatgacatggacacgtcagatacccagtggggctggttttacttggcagaatgtgggaagtggcacatgtttcagccggataccaacagtcagtgttcagttagcagtgaagatatcgaaaaaagcttcaaaacaaacccttgtggctccatttcttttactacttccaaattcagctacaagatagactttgcagaaatgaagcaaatgaatctcaccactggaaagcagcgcttaataaaaagagcccccttttctatcagtgctttcagttacatctgtgaaaacgaggccatccctatgccaccacactgggagaatgtgaatactcaagtaccatatcagcttattcctctgcacaatcaaacacatgaatataatgaagttgctaatctctttgggaagacgatggatcgcaaccgaattaaaagaattcagagaattcaaaacctagatttgtgggagttcttttgcaggaaaaaggctcagctcaagaaaaaaagaggtgtgcctcagattaatgaacaaatgctgtttcatggtaccagcagtgaatttgtggaagcaatctgcattcataactttgattggagaataaatggtatacatggtgctgtctttggaaaaggaacctattttgctagagatgctgcttattccagtcgtttctgcaaagatgacataaagcatgggaacacattccaaattcatggtgtcagcttgcaacagcggcatctgtttagaacatataaatctatgtttcttgctcgagtgctaattggagattacataaacggagactccaaatacatgcgacctccttccaaagacgggagctatgtgaatttatatgacagctgtgtggatgatacctggaacccaaagatctttgtggtttttgatgccaaccaaatctatcctgagtacttgatagactttcattgatttcacttccaaatctcggtggtcaaggaagctttattcttttttgcaggaaggtttgctcttcagtcatctagccactaaatgttaattatctgatacttttgaaacagatatgaaaaaaagtggcctccatataaaaagacatactgacttcaaggttggtttttgttgttttgtttttgcctgtttcttgtagtcttgtttgttaaaagttgatatcattgatgttttaacacataggggtgaaagataccattcaaaatggaatcagctgagtctcaactaatgtggtcattgagatctttaaagtttacgtgtgtgttatcaggataaatgattttagtttaaatagacttattcgtataaatgttgaaaaaaaatacagacataaatgtgtcccttt

SEQ ID NO: 911 - protein, 338 aa, Homo sapiens
MWEANPEMFHKAEELFSKTTNNEVDDMDTSDTQWGWFYLAECGKWHMFQPDTNSQCSVSSEDIEKSFKTNPCGSISFTTSKFSYKIDFAEMKQMNLTTGKQRLIKRAPFSISAFSYICENEAIPMPPHWENVNTQVPYQLIPLHNQTHEYNEVANLFGKTMDRNRIKRIQRIQNLDLWEFFCRKKAQLKKKRGVPQINEQMLFHGTSSEFVEAICIHNFDWRINGIHGAVFGKGTYFARDAAYSSRFCKDDIKHGNTFQIHGVSLQQRHLFRTYKSMFLARVLIGDYINGDSKYMRPPSKDGSYVNLYDSCVDDTWNPKIFVVFDANQIYPEYLIDFH

SEQ ID NO: 912 - DNA, 1639 bp, Homo sapiens
gagacagatctgactggccaacgtcgggcggaagtcgggaggttgggtggtctgtaaacgctggcttgtgacagggagggggaggaggaaggccttcgtaaaggttgcatctccgtcccttcgctcccggggacccgcaggaaaaaaaaaaatccaacacccaggccccgcggctagccccttcccacaggctctctccgctcgattttgtcaccgttatgtgggaagcgaatccatgtatttgcatgcccgagtctttgagccgtgctataccagtttgtccagattgtttatactagcaatgcagtttacggtgaagacctgccttccctctgggaatctggagcttcagtaacaggagatgtttcacaaagcagaagaattattttctaaaacaacaaacaatgaagtggatgacatggacacgtcagatacccagtggggctggttttacttggcagaatgtgggaagtggcacatgtttcagaaatgaagcaaatgaatctcaccactggaaagcagcgcttaataaaaagagcccccttttctatcagtgctttcagttacatctgtgaaaacgaggccatccctatgccaccacactgggagaatgtgaatactcaagtaccatatcagcttattcctctgcacaatcaaacacatgaatataatgaagttgctaatctctttgggaagacgatggatcgcaaccgaattaaaagaattcagagaattcaaaacctagatttgtgggagttcttttgcaggaaaaaggctcagctcaagaaaaaaagaggtgtgcctcagattaatgaacaaatgctgtttcatggtaccagcagtgaatttgtggaagcaatctgcattcataactttgattggagaataaatggtatacatggtgctgtctttggaaaaggaacctattttgctagagatgctgcttattccagtcgtttctgcaaagatgacataaagcatgggaacacattccaaattcatggtgtcagcttgcaacagcggcatctgtttagaacatataaatctatgtttcttgctcgagtgctaattggagattacataaacggagactccaaatacatgcgacctccttccaaagacgggagctatgtgaatttatatgacagctgtgtggatgatacctggaacccaaagatctttgtggtttttgatgccaaccaaatctatcctgagtacttgatagactttcattgatttcacttccaaatctcggtggtcaaggaagctttattcttttttgcaggaaggtttgctcttcagtcatctagccactaaatgttaattatctgatacttttgaaacagatatgaaaaaaagtggcctccatataaaaagacatactgacttcaaggttggtttttgttgttttgtttttgcctgtttcttgtagtcttgtttgttaaaagttgatatcattgatgttttaacacataggggtgaaagataccattcaaaatggaatcagctgagtctcaactaatgtggtcattgagatctttaaagtttacgtgtgtgttatcaggataaatgattttagtttaaatagacttattcgtataaatgttgaaaaaaaatacagacataaatgtgtcccttt

SEQ ID NO: 913 - protein, 257 aa, Homo sapiens
MWEVAHVSEMKQMNLTTGKQRLIKRAPFSISAFSYICENEAIPMPPHWENVNTQVPYQLIPLHNQTHEYNEVANLFGKTMDRNRIKRIQRIQNLDLWEFFCRKKAQLKKKRGVPQINEQMLFHGTSSEFVEAICIHNFDWRINGIHGAVFGKGTYFARDAAYSSRFCKDDIKHGNTFQIHGVSLQQRHLFRTYKSMFLARVLIGDYINGDSKYMRPPSKDGSYVNLYDSCVDDTWNPKIFVVFDANQIYPEYLIDFH

SEQ ID NO: 914 - DNA, 87146 bp, Mus musculus
  misc_feature (1)...(87146): n = A,T,C or G
gagaaagaaaggtaggtggtggcacatgcctttaatcctagcacaccacaggcaaaggctggtggatctctgtgtggttgaggttgaggccggcctgctctatagagaaagttccaagacagccagagctgttacacagagacctgagatcagccagggtcagctgggttccacgtggtaaaaggaagtggtcattggtctagctgggctagatcgatagatctttatcccagcaaggtcatttttactactcaatgtgtttttgcccagggctaaatagcaagactttgtctgaaacaaacaagcaaaattttccgtggaagcactgtttgaaacatcccagctcagcatggtggtattcacctttatttagcccagtactcaagagcagaggcagctagatctctatgagtttgagaccagactggtttacagttgcaagacagccaggaccttgtagagatccatcacaccctccctagcaaaacgttttcctaggacattacacgtgacatgctgggcaggtacttctgagtcacatcctcagtactttaacttgttggctttttaaagacaagtgtcaagtggtgggggcacatgactttagtcccaccactcacaaggcacaggcaggcggtctctgtgagttcaaggccagcctggtctgcagaatgagttacaagacagccgtctacagagaaaccctgttttctgcagggaggagggaactggggggggggacagtatcatttagcattttgccttaaactttctatagagctaagaataaccctgaactcctgaccccccccccatctccaatttctatgtgctggcaacagagatgtatcaccatacctgacctttgccatttattattggagaaaaacaacaacaacaacaacaaaatgccagtagacctcctccctggatctccttttgccttgctttgtcccttgtattccctcttctcttcccaaattggactttgctatgctactggaataacctggaactcctaggctattctctctgatcttctaactgaaggtaagactggaggtgcctatcaccatcctcaatgctctccctatctggatatttgactgcctcatgtagaccaggctagccttcgacttcctatatagtggaggatggccttgaacttctgagcctcctgcctccacttctggggtactgcgattacagtcagacatcatcccacctagggcatcaaacccagaatttcctgtgtaccaagcaaactctctaaccaatcgaactctacccctgggctaacaagggttttcctttctggctctaaggagggttttattacataacagaaaggattctaccaagaagataccctattccctttgagtgaagaaggacctggtactagcccctggagccatctggaagagaaaggaactcatcagaacctagcagtgcgggtgcacacctttaattcagcactggggaggcagagacagctgcatctctgagttagaggccaacctggtcaacagagcaagttttaggagagacagtgtcttgaaaaaaagaggaaagaaagcaatcagggaaaaaaggcattacactaacttgtccctgcttcatgcaaaccaatttctctttccctctcattttataattcaacccagcttttagcaaaaaggtaccagggaataaaatctaaacggacagattcatcctcttctgggggatgatgtcgcccccttgaggacctttgtgaaattactgacaaaaattaaccagtagttttcagtaatcaactttctccagggaccagtataccctcccttaggatcctttgttttgttttgctttgcttttttggttttttttttcttaaattattttttttttactgttagttacagtgatgaggggtttatttccaggaaccagacattcatcataagtgattacctcattaacaggtaatgaaagtcaggcctggggcaaaaggtgaaagttccagaaacattaaagcagcgcaatcaggagttcaaaatcatcctgcggtgcacacggcaacgtagagttcagctggaccgcatgagagctcatcacagaaaagaaagaaagagcggaagaggtggctcagcagtcaagagcactgactgctcttccagaggtcctgagttcaactccaagcaatcacatgatggctcccaactgtctgtaactccagtcccaggggatccagtcactgggtgtgcttatagtgcacagacatacatgaaggcaaaacaccctcatcatgaaggggttattcttttttcttggttttttgagacagggtttctctgtatagccctggctgtcctggaactcactttgtagaccaggctggcctcgaactcagaaatctgtctgcctctgcctcccgagtgctgggattataggcgtgcaccaccacgcctggattattattattattaaacaatactcagggttgacgatggtttgaagatgcttatagagaagtaagaatgggatgtagattaagtcagtgatagaagttcctgccgccacccccccagtcctggattccatcaccagcagagcagagggagtgggggggggagcttgtatgtagcccagtgtggtttcttatatctgtaatcctagtactctagatgctgaggcaggaggattgcttttagttgcaggccaggctatgatactgagatactatctcagtctttaatcccaacactcagaagatagaggtagggggatctctatcctatccaggctagtcagggctccctagtaagaccttgtctcaaaaaataaaaataatttttgtggtttgttgttgttgcttgtttatttattcatttttttgggtttccagacagggtttttctacgtagccctggctgttctggaactcactctttggatcaggcagaccttgcactcacagagattccccctgcctctgcctcctgagggctgagattagaggtttgtgccaccacctggcaaaaaataattatcttaaagtctctactttcagagtgcccaggtggcctcatgctcctgctgtgatgccttccctgccaggacagagtcttgtgtctaccagctgaaggtgtgacatctcagggccagaagagtaagctctacatattggggacatcagtgggaccaaggacagcagatcagatggcccttaagtcattgctggacaaggaggagacccagcaactgcttggtccaccagcaaccctcaagggccttggagacccagagatagtaccattgcagcagctcttccagatacaagacctaactgcagagggccgcaaggctcatggatgaggacctcagtcagggaaggtgacacttacacagcttgcctgctgcgtaagtggcaagcaaaagaacctatcacaaaggcagggatggtaagatgtgtagcctagggatggagagatagcttagtggttaagagcccccatgtgttgattttttactttatgtgtaaatgtatatgtgtgtgcatcatacatgtgggcatccctggaggccagccgagagcgtgggttgaccggaacgtgagttacaggtagttgtgggcagcaaatgctctaaccttcctaccagccctttacacgccgtttttttttttcttttgttttttgtttgttttgagacagactttctcttgtgtatccccaacttgaattcacgctgtagagcaggcaggcctcaaactcagggctctacctgcttcttcccaagtgctgggattaaaggcttgtgccacccattccccggtcatttgttgttgttgttttgtttgtttttctgagacaaggtctctataagtagtcctggacatccaaggaccaggcagcctttaactcacagagatttacctgtccctgcctcgtaactgctgggatttaatgacttgcaggccattctcaagtatttaactcacagtgacatttagtgcacttactatgtgtcttagtcggggttctctagagtcatggagcttatggaatgaatgtctttatatattaagggaatttattgtagtgacttacattttgtagttcaactaaaccaaccacaggcagctgtgaaggggaagtccaagagtctagtagctgcacagtcccacaaggctggttgtttcagctggttttctgtagaagtaggttccaacagatgcgctggcaaggaagtgcaaatggtctggaagaatgagccttcttccagagcccttatgtaggcctccagcagaaggtgtaacccagattaaaggtgtgtaccatcactcctggttctgggacttgctttgtcccaggctggctttgaactcagagattgactgcctccgtctcccaggattaaaggtgtgtgctactaatcccagcactcgggaggcactaatctaatcccagcactcgggaggcagagacaagcagatttctgagctcgaggccagccttgtctacaaagtgagttccaggacagccagggctatatagaaaaacacaaacaaacaacaaaacaaaacaaaaccacaaaaccctaactaagacaccctctaaggatgatcttttacttttcatctgagtctcaccctggcttgttctgatccatgtgtgtcctcatctagactcctcctggcccctccctccataaggtctccccatagcttctctctcagctgtgagtgcccaacccccgttaggataagaagcccagcctactctgttctgcccaactaattggctagtctggtcttaactaaccaatcagaagtgaggaaaaacggggggggggggttgttgttgttgtttgtttttgtttttcggtttttggttttttggtttttcgagacagggtttctctgtgcagccctggctgtcctggaactcactttgtagaccaggctggcctagaactcagaaagaccgcctgcctctgcctcccgagtgctgggattaaaggcgtgcaccaccacacccggtgaaaaacagttttacacaaccttgacaccagagatgtttgaccatgccgtagtccaggctgtcagcagatgtctaggcacaataatcaacatctgaatacacagtgcatgaaagcatcccctggagtatgtctgcctctgtctctctctctcttttttttttaaagatttatttattatatgtaagtacactgtagctgtcttcagacactccagaagagggcgtcagatcttgttacagatggctgtgagccacatgtggttgctgggatttgaactctggacctctggaagagcagtcggtcggcgctcttaaccactgagccatctcaccagccccctctgtctctctttttaagatttattttatttattatatgtaagtacactatagctgtcttcagacaccagaagagggaatcaggtcttgttacagatggctgtgagccacatgtggttgctgggatttgaactcaggacctctggaagagcagtcggtcggcgctcttaaccactgagccatctctcctggctgtcctggagctaattttgtagagaaagctggccacaaactcaagagatccatctgcctcccaagggcagggatctagctatgcaccaacacctcccatcctctgttgtcatgttttcttgtttgtttgtttgtttaaagatttatttattttatgtatgtgagtatactgccactctcttcagacatacacgaatagggcattggattccattacagatggttatgagccatctgtaacctctgagccatctctccagccctgctatgttttcttttttcctttctctctttttttttgtttttgtttttgttttttgggacagggtttctctgtatagtcctggctgtcttggaactcactctgtagaccaggctggccttgaactcagaaatccgcctgcctctgcctcccaagtgctgggattaaaggtgtgtgccaccacgccccagccctgttatgctttcttaacacaaaagaatcaggattggaataaaacaatagaaaatactttttgttgcatgcttctctgtttttactgcaggtattgaatttcagaactacgagaaggatttgtaaaattcccagtatctcagttccaccgcagactaattggagtctctgaaggaggtttggcagggcatctgctccaaatctcccaaggtgatgcctatatacaggtgggagtgagaattctcactgcctatgtcatgagtggtaagcagtcacctgggcagatgtaatttcacaatctttaaacccaggcacctaagctatttaatagctgttcttccccctttttaaggtacaaagccttaatttggcaattgttctaatgcacacttttctaaaacaaagcaacaagtgattccctctgaaaatgtgcaaaggaaactaaacacaatgcctccaagatctactggtattctcatttccacgatagttgtattcattcgctacctaagacaaccagttgttggatggaagggtctatggtggatggaacaggtttggaagcagaagtgtgtggtcgctggtcacgtggcatctgcagccagaaaacacagagggatgaatgctggtgctcagcttgctttctgcagtctgggatggtggagcgatgctgctctctctgaaattaacctaagctggaaactctcaccaatacaccagaggtttgtctcctaggtgacattctcatcttgttaaaacagacaatgctaaccattgcatcagctctattccttttggaaatcattttattatatttgtttttatttctttagttgtgtgtgtgtgtgtgcacatgcttttttgtttgtttttgtttttgtttttggtttttggttttttgagacagggtttctctgtatagccctggctgtcctggaactcactctgtagaccaagctggcctcgaactcagaaatccacctgcctctgcctcccgagtgctgggattaaaggcatgtgccaccacgcccggcttacacatgcatttttaaaaaagatgtacttatttattatatgtaagtacactgtagctattttcagacacaccagaagaggggcatcagatctcattatggatggttgtgagctactgtgtggttgctgggatttgaactcaggacctccgggagagtagtcagtgctcttagctgttgagccatctctccagctcttggcttttcttgacagtgttctctgtgtagccctggctgtcctggaatgctctctgtggaccagactggcctgaaactcagagatcctcatgcctctgcctcctgaggcatgcaccaccactaccctgctaagtatttttaatttttttgacgattccatacatacacataatgttatcccatcatagttgccagccctcattatcctcttctatccatttccttctcccatcaattgctcttttaataaacaaccactaacttccaaggtttttggtattattttatttgtgagtgcatgtgaaagcgtgtgtgaatgtgtgtatctctctctcctctctctctctctctgtatatatttaattacggttgctttcaaaagcattggttgaggaagtgttgttatcatttacaatattgtgtgtggtgtatgtgagcttatcagtgtctcatccaacctgtggaggtcagaggataacctctagtgtcagtctttatctcccaccttgaataagaccacatcccttttttgttttgttttgttttgttttgttttgttttgttttgttttacaagacagggtttctctgtgtagccctggttgtcctggaactcactctgtagaccaggctggcctcaaactcagagatctgccttcctctgcctcccgagtgctgggattaaagagtgagttccaggacagccagggctatatagagaagccctgtctcgaaaaacaaaaacaaacaaacaaacaaacaaagagttcaaagctggggctggagagattgctcagtggttaagagcactggctgctcttccagaggtcctgagttcaattctcagcaaccacctggtggctcacaaccatctctaatgggatctgatgccctcttctggtgtgtgtctaaagacagctacagtgcactcacataaataaaattaataaataaatctttaaaaaaaagagagagagagttcaaagctggggctggcgagatggctcagcggttaagagcaccgactggctcacatccctttttcattgcagcatataccaggctgggggagtctgtctttgcttcctatctctaggtgtgagtgctgggattgaagacatgctgactaccaaatctggctttctaaagaaccaaatttaaatcctcacatttgcagtccactggttggtctggagctgctatgtagatcagcctagcctcaactcacagatccacctgcctctgccttccaagtgctgctattaaaggcatattaaaggcatgtgtaaccatactgggatttattctaattttttttttttttgaggtagagtcctgctatgtggtccagactggctttgaactctgtttttttttttttaaagatttatttattattatatcttagtacattgtagctatcttcagacacactagaggagggcatgtggttgctgggatttgaactcagaacctttggaagagaagtcagtgttcttaactgctgagccatctcgccagccccagctttgaactctctctctttttttaaagatttatttattaattttatttatgtgagtgcactgtagctgtcttcaaacacacaccagaagagggcatcagatcccattagagatggttgtgagccaccaggtggttgctgaaaattgaactcaggacctctggaagagtagtcagtgctcttaaccactgagccatctctccagccccagctttgaactcttttttgtttgtttgtttgtttgtttgtttttgttttttgagacagggtttctctatatagccctggctgtcctggaactcactctgtagaccaggctggcctccaactcagagatcttcctgcctctgcctccagagtgctgggattaaagctctgggcagccatcatcacccagcatcagccttggtttttgacccaggatatcttcattgggatatgggtttgttggttagataagtgtgggtctgagcaaggcccagaaaaccttctcccaagtgctgggattacaaatctgcactacaaatttgtttgtttgtttgttttgtttttgttttaaataggaatatagatattaaactcaggcaagcactttactgagccatcttttcagtccttgacggttttgagacaggatctcattcgtagtaattctcctacttcagccttgtgaaggcatgaatgctgggattacaggcacgagctcataaatttaggtttgcttctgttaacaggatctcatgtaacccaggctggcctttaacttttgattcctttcacttatttttgtccaaaagctgtgattacaggcatagcccaccatgatcaatttgagtcttgcatcttacataaggatttgagaatgtgtcaggagaggagagggcagagaggagtccttcctctttttctgtccaggaggaaagtctagctttcttttgttttatttttttcgcctcaataggtagtgagctccatgtgttgttattttaaagtagtatctttatttcaccacaccatcgatgctggaatcccggtgacaactcgatccagatccgcttcataaatgaccgcgtggacatcctcgaggaatcaaaacacccgccacttttctttttttttctttttcctctccgggattgattggcgtctccatcacgtgatggggcagcgagcgggccttggagtcttcggtatccacgtggtctcccgcaaagcacggaggtggcactgcgcaggcgcggctctctgcgcaggcgcaagcgcgtccccggtgcacggactcgctgctggcggttagcgagagcgggagcgggtgagctgaaagccggcgccatggtagagaaggaggaggctggcggcggcggcggcggtggcatcagcgaggaggaggcagcgcagtatgaccgacagatccgcctgtggggactggaggcccagaagcggtgaggggcgccgcgggcatcctgcgggccggcgtgtgggccctgagggagtgggtgcggccctgttgtggagcggaggcgggattgctgcacttgggtttcctagtgcttcagaactgacgaatggacggtgtttctgcaaagtaccggaggtggagatgtcccctgtgtagtattgagagtgtccttggaggaggcgggggagagggaggatttgaacttgaggctccctcggtgtcagtacctggtgatggtgggatttaggtgaggcttgtagggtctaagtggggtgagcattagtgcaaaataggggggtggcgggctgagctcattaatttctatgcatgggaacctgtgttggacgccctggggacttgacaaaccccacaggctcctctagaggagtgcttgagggcaagtcctgacaaagggacccctggagaggcgcagagtggcccaatttattcagcacacagctacagacgttgggttgtttgtttgtttgtttgtttttctttccccttcccccagaccaggtttctctctgtggccctggctgtcctgggcctcgctctgtagacgatctcaaactcagagatctgcctgcttctgcatcccgaatgagtacagggattaaaaaggcacgtgccatcacgcctggcttccttaacatattcaagttataaattatattttgtggggatatggttgttcatatttttaattctagtactcctgaggcagaggcaggagtatgtctgtgagttcgaggttagtctgagctatgtagttccaacacagccagggctaccacagtgagatcctgactcaaatcaaaacaaactccaaaggtaattgtttttatagcttaggctggctttgaactttcagagatcttacttgtcttaagtgctgagataaatacatgcatcatcacacattggctccctaggcatttttggggtgagcattttttgggggagcattttctgggggagaggttttagaattttatgttttgacttctctgtacgttttccatggtgttgatgtggatgccaaaggacaactttgtgaagtcagttcctttatgtagatttttgaggtctaaactcaggttgccaggtgtcccccaggcatttgagacaatcactttacttggtgaggcatcttacttgggctccttgagcattttttattgaactaaataggctccttcccaacttgaagcttatgttttgatggggactaagagcaatattcataaataataaagttccatagtgataaggctctagggtagtggcgtacacctgacattgcagcacttaggaggctgaggatggaggagtgggctcaaagttaatcttcagtacagagtagttcaatgccatcgtgagttgtacagggacacctaacctcaaaaaccaaaacacgggctggtgagatggctcagtgagtaagagcacccgactgctcttctgaagctccaggagttcaaatcccagcaaccacatggtggctcacaaccatccataacgaaatctgacaccctcttctggagtgtctgaagatagcgacagtatacttacatataataagtaaataaatacaatcttaaaaaacaaaaacactgtcaggcatggtgatacaagctttgatcctatcagaggcaggctaggtctacataaacaccccaatcaaaccagaaagctggacattgtaatcccagtattcaggaggctgaggagggagggagacaccatataagcaagatgtgttagtgcatgtctgtaatcttagcccttgaaaggtaagtgcaggaagatcagaagttcaaggccttggcatggtggcatatacctttattcccagtgagctttaggccacatgatctacataatgagacccttacttttaaagtggggagggtaggaccgagagagcagctcttggaagtagggtcagatttcattccccctcaaccacgtgatgactcacaaccacctgtaactctggttgcagggaatctgaaatcttctggcctctgtgggcactgcgcatacatacatatgtgtatatgtgttgcacatacatacactcagatgtgcacacatatagagtctctgaagaaaaaagggaatgaatatactttattatactgagacgtaaatgagatagcacatgtacaactcctatgcccagcagacttcagtagattctctgtgattagacaagtctgaatattaagcaacaaaagaagggaaaatattaagagtgttgaaccactgacatgcctaagaggttttctgagcagttatagtttcagggccagaggtggaatcccgtgctgggtgtgtgtgttttacttgggttagaaatactccagcttcccagcctaccccagcggatgtttgattttccctttgagacagggtttcactctaacccgagctggcatcagacgtggaacagtcctcctgcccagtgctaggagagctggcatcacaggtgcagagagatttataatcccagtgcttccaaggtggcttcaggagggctaggagttcaaggccagcctgggctacatgagactatcaaaaacaaaataagaaatttctgttttaagccttttctctctgaggattttaataacgtagcacagttagcatagaggtttatgttttgttggctgaaatttgacctgtgcctcatcttccggatgccacttaagcgtggtgttatgctctttggtgtatagttcagttggtaaagtgcttgcttagcttatacagagtcttaggttctgcttcttgcattatataagaaagggctcagtagctgatgtccataatctttaccctatctccccctccttaaaacaaagccaaaacaaaccccacaaagtttacgggctatgggcttctctaggaaaatgctactttcctagagaaagtctgataactaatgaatgagtcacttgtttaaacttgagaggtcaagtaggatcctttaataccccggtcctttgttgggagcagccttacttcctgtgaagagaagctggtttgtctttagcaggttagcaggtgaaagagtatagaacgaaaaataaaagaggatccacaggactgattttccactaaggtggcagagagaccattcaaagatttgaacacttgataaaatctagcttacatgtaaagggtttgtctgggctggtcagtggctagagcaagggcctagcatctgaagccctgaattgtacccagtaggttaaacaaagcatgtctttccccaacctcctgagacagggtttctctgtgtagccttggctgtcttggaactagatctgtagaccaagctggcctgtagaccaagctggccttgagttcagagatcctcctgcctctgcttcccaagttctgggactaaaggtgtgtgccaccattgcctgtctcaaaatatgtctttgaaatgggacagtagattataagggacaagatgaaagcatgggggccaaatgcatttcagcaaggtctcctattactcaggttggctttatactcgtgctgatcaccttgaacgactgttcctcctgtctcttgcctctctctctctctctctctctctgtctgtctgtctctgcagtgattggattatagttgtgtgccacacaccatttttgctgtgctggggatggagcccagtattttgtgcttgctaggcaagtattttatcaactgagttatagccacagcttctctgtttttatacttttaagaaacagagtgttgggctgttgagatgactcagtaacgagcacttactgctctcaggaggttggtgttcagtctctggaacccacacggcagtttacagcttcctggaactccacttccaggagatttagccactgtggctcttgcacacatgtgctgcacagagttgtgtgcaagcaaatacaacaaaagaaataataaatctttttatttttaaagaaagaaacaaggtcttgctttgttcttcctgggttcaagtgatgatctttctgcctcagcttccagcatagttggaagtgtatgtgcttgcttgcttgctcgcaggtgccttttataggtaagaagtgatgagcacatggctaaggtatatgttgggtaagtgaaaggatgtgtatggtgtgcatacttttttttttttaagatttatttattatatctacgcacactgtagctgtcttcagacacaccagaagagggcgtcagatctcatggatggttgtgagccaccatgtggttgctgggatttgaactcaggacctttggaagagcagtcagtgagtgcttctaactgctgaaccatctctccagccccggtgtgcatacttttttcaacttaaataacgtgcctcagacaaacctcactgactgcaatcatgtacttatgtaggattgaatcctagaaggggaattgctacttcagagaatataaataatagctacttcattaagtgctgactgtgtgccaggtagtgttttaagcctttttcatataattgagccataaataagctatggtctctagggccctggcatgaggagttaagattaaaacatgatactcatttttgattgctgctaaataaagagagaatagggctggagagatggctcagcagttaagagccctgactgctcttccggaggttgtgagttcaaatcccagcaatcacatgatggctcacaaccattcgtaatgagatctgataccctcttctggggtgtctgaagacagctacagcaaggcaatggggccagagcgagaagaaaaaaaaaagtatctaaagacagctgcagtgtacttaacatataataaataaataaatctttaaaaaaaagactaaataaagaaagaatagttccagatccctcattccaaagagctggttgtagtggctgggggctgggggactgcagaagccatgcaataacctgagactggtcagagccatttctccctttttataaatatgttcacagagtagccctctttttagtgtttctagtcatctgtgtggtgttttttttttttttttttttttttgagacagggtttctctgtcctggaactcactgtgtagaccaggctggcctcgaactcagaaatccgcctgcctctgcctcccaagtgctgggattaaaggcatgcgccaccacgcccggtggctctatgtgtgtgttttgagacggggtctcactctgtaacagctggtctggaactttctttggcctgctggatttataggtgtggaccagctctcccagctggctctctgtacttttgattctcctgtctcaccctcctgagcaactgggatggcaagcctgcaccattaggaccgttagagattttaaatattgttcctgcaagggacgttctagagaggtcattctcccttgagtgtgcatggtaggaagggcccctgaggttgacaagcttgctctgaggctacaaagcctgacaccaggatttcagtctcaggagcctaagaagtggaagaacagaatggattccagtttcctctggcctcctcacatgtacatgcatgcatccatacaagataaataataaagaagttacagaggaaagctgtgtgttcattattttctcgttgctgtggtttaagtgtacaatctgtacagccacagtggcaaggatgtgaggaaactggtggaattgcatctcgtcagcaaacaggtgaacagttggtgctctctttcccactctttttaaactttattattttgtttgttttgagacagggtctaggaagtagttatgtagaccaggctgttcttgaactcacagagatccacctgctactgctgcctcctgagtgctaagaattttatttattattgaatgtctgtgacaggtggtatatatctgagcaggtatgtatggaggtcagggaacatctttgtggacttggttctcattaactttctgtagcttctgagaatggaactcatgttctcaggcttgagtcttcaggcaacaaacatttttgcttgtggaacctgagccagcttgctgtctttttttccttttcattgaatgtgagcccactccattgattgtgctgcccacagtcagggtaggtctgccctctttcattgaacctttatataataaacactgtcatagaacatacccagagctgtgtgtactggtgattctaaatctgataaagtccacggtgactattaacctcctcaggctctgaagaaatggctttggggtgcgggacttggaatgggccagagaggaagtgtgtttacaggctgtggaatgttgtgattgtcaagtcttggtgagtagtagtctgataataggtggtcaggctagtaaggtagtacagacaagtcctgaacaactcaggatgagctgtagattttatcagctgggaatgtagcgcaggggcttgcctttcttgcatacatgaagccctgggtttgatcctagtatcaaatacattaggcaagaaggtacatactggaggtagaggcaggagggtcaaagttcaaggctattctctgctacatagttttagggccacctttgtatgtatgagaccaagtctcaaacaattctttttgggagtaggtgctgaaaaaatccagattcaagtgtatgaatagctaggctttttataatgaaggtggtagagtttaagagaagttgactaagtctatcttaacacccatgtccagtttcttacatgccaggtattacttcagagtatagacaatgcttttgtttgtggtcctgacaggcttggaactcagttcaaagatgaaggtggcttcaattttgcagtaatcctcctgcatttatctgccttgtttgtttggtttttggttttttgaaacagggtttctctgtatagccctggctatcctggaactcactctgtagaccaggctggcctcgaactcagaaatccacctgcctctgcctccccagtgctgggattaaaggcatgtgccatcacttcctggcgtttttttgttttgttttgtttgtttgtttgttttggttgttcaagacagggtttctctagtagtcctagctgtcctggaacttactctgtagttcaggttggcctccagagatccgtcacctgcctctgcctctttagtgctgggattaaagatgtgtactattgctaccaccttgcttaaatattaccttttaaattatttcttttgagagtattaatttctactacatagccataaagttggctttcatatgaactagtgtggtgtgtgtaatcatgccctgctgaggtttctttttttccctccctcctttagaaagggtctcatcgcccaggctgacctcaagcagagtgaccttgagcttctgatccattgcttggccttataggacgccaccatgtccaggtggcctcaaatttcccatccttcttccttagaattttagatatgcaccccagaccctgacggccattgggcttactacagactaagtaagcactcactgatcgttggagaagagcccctggtgttctctgggtgctttgtttgatttttgtcttatttttatttatagagatcaacacaattcccctgcctgtttttgttgtgctggggttggtctcaagcttactaagtcgtggagcagactctgaacctacctaccctttatcctgtcctcacctctccagtgctgcggtcacaagtgtgcacaccacctctcgcacacaccttcttatgcttccatgggttttgcttgtgtgctccagattaaatcatggctcttcttgccaagctggggttctacttaaagcacttgcctgctgtggctggagcccctgagttcagtccccaataccataataaatacacttgtcctctttggttattatactagtctgagtggctgtgcacacataaccactccagacttctcttacctgtggcgtcatcttctcatcccatggcttctagtgccccccagagccctcgtgctgtgctccccccaccccattttcatacttcacatttgtcctttctataccacttcgcggcctctttgtttttgctgtctctgaaaacagtcaagccaggcattctcctttcccttttctttcttctttctttctttctttctttctttctttctttctttctttctttttttgggggggggggggcttcgagacagggtttctctgtgtagccctggctgtcctggaactcactctgtagaccaggctgaccttgaactcagaaatccgcctgcctctgcctcccaagtgctgggcttttttctttttctttttttctgaaacatgtttttttgtgtaacaacccagggtgtcctggaacttgctttgtagaccaggctgtcctctaactcacagagatcggtctgcctctgcctcccaagtgctgggactaaaggtgtgttccaccccacctagcttcaagtatccccttttgagcttgtgtgttttctatagttggaatactttcttttcagttatctgtatgttgatcggttgtttattttattttgatgaaaaatcaccttctctgggtttcttgttgtggagacaaggttttgtaatccagtctggatgtgaacttcctgagatctctctcgcctcagcttcccagccattcaggtgacagatacactccttcagaacggttttcatcattatgtaacacttgttctttaaaattgcatcttcccttgtcctctttttattcgtttattttgtggttctggagagccatgcaggacctcatccatgcacggcaagtgtcctactgacggagctctgtcccctgccccgtcccctgacagagctctgtccccctgccccatcatctggccttatgcttgaagagctgctttctccactgcgctgctcattgtggagagggcatacacaacgtgctcagtaaagaagtcattttctgtgcacagttgtttggggccaattttctagatctgaaggttcagtggtgtttctgtggtgcatatagtgaaaattaagttttctttttttttcctgtcctgtgattgaacaagtcccactacttggggtcatcagattaacatagcatgtgcttcacaggcttcgagcttcccgggtgctgattgttggcatgaaaggacttggagctgaaattgccaagaatcttatcctggcaggagtcaaagggctcaccatgctggaccacgaacaggtatgtgccatctgattgccctgtatctctcaaaaggccgtgctgccagtgctgctgggcaaatccaggttcagtgccactgtagggaaactgaggcctgggaggaggtttacgtgaatatatagtcttcaacccctgagccgctgattcaggcctggaatgattcgggaatgggaacatatagaacatggctcagttcagtgtgatggcacatacctataatcccaacactcaggagattgaggcagaactataaattcaagagtagcttttgctatataatgaaggtcctaaaaaaagtcacagtgggactggagagatggctcatcagttaagtgtactgactgctcttccagagttcacatctctacatactcacatggcagcttaccactgtccataactctaagatctgacattctcacatagacatacatgcaggcaaaacaccagtacacacaaaataaaggtatgtaattttttaaaaaaatttaaaaaatagtcaaaataatctcatagatggctcaccatcattactttgaaaaacattgaatcagacagaaggtaggtatatagactgcatatccagagaacagtgagcatccagtatgaaactgtacatcatacagagataccacagcagtgcccagttcacgtacagctttctctggcctatctttcctttagggtggaagtgcttgtttatacattttcaagcctcactgacatgtaaattttctagcaattttttgtttatttgcttgcttcttggtcttgaggcagggtctcgtgtagttcaggctgcagtgggacttggagtgtagcctcaaaccctacgagaccttgtctcaaaaaactagaactttatactataatatgaagaaagccatgagctttacgtactcagtgccataacttttgtttgttagtttcttttgtgacagagtttctctgtagttcctgactgccctggaacttgctatgtagaccaatctggtcttgaactcacagagatttacctgcctccacctcctgagtgctgggattaaaggcaggcttgcgcttctccatgccgggcatgaggctgttgactatgtagggattggctgggagctttctgtgtagaccaagctgatctcaaactcagagatcagcctgtcttctgcctccggtgctgagattaaaagaatatgccgttgattctggcatttttattgctattgaagtaggatttcggttagttcaagctaactgaacaggtgaaggtgaccttgaactctgatcttgcctctactccccagtgctgattttacagacatgagccaccacactgtttatgaagcactggtggtcaaacctacagcttcattgcttgctagacagatagcattgccaactaggccatatccccatctaaaaattaagttaaatctaagaggaaagtggtatggtgatacatgcctgtaatcccagcactcagcagaggcaggaggattgctgcaaatttaaatccatcctgggctacatcgcaaaactctcatacatcaaacatttaaaaaagaaagaaaatctaagaaaatacatatctgtgagcagtcaggacagaagatttttgtgagactacagtgccctctagaggcaggagcacatctggaggaggattagtgtatgtgccaccaagcagttatctggctgtggggctcatcccagatgtgtgaggtggctctgatgtcatgtcagaagagtgctaagggctgtgaagtgttgggaggcatgggctgattgtcttcctctactcacttggagggccatagtaccttctccttgagtgtcctcaaccccagctacactgtagagaacctgggcggtgatacaaatatcaaagcactccaggatttggagttaggtgtggtttataatggactttctgtagcctagtgctactcagcttaactagcccaactcccatcagataagtaaatacactatgcttttccttccccaatttcccagagaacaccgttggaggagaaggtataaagttgtttggaaggctgtgaaatcatgtggacttggctatagtcccagcttctacaactggacaatagacttctcagactttgttttcatttagatgggggttttaatgcctgtcccttagcattttatttagtctacattcacacatcttagagcactccctcagggaccctgaagtctgccgttcactgaataaaaggtgcttacactctggttctcattctcaaagcattatccagaagccattctggcctccttaacgcagattgtgatatggagacttggagaagtttcctagggttctgatctgagttaaggaggtgcttatcaagttgaaagactgctttggcaagggatttttttttccttaagattttatttacttatcatatgtaagtacactgtagctgtcttcagacacaccagaagagggcattcaatctcattacagatggttgtgagcagccactgtgtggttgctgggatttgaactcaggacccccggaagagcagtcagtgctcctaaccgctgagtcagctctctagctctccctccgggctggcaagggaagttttaagagggtctgctagagccctccaggtgaatattcattaaacagtttcaaagaaaatgagaaggcaacctgagcagccttggcctctatcaccaatcaagatggcctcattattgaaggtgattgggactctagatcttcaaggtgtgtttgagtgtatcagtaatcactgcatcaattgttgactcaagatgtaggatgagaaaccactttacaagtgtgttaggtactgtagatgagaggtgagatgtcgggaagtgcgctggtatgaggaacaggagaatctgctggcccatacatgcatgaactcaaagccaagaagagatataggagatgatttcactttcttattctcagaattacttgagttctgggacctgccaccatctgctcggtagtaaatggagggaaaggaggttaggtcctggttacttgtggcctccgtcttggcaaggagtccaggtccttgcccttagccagcttactgcagggctacatgcaggccaggaatccacgtgaagacaaggttttgacttgggcgattaatgtgttgttaatggcttatctccaaaaggtggtagataagaacactcagtgatgaggtctggtgggtctccaagaagctgtgactttaatagactgaggtggatggctggaaggcagtctgcaccaagagtgacttgagaaatgacgccaacttttggtagaaattaaaagcataagtgagcttgttttggaactatacagagtgaagtgaatggaccctgagatggaatcttgcacacagctttacttcacagggcctatggagactacagtgtctatcaatagaagagaagagccaggatctgagctcagggtagcagcatattacctgtggaatgatgagtgtctatactgtttctatacacttaagcaatacagtcagtgattgaaccaggatttgaatctaaccagaatggtgtagagccgttccccataatctcagacttatgccttccaatagggaatgagatcccaacagcatgtggtgactgaaaagcataatactggttggaaaaaatgccacccctttttattttttatttttcctttttattattaatattttttcaagacagggtttcttgccaggcatggtgacacatgcctttaatcccagcacttgggaggcagaggcaggcagatttctgagttccaggacagccggagctatacagagaaacactgtctcgaaaaaccaaaagaaaaaaaaaaggacagggtttctctgtaatagctctggctttcctggaactagttctctgtagactaggcaggcctcaaactcagagatccacctgcctttacctcctgtgttctgggatttaaggcatgtgccaccaactcctgacttggcccattttcttgatactgagaaagaacgtgtcctttggatagttggtaggtgcctggggagggacagtgggggagatgacttaacttcccctgaacctagttctggtgaactcatttgctaagttaaatgttttgtgtatgaaatacttttgagtgatatggatggagtctacttggtagctctggtctctggggctctgctgacatatctacccttaatgaaaaagtcaattactctgcttgcttccatgtccttctgggctgggggtggagattcttccaattcagggacggtcctttgtgtgctagggaatcagtttactgctgagaactagtaatcactcagtagcagttaaaaatctacccaactttaagtagaggaaaccttaaactttgcttggagagtttcccatgtaaacacaagagggtgctctttaactatcgatggccagctttaaactgtagtgtggtacagcctcagaagaaagaacagtcagctatcttagggtttccattgctgtgatgaatactgtgaccaaaagcagctcaggaaagcaacattttatttcagcttcaactttgaggtcatcccatgactgaagggaattaggacagaaatgtggaggcaagggctaagacggaagacatggggaacactgtttactggtgtgcttagctttcttacttagacagtcagggacacctgcccagggatgccactacttatagttaactgggccctcctatatttttgttttgtttttgtttgtggtttttgtttttgtttttgacagggtttctctgtgtagctttagttgtcctggaactcactctgtagaccaggctggactctacctgcctcctctgcctcccaagtgcttggattaaaggcatgtgccaccactgcctggcaattaactaatattttaatggatttgtttgtttgtttgtttgtttgttatatgtaagtacactgtagctgtcttcagacacaccagaagtgggtatctgatctcattacagatggttgcgagccaccatgtggttgttgggatttgaactcaggacctctaggagagcagtcagtgctcttaactgctgagccagctttccagccccctacattaattattaatcaagaaaatgcccccacagatttacctataagcaatctgatgaaggcattttctcactttggttttcctcttcccaaataattctaacttgttaagttgacctccaaaaaacctaacatatcactaactacaacttttcctttctgacttgtcctgaataagacactaaacggtcttttaaaaaaattcaagcactttagcagttcagtctctctaaagatttatttttatgtatatgagtaccctatagctttgctgatgggtgtgagccttcatgtggttgttgggaattgtatttagaacctctcctcgctctggttggccctgctctctcagacccaaagatttatttattattatacataaatacgctgttgctgtcttcagacactccagaagagggcgtcagatctccttacagatgactgtgagccaccatgtggttgctgggatttgaactcaggaccttcggaagagcagttggtgtttttacccactgagccatctcaccagccccccctgttcagtctctttaaacatccagaatacctttcaaggtttttctaaaacacccaagtctctcaactaactgtgggcttctgcaaattaaaaaaaaaagtgttttcttactctttttttttttttttttttttttttttagatattttctatatttacatttacatttcaaatgttatcccctttcctagttttccctctgaaaatcctctatcctctccccctccccctgctcaccaacccacccactcccattcctggtcctggtcttcccctacactggggcatagaaccttcataggaccaagagcctctcctcccattgatgatggacaaggccatcctctgctacatatatagctagagtttcttactcttaagaggaaaaacctgagcacagtcaaagtccagcagtgtgaaccttggtgtcagacgcctgtgactcaggatcttctgggctccagagatcttgaagagctccattccacagctacttctgcctttggtactagcttctccaagtgctggcatctctgtggcaactgggctgaatcttcaccacaggcctcttttgggctttcttcaggcactctgaccctgcagtacctcagctgctcttcatgactcctttggctgctatcataaggtacagtcttggccctctctggaccaagcttctgtgtgctgaccctgagcaaacatttccttacaagattttgcctcagtgatgctggctgatcttttgttttgtttgttttgttttgttttgtttgagacagggtttgtctatatccttggctgtcctagagctaagcagactcagatccatttctgtctctcaagcaccaggataaaagacatgcatcgctacgcccagctgcctgtttctttctttttgtttttgttttttgttctttgtttttttttttttttttttttgatttttcaagacagggtttctctgtgcagccctggctgtccaggaactcactctgtagaccaggctggcctcgaactcagaaatccgcctgcctctgcctccccagtgctgggattaaaggtgtgtgccaccacgcccggctgcctatttcttttttttttttttttttctttttttttggttttttgagacagggtttctctgtatagccctggctgtcctggaactcactttgtagaccaggctggccttgaactcagaaatccgcctgcctccgccaccacgcccggctgcctatttctttcttaatcacagctgattctttagcgccattgacagtatcagtattgtctcaacagagcaaaggttgcattttactggttccagtctcctagtaatcacagccaactcttcaactccatcttaccagaacttcaaatttgtaactcagaatatcacttacatggccctgatagagttcctttgcttcctttcgaaacttcacaagacaggcctcttatcgtctgcactgctctcagcattcttacctatgaaacctccacagagcagcccattacgttctgagccctctggcttttctggccttaagtcccaaatacttccacaatcctcccccaaaacagcatgaacaatgtgattaggtttgtaccagtttttgtctgagagtttttcttttttcttaaattatgtattttatttatgagtatactgtcactgtcttcaggctcccagaagagtgtgcattggatctcattacagatggttgtgagccaccatgttggttgctgggaattgaactcaggacctctggaagagcagtcagtgctcttgaccactgagccagctctccagccctgtctgagagtttctgttgccttgataaaacacttgacaaaaagcaatttggtgaggaaagggttggttggtttggtcccaagtccattgaggggaacaaaggtaggaactgaagcagaagccatggaaatgtgtttccacatcaatcattaatcaagaaaatgcatggtagacctgtccatgggccagtttgatagaggcggtttctcagctgaagtttcctcttttctagattattctagattgtgtgaagttaacaaaaactagccacgactgaagtgtagccaggctgaattctgtagggatgataacaattggttgtgggcattttagcatccttatatagtctagatgtctttacattgatggatttacatttcagaaagactccaagaattaaggagaactttttttccctaggtatctccagaagaccctggagctcagttcttgattcagactgggtctgtgggccgcaatagggccgaggcctctttggaacgagcccagaatctcaatcccatggtggatgtaaaggtggacactgaggatgtagagaagaagccagagtccttcttcacgaagtttgatgcggtgagtttcctagtattgagcctgttgggagagtcaagcaggttgaagtagtagtggaagttcagtatggagtcatacctctaacctctaaccctagtgtttgggagccaaaggtgggaaggaggccaggactatgtaacgagattaactgtaggtgtacaagggctttcaaatcacacactctgaacttttaccccatctgtgtctataaactgatgtcttctttaggcttgacacattgtatatgtgtttctgagtaggtccagtctattagacctattgtggttgtttgtgaggtgcctgctgtcttctgtgtctgggcttctgttatctgagtctaggtttcagcattagtgtttatcttccttcagaatctttgctcatcatcacttctcggtcttttggccaagagcagaatctttgctcttgtgttctggaaatttaagttgctgattaattttgttgccagctgcacttattagatagaagtatcaagctacagcttatgttttgtgttcaggaaggaagcagcaaacatccctagccaagcttggtagcatttgcctataatcccgacattaggcaaatggaattaggaaggaataagagatcaagactgagtttgaggccagtctgggctacataaggttttgtttttgaagacagtttctctgtagctctggccatcctggaacttgctctataagaccaggctgacctttggagatttgcatggtgctgcacttaaaggcatgcacccccacctccttgctttgtcttaaaaaacagataactaacagccaacacatctgtgctcagtgtgtctgtgccttttatatatatatatatatacacacacacacacacacaacaatcactttggccatggaattgtcagtgatacaccaaatgctgcatgtagaactcacatcatctattctcaattctgtatcagtgtctgttaggttttcttatttgcttttcaggcaaggtctctctacaggtccccagcagtcctgtaggccaggctggttcggaacttttggggagacaggcagagattttattttccctttccttgcctctccagtacagggatttaaaggcttgtgctgccacatctggctgacttcagcctcttaagacagggttccctgtaccctgggaaagcttaagagatcttggacaaatagtaaaaaaaaaatttaaagtgtgtgtgtgggtagatactcaaacatgaccttttggtcagttaaaaaactggttttacttgtcaccagaatttgcttgactttgtagtttagattaccttgatagctctgtcttcatgagaactatgaggtgtagtttatatgctcatgggttaaggaaacagattgtcttgagtggttttactgtccagctaaattcttctcttaggtgtcagaagtggtcgtcatgtcgtgtatattttctacaccctgaaatctgcagcttttcttctgtcttttactcacagcacccaagaacctgttattcttgttgaaactggtcttaagcctgccagagagacagttaatttaagacttatgcagacagcagggcagtgattcacagtttgcagctcttagcagtcacttcctgtctcctctcaggtgtgcctgacttgctgctccagagatgtcatcattaaagtcgaccagatctgtcacagaaacagcattaagttcttcacaggagatgtctttgggtaccatgggtacacctttgcgaatcttggagagcatgaatttgtagagtaagtgctgggagagggccgaagggagcgttccacagttgagtggtatttgtggtaggaaatgagctgtctcaatgacatagcatactgtactataatacttcagaacattctcagacaagggattaacaaattatgaagcagagttgttttgtggattcacacttttgttgttttttcaaggcatggtttctctgtttggctatactgtaactctgtagaccaggctagcttccaactcagagatccacctacctctgcctactgagtgccatgcctgctcagcttgtgggttcagaattttaggagacatgtagaccccatctttggaggcagtggtgtcaactgaagcccaaagcacgcaatgttgtggacagagtgcatcacatgggtatcccacctcccgaacttgagggttggaactcacatgctgtccagggaaagtgtgcttgtgttaaatgcttgttccttagcttgtacttgcatgttgagtgatggagagagagtgcctgctagttaaatgggtagtcctttgggcacatttaacctgccttgaaaagctccacggttcagagcctactgtggagcagacagaccttatgccttgtttggaacatgaagctgcagagcctaattctcacatgacaagacctgcagtgtttttacttactaccgttttcaagagaaagatggcagacggtatttataaaactatgagctgaatatatggccacgattcattatatttttattctcttgcttgctctctcatctcaatctctcaaacagcatctgaatcctaccttgccactgagtgatacagttgggcacagcttcctgctaagcagtgctcctattgttcagcctctccagcaagtcattggtatttctctggcccacaagtttcttggctggtgcacaccttaatcccagcatctgggaagcagaggcaggtagacctctgagttcaaggctagcctgatctacagagtgagttccaggacagccagggctacacagaaaaaccctgtctcgaaaaccagtgggggagggggacaacgacgacaacctttgaaaggggcaaatgtgttctcgccatctcctaccctagccacccagcagctttagaaaggtctgattctaggagtgcaatgaattgcacagttaaaacaagagcaggctgggctactcttaacatgaaatttccacagcacaaggaggaattaggtttggctctttagtttttgattcttcaagaatgtttgcaaagcagtctctttggcttatgggagcttgcttatgctaggcagtttacttacgttcttttcccattatcacatcagggacagctagtttaaaaatggctaactgatttatcagatctctccagggaccgtgatgagatttgagctcaggcctcattgattcaaaaacttttttgctctattttggttgtatatttgttttgtttatcaaggcaggatttctctgtagccttggaactcactctgtagacaaggctgttcttgaactcagccttttgctcattacattccagtgatgtgactttcaaacttggcttcctcccattgtctcttctagagagaaaaccaaagttgccaaagtaagccaaggagtggaagatggacctgaggccaagagagcaaagcttgattcatcagagacaaccatggtcaaaaaggtaagcgagagagctgaggttggaaaccctggggcctcgtaactgcaaatgagggaagcctggaagaggaagttcgagagtgggtatagctactgctgattccaggcagctctctcctcccgagaaaatgggtttatattccagatccttcactgttctgacagcctctcaaatgatcaagtactcttgtgctgcagcaccgtggtagccagatgacaagcttgtgtaactgatttggcataaaagccatcagttttgacttctagtgtcacatgtgtcatgtgacagtgacgtatgagactggaagtgggtcttagacctgagtgtggagttagacagttgtgagccacagtgtgacttgagatgctcagtaataaagtgtttcctgtacaagcgcgctgagcaagtcaccccagacggcttgtgcctgtgtgacagtgcccgggagggagacgagcggtcagtgtagtgagcaccaggttcagtaagagctcctgtctcagaaaggtaaagagctgggctggcactggttattgtagaggaggatctgtgttcccgtggcagtaagcccagcgtggtgactcaggccttatcatctcagcatttaggaagtggagactaaggatcagaagttcaaagctccagttccaggttagcttgggctacctgagactttgtccccaaaccaacagaaaggtctttaatatgtggatagtaattgctggtgttgtgtgggtctccccccccccccccaaaaaaaaacaaaacaaaacaaaacaaaaaaccattgggcgtagaacctggggacttagacatgtgtttgggtctagtgcagtgtttaatctcattttagagaaagcagttaggaaagcaaacagaaggcaatggtttctttagccggtgttagacaagaaaatcttgtactagggaaagcaatttgaagtggctggtattggtttcacaaaactgagaaataatgggaccaaacccatatttaaggaaagccgttggttggaacattcatttaaagtttcattgagggttagaggttctgtgcaggttccacagcactgggactaagttttctagcaagacaaaactgcattttctgtcccttacttttgtgtttgtgttgggatagctttatctgtgagcctgatgccgaggaattattaagctctaattttagtgtctattcacaggactgtaattacccggagtgaacaaacctggagtcctttctttttgaggcccagtcaggctttctctgctgggttgcctgagtttggtggggagagacattgttaacaaatggaggaacacaaaaggagctttgtgggcggctctgtcagtttataaatcacaccctcttacaagtgtgacacttggccctggtgtgaagggttttatggcttaagggccttctctgattgaggcccacattttgcattcatatggaaaaagcccttgctttgttagccattcacagctggaagtttccctggaatcccttctgatgatgcccactagggtggatatggaagcttcatttgggagccacttttctgtcactatgaggagaatgtggggaccccaggccagtacttggcagtcttggtgtgccattcctgagcgctctgccggcactttgccctttgtgcaatgtcttccttacagagggcagaaattgaagatatcaaaatattccccagctgacattgttagtcagctgttacaatgggactattcagctgggattccaaccctgagctcttgagggcgcacagcatgcagcacattccttctgacaatcccctggattccagaccttggctttgtgtctcaccaagaacacagggcaaggacagggtgtggcagtgtttggccttgtggctttgccacctggtagtaacaacttctctatttggagagagagggccttgggattttattttacttatttataatttttttgagtgtgtcagtcctggctgacctggaactcagaatgaagaccaggctcacccaatatcttcctgacaccaggccaagtggccctgtgattttgaagttttgtctagttaaattccttcacccagattttaaggtttcctaaattgtacagaataagtagttgggttctattcagattgcaagatggggtgagggaagcagctacttcctgtttcctgtgaaaggtgtctgtcagagtccccctctcctcccacttgtcctaggttcaatcagttgttgtaaaaccactttgggttcaaggtacatggtgtgctcctaaattagaaacatcagaaaacaaagaggaaaaacagagcttgtggttttcacacatctaggaagttgggtctttttaacacacgtaagcctgtgataaatagggcagtaggagaggcccaactggaggcagctggcacttgggtttgttagcatctttttggtactttggtttttaagttgcatgtgtttactttgtgtgtgtctgtgtctggggcctgttaagtattacaggcagttcttttaccactgaggtacaactccatgtaccctttagagtttagttcctgggctggttggatgggtaaagggacttgtcacccaaccacatcatccaagttcaggacacacatggtgggagaatcagctcttagaagttggcccctgacctctgtgaatgtatgtgtacacacacaataaatgaataaataaatgtgcttttaaaatactaggttttagtcgttgagattaggaaagttttgtttattgccttattcttaggccagcgcttagcacatagtcaggaaataaagttcagtgtaatggcatttcctgcagcagaaaatgaccaccctgaaggagatctttgtcgttttaaacctacatcatggaattaactgtgggatgaactaaatgacttagctttacagcacattagttttcatagatcagttacttgatctgagagaacagaattccaaagataagaaacttgctcagagctgagcagtgggggtgcacgccttgaatcccagcacttgggaggcagaggcaggtggatttctgagtttgaggccagcctggtctacaaagtgagttccaggaaagccagggctatacagagaaaccctgtcttaaaaaaaaaaaaaaaccccaaaaacaaaacaacaacaaaaaaaaaaaccaaacaaacaaaaaatagattgcttggtttagagctgctgtcgccaactttttcaggtgtcgaatgacttgacaggctggctgttgaaaaacacagatatttacattatgactagtaacagtagccaaattatagttcagaagtagcaaagtagtagttatatggccagacagtcatgtgcacacctttaatctcagcactggggaagcagaggcaggcagatcccttgagttcaacaacagcctggtccacagagctgagatccaggtctgccaaggctcctcagagaaaccctgtcttgaaaacagagagggagagggagagagagagagaatattttctggctggctggcacagtctgaggaaggcttgcagcattaggaaggttgatgacttagagacaggaaacgcactggtctatacagagtgtttggttggatactggggtcagggtttccagggaagatggttggctgagatggagaatgatgtcttgccttatggggaagtttttcactttcaatgacatgagcacagagaatgaaccctatgtgtgtctgtctgtccccagccctccattctttccttcttttcctttctcttctttcctctcttcatgactgaaaacaggcagcccagctgagtttagacacagtctgtagcccaaagaggccctgtgttttcagtctttcctgctttagaatgaatgctgagtgcacagcatactttaccactgtatctgatacacgtggaagtatgcacataattttttatttcatgtagagaaatatgccacatccttgttctcagtttggcttgctaatctgccacacttttctttattcttgctttatttcactcctaaacaggttgactgtggggttgctgggatacatggcacctgaaagggcagacctcactcatgcatacttgcttttgatttaacctgggttaaacttaagaactggagagagaggactcagcatttaaatgcacttgttgctcttgcaaaggaccccagttccaggggatccagcaggagtgtgtgtagtctaacattcatatacctaaagtaaaatgaatacatggtttgttcttagtcacgctttcaaaaaaagaaagcaactttctataccagcgattaagcataaactaagactctttgctagcatcatgcatactaccaaattaaagaggcaaacatgtttgacgtgctggggctgagcctctcactctttgtcagtgtaaataatggttatcagcagttggctcttgtttccatgtgtttcttgttgtgtctgtgtgcataagcactatctagacttgctccccatgtctcttcactacttcagatctggtttcctgttgcatgtgtgctgccacctgctttgtaagagaagcattatgttggtgggaccatctgtttgtgggtctttgtggagctttgctgtcctttgtggtagttactagacacatacggctatttgataataaatacagaataaaacgacaactctagtgttgagtaagcacctgtagctgctggcctgggagttgcacaccgtgtatacagcctacaccatcatcgtccttcctcttggacagtactgcagtgcttctttgtgtgactacattactgtttacgtatctgctgttggtggcattcaggtgtgtaaacttccctgttagagactgcactgtgctcagcattctgtttgtgcggtgagattgtgtatagtcgacttgggcagttgtgttcttttctgcagggtaaactaggatagggcatcttcaccttttgcagatgctgttgttgctctaaggatttttgccaatatccattccgtggccaatagcatgtagcagtctcacttgcttatctcaggctttgtttcaactgtgctgttaagtgaaaattgttcggcttacggttgtcatttggttgaatacatgtttttcttttcaaataggttctcaatatgtagcctggctggtccgggaaagtagcttcatagcctaggctataaagttggcgttctcctccctctgtctcccacattctgggattgtaaatatacacaggcatgaagggcactttttttttttttttaattaaaaaatttccaccagatgctggtggcacatgcctgtactcccagcactcaggaggcagaagacaaatctcttgagttttgaggccgacctgatctacagaatgttcaggacagccatggctacacaaaccctgtctcaaaaaaattaggtcgatggatggataaaaatttcccctttattttacatgtatggatgctttgccttcatgaatgtgtgtgtaccacatgcatgtagttcttatggggggccagaagaggggtcaaattcctgggactgaagttacagatggtactgagctgccctgtggctgctgagaatcaaacccaggtctgatgtaagggcaaccagggctgtttaccactgagccagctctttagcctctaagaggttgctttttctgctgtgatgataaatgttttatggagaggtacttttttaaaaaataaaaaatggtacaaactcatttctcagcagcttctaatcatctgtgtatgagttagtgaatctatacatttatgccattcatgcttatgggttatatatgtttgcacatagaggccgtctgaggttaatatcaggctttctgttgtccttgattgctatgtttaatgtatataatgaagtcaggtgtctttttttgaacccagagcccacctttttagctagtccagctagccagttttcttctcaagtgctgggattataagtctacagcaagcctaaccaataatgagttaaatttatttctccacatattatcagtgagttcagtacctctcatcccaatgttcattaattaattctcttctgataggcaagcctggattacagtatttgcttatgttagacactggatggaaccagtgtcctgttactgtttctatggagatagtgttcttattctatttgttagacttctcacccaggacacccatgctttcttggaaatttcctccccagaaaatgtctgtgtgtggtaatatgggactgtattgctcaggaaaaagtaagtgatgtttgggtctcttttaatgtttatttttaattatgggtatgttcaggtgtctgtgcaggccaaaagcttagatctcttggaatggaaaccataggactataggaactgggcatggaagctgagagctgaacttaggtcctctgcgaggacagtatgtgctcttaactgctgcgccatctcttctaggccgcatatgctctttttattttaatgttttagtgtgtgtgtgtgtgtgtgtgtgtgtgtgtgtgtgtgtgtgtgtgtgtgtgtactcattgagaatcggttgtcttctggtgtccgtctgtttgtcatatggtctccagggggtagaccttgggttgtcaagcttggcctgcgtctttacctgctgaacagtctctctggccctttgttgtttgtccttttgttgtttactactttttcgaaggaaatcagtaatacttttgcactaaataaattacaatataaaaatccagtacgccccattgcattttctgagataatttcatttgaggctagatgagtggtagaacatctgctcagcagttgaagtgccacggccaacccagcacaagacaagcaggaatgtgctttagatgcgaggtgtcatgagagcacggtcctgctacaggagctttgccaatgctgtttccacttctgtagtctggaccttttgtcccatcccttactttttcatactgtcaatatcaaaccgttgtgctgggaaatacttaaattttggttttcttcataattaaagaatgttctctttagtaccttttgtagtttttttttttttttttttactttatttattattatacataagtacactgtagctgtcttcagacacaccagaagggggcatcagatctcattatgggtggttgtgagccaccatgtggttgctgggatttgaactgatgaccttcagaagagcagtcagtgctcgtacccgctgagccatctcaccagcccccttttgtagttttttaaaattgagtcttgctgtgtagtagctcaagctggctgtccatcctcctgccttaagcccctgagtctcagaattaaaggcctgcgtaccacctcatccagttggaggctgaaacaggaggatctctgggagtttgaggtcagcctggtctaaatgaaacaggtcataggaggttggctgtgtcctcttcctgcataggaagcacatgtccatccccgttccaagtatggaggaagtgtttcttaggttttagtgagcactggattcgtagaataagactttgaatgtttaagtttgtatgacctggaaagtgttctgctctgattcatatcagcatgcactgtctttttcccacagaaagtgcttttttgccctgtaaaagaggcgctagaagtggactggagtggagagaaagccaaggctgccctgaagcgtactgcccccgactactttctgctgcaaggtgagacctggagatggagccactccagccaggcttgtactgtgggccagtactgaggccgtgtgtgttcctctgtctcctccacacagtgtgagatgcagcctcactttggtctggtttctggtcactttctaaatctgtcagaatgacctgttttttacagtggagcccgaggtgactgtaagctccctggcatcttctcactgcccctccagaactggtctgaaacccttattctcctgacaacagttttgattgttttccggtctttgggttaagttgtttgctttttaccttttacagtgagacctcacagaagagcccagcttgaacttgtgttgatccccctgcctcagtctctcatattttccatttattttgcctgacttctacctccctaaatgagccatctttcagagatttgataggaaaatactggtttacctctcagtgttgccttttgtccctcacagtttactgtttattgtagtgtgtgtgtgtgtgtgtgtgggggggggggggatggatggatggatggatatagatatagttgttgagacagagtttcagtgtataactttggtctggaattggctttttagaccaaacaggccttgaacttacagagatccctcctccccttttttaagatttttgctgctatatatgtacacaccttgtctgtgtaaaagtatagggcgtgtgtgttcggtgttcacagaatactgaagagtgtgctagatctcctcttctgatggttgtgagccactttgtcagtgtaggaaccaaacttgaatcttttgcaagaacagcaagtgctcttaattgctgagcacataattccagccccatcaaggttcaaattttaaaataccatttaaaaaataattgttggggcatggtaacacgtgcctataatcctagctagcacttaggattcagacacaggaagaccatcaaactcattttcagctacctcgtgcatttgaggatagcctacactgcatgaaatgctgcctcaaaattgggaaagggacaggggataggaagatttagcttttaactattttaaaagcctgaatgtcgattcatacagaaatatttaagtgggttaagtaggaatgagtgttaggcatgtgagaaatgccttctctaaggactgtgggaccctgtgtggaagaaatgccagctgcactgtgagcagcacctgctcctctgggccagcgttgcctgcaagcccagtgtgtggcacaagaagccaaagacactagtttggagcatttgtgtgtatgatgaaatcctttctagtaattgcttatgaagctgcccctgagcagcttctagttccaagtggttctagttctggttgttagaatgcactggggagcattcctgcatctagtgggaagaatgatgagcgagtgatgtcactcaacgtccccaacagctcctgtggcagagattgagccactgggaatgtcagtgcaaactcttacctcacatagtcctagctctggggaagctgagacaggagaattgcaacaagttcaagggtagcctcagaaacagtgagactgtgtttcaaagaaaaggaataggaaaactggatgtcacgtctgagaatggcaatttccagggtggcctcccatctgtctcaagattacagcactctccttaaggtgggttagatggtcctcgatttgttctttcatttcttccacttattcacttcaattatctgtctgtctgtttacttattttcaagtttctttttatacctctgggtgtcctgaaatttgatttgtagaccaggatggccttgaactcagatcttcctgccttgcctcggtagtgctaggattaaacacgtgccaccatatctggctgttcactgttatttatttacttggtaaggatgttaatgtaaccccagcagacctcaaacttgctatatagttgaggatgatctctgggttttctcagatagtggaattataggcatgtgcctctgttgcccagggttgtttttttttttttttttttttttttgctttttgttgttgttgttttttgtttttgtttttttgagacagggtttctctgtgcagccctggctgtcctggaactcactttgtagaccaggctggcctcgaactcagaaatctgcctgcctctgcctcccgagtgctgggattaaaggcgtgcgccaccacacccggctttgttgcccagtttttataggtagactactttggatgaatcccaggctttgtgcattctgggcaagcactgccagcttggatccagccctttgaagtctgggtaagctttgtgtgggactgggtaccaagagcatgcaggtacctgggcttggaagggcagacagttacccagcaagaaattggagctgcctttttatgcttctgtttttccacagctacatagcccaggctgaccaccaactggcagtactgcttcagctttccagtgctggcatcccaagtacatgtcaccacacttgacattcactgtaatgtcagggtcatgtgatagcctatgatgtatggggtgtttgtttgtttgagacaggttctcactatgtagctttggctgccctgggacttactatgtagatcaggttgcccttgaactcacagagtacctgcctctgcttcccaagtgctaggattggtaacttacagttcttgagaccaggtgtttggaataaagactgaccaaacatttccggcctattctgctctttttctaagttgagcctacgcgttcactaagtaaacattttgaaaggggcttggggttgagttcctaagtactgaacacttgtctagggtgagttcttcaggttcaatccccagtaccacagagaaggaaagtttttggaagagaacagtgtgggtctgtattcttcaaactgccaccttgttccctttcctgtagattgcacccctgctggcctcaccctactgagtgctatgaggaccttgctcttagggagtggctgttggttactaaaacctgttgcttttccatggtgccagccactttcttgtcagtctatagcactgagaaagcagagtaagaggattgctgtgactataaggagaacttggcctacagttaagcaaacaaagagacaagctggggaaagggagttaaaaatacattagggaaaaaattgattctaataattaactttagggctaattggaagatctgtattgaactgtttggtttttttttttgtgtgtgtgtgtgtgtgtgtgtgtgtatgtgtgtatctgtggtactgaagattcaacatatgtgagctcatgtttgttagggaagctctttactaagttacatctccagccctttgttttgttattgtaggttggttttttgtttgtggtttttcaagacagggtttctctgtgtatccatggctgtcctggaactcactctgtagaccagagatccaccttcctctgcaggatcaaaggtgtgtgccaccagctcctgcctgttgtttgttttttgtcttatatgagtacagtgtcttcagacacaccagaagacatcggatcccattacagatagttgtgagacaacatgggcttgctgagaattgaactcaggacctcaggaagtgcacttaacctctgagccatttgttttttgagaagtatccttgggaagcacggtagggtagcactggacagtaatcccaggttctcgggaagccggatgataccagattcaaggtctgtaaactgtaagctgatctcaaggtcagtctacacaagttagtaataccttgtctcaaaacaagaagggtaaaactgggagggtgcatcccagtggctagagtacttgccttgctggtgcaattggtccaacgatccataaacagcatacaaaagaaatgaacacagtaaacagaccagatgcaaaaaataagtgatgtgataaatcgtacgtcagcatagttgtttgaagtataaaaatgtacaaagacaactacaaatgaacacacatttcattaggttacttagaattcagatttaagaaactggtcagttaatttcttcctgttatatcatagctgagtaaacaaactctttacaagctatattgctaccccctccccacccagggcaggggtgtagcccaagctacatagagaatttgctttcctggaatttgctctgtagaccaggctagcttcgaacttggagattatgagtgttggaattaaagttgactgccaccaccactcagcagcacattaacttcttgagttactcaagattccaagcacagtcaatggcaagcatgcttagcagaaagctaggacacacatggaagccatctgctgccctgagaagtagaatgaggtcagtaggtgagagtttttggttggggctggaggtgtggcagctcagtggttaggagcactggttcctcttacagagggttggggttcagttctcagcacccacatagtggctcataactatccataactccagatccaggctatccagccctcttctgatcttcatgggtgctaggcatacacgtattgtagtagactatgtgcaggcaaaacactcatacataaataaatctcttttgttcactaattaaagaaaaaaagtaatgattattgtaaccaagcaagaaattaaaaagacccatttctgtgaacttaagaaaaaggcattgaaccaacagattgggaaaggatctttacctatcctaaatcagataggggactaatatccaatatatataaagaactcaagaaggtggactccagaaaatcaaataaccccattaaaaatggggctcagagctaaacaaagaattctcacctgaggaataccgaatggcagagaagcacctgaaaaaatgctcagcatccttaatcatcagagaaatgcaaatcaaaacaaccctgagattccatctcacaccagtcagaatggctaagatcaaaaattcaggtgacagcagatactggcaaggatgtggagaaagaggaacactcctccattgttggtgggattgcaagcttgtacaaccactctggaaatcagtctggcggttcctcagaaaattggacataatactaccggaggatccagcaatacctctcctgggcatatatccagaagatgtcccaaccggtaagaaggacacatgctccactatgttcagggcagccttatttataatagccagaagctggaaagaacccagatgcccctcaacagaggaatggatacagaaaatgtggtacatttacacaatggagtactactcagctattaaaaagaatgaatttatgaaattcctaggcaaatggttggacctggagggcatcatcctgagtgaggtaacacaatcacaaaagaactcaaatgatatgtactcactgataagtggatattagcccaaaaacttagtatacccgagatataagagacaaattgtaaaacacatgaaactgaagaagaacgaagaccaaagtgtggacactttgccccttcttagaatcggaaacaataacccatggaaggagttacagagacaaagtttggatctgagacaaaaggatggaccatctagagactgccatatccagggatccatcccataattagcctccaaacgatgacaccattgcatacactagcaagcgtttgctgaaaggaccctgatatagctgtctcttgtgagactaggccagggcctagcaaacacataagtggatgctcacagtcagctattggatggatcacagggcccccaatggaggagctagagaaagtatccaaggagctaaagagatctgcaaccctgtaggtgcaacaacattatgaactaaccagtaccccggagctcttgactctagctgcatatgtatcaaaagatggcctggtaggccatcactggaaagaggcccattggacacgcaaactttatatgccccagtacaggggaacgccagggccaaaaagttcgagaatgggtgggtaggggagtggaggggagggcatgggggactttttgggatagcattgtaaatgtaattgaggaaaatacgtaataataaaaaaaatttaaaaacaaaaaagaaaaagaaaaaggcattgagctaagggggactcagtggtagaacatttaacttcatttgtatgaagctgtaggttcaacccctgatactacctaaggaaaaagaagtattatatatacttcagcagaaagcaaaccaggccttgtcctctctgcatctggatgctccatttctcattgtagcacctctagtaatgtatgaccactcaagataaaagcaggtgccttcatagatggctccggggttaagactactttcttctttgctaaggacccatgtctggcagcttatagctccctgtaactccagcgcctggggatccaacatcatattctgtctggcctccattggcattcattcatacagaccagcagaatcgctcagtaaataacagctgttgtgacctgagtttagtccccagaatccgtataatagtggaaggagacaaccaatttcacaaagtttttctctggccttcacacatatgcttgccccaaacagtggtaataaatgaagatgaaaggaaagaaaatcaggagcatagatgtagacatgtaatggccattggggattgtcatgtgctaccaagaaagcaaggcccgggaagagggtatgcagggtgcctggaggaagacaagcaggcctgtgaggagctggggcctggggctggagagatgtctcaacaggtaagagcactgactgctcttccagagaaactgggttcaaatcccagcacccacatggcagctcccaactgtcttaaactgcaaagatctgacacacacacagatgtgcatgcagacaaaacaccagtacacatgaagtaaaggcaagtagagtaaaagcagggctgggagctcaggatttcatatctcagctgtgtactatgcatgtgcaatttgattttctttgtgtgttttagtcattgagtttttcgattttgtgtgtgtctgtgtgtgtttgcgtatgagtgtaggtactctcagaagccagaagagtgttgaatcctctcaagctggagttaataggtgatttttgaagcctcccactatgagtgctggaattggcccctctggaagaacagtactggacacagagacagacagacagatggtctatagcaaagttggtcttgaactcctgatccttcgggctgctacacacccagataattcgctattttgaagtgatagttcaagtgacactaaaggatctttgaactagtgagtgttcttgctctgttggctggacgacattacatcatctgctcaggaaagagatataagtagttttcagtttttccaggcctgagaatgtgacccaaaggagttgtgatgctttcgtgatgacttcttgtcacctggttgtgctcagtgaggacagagtgattggctgtgatatacctttgtgaaaaaaaagaacctgccctcattgcccccttgcctggttagaaacactgtgtgctggataaatgactactcttgtatgaatgactggctattgcttatctgctcatttattcacttcagagtgcaaactgctcacatgttggtatcccttcaacatcccttgctgtctggcaaggtttctttttatctttgctcttcccttcacccacccacttaccccaagacttggggctatggctagagctagccttacactccagaagagggcatcagatttcgttatggatggttgtgagccaccatgtggttgctgggatttgaactcaggacctttggaagagcagtcagcactcttaaccactgagccatcttaccagcacttcttttttttttttttaagatttatttattatatgtaagtacactgtagctgtcttcagagactccagaagagggcgtcagatctcattatggttgtgagccaccatgtggttgctgggatttgaactcagaaccttcggaagagtagtcagtgctcttaaccactgagccattgctccagccctctcatactgttctaatcctttaagaaacacatttctaggtgttggaaagatggctcatcagttaagagcactggctgctcttgtagggcccctggctttgattcccagcacccacatggcaggttagagctgtctgttattctgattgcaagggatctgacactctcgatcctctgtgagcatcaaggcatgcacatgattaggcacacatacacataaaataatttaaaaaattttttgagacactggcttgtctttaggtgttttgaagttgtcatcctcctgccttatctctccagtagccagtgtgataaaaccatcaaacccctcgtaaaccaggcttgatttccagagtcccctgctgtccctatgtgtgcttgacatggttgggaactcggggattttccagtcagtacagtacaatagtgtcagactgagtgcttcctgctgcggtgtcctccatcttggaccagaaaggactcatctttttattctcccatggtgtgtttcagaacattaagtgtgagctggtttcctgtggcaaaaaagttgactttgatttgttctttttgaggttactgtgagtttatcataacaggagcgctaaaaatagtggccctcggtcacatggaaatggagactaacatggacagtaacagcagacttacccaggagtaaaaaggagtgggccacatctcaagatgagttactgtcagagggtcctgctgtcttcacgctctcagtctcttctcataaactgtgggaaatacttagcacacactactgcctcagaactgaaggcacaagtaacccaagaacacacatttggggtgcgtctggtatttgcaagatctatagctaaaaatcaggagtaagaattgatctccttatcggtggattaacaaaccttaacaccttgtgaggaaagccctaatgtaggctgtagaacaaaactgctctatcatgttcaatatgaccgaataacaaataactccacagctatcaaagcaggcagacaccctcggattgaggtaaggagaaggatagtgttgcaagtcgaggagcagcacacggcagccggaggctaaatcccagtggatatggacacatcagaaccacccagggaacattcagaaagtgcagatcaactaactagtgctcctgttgccagctcagagtaacagggtggcttgcttcttggcattttgctaaagtttctcggatgagaccttttatggtaggagaagaagccatacttcaaagcaaaaccccagttacctgttttaatttaacatgtcctaggttcttattttttatttactgaaacagggacagtagagagcccctggaatacctcttgagtgcagtggtgtatgttgttgtgtgtgttaagacaggatctcagccagggtaaataagtgtggtggccgcagaggctgtagagccacacctggccttgaacatctcatcttcttgcttctacctactaagtgctgaaattatagacctggacataatcaccaggtcttgttttaatacagtgctttttatgtgtatcagtctaaaggaagagctgaaaattagtaaagtatagctttgttttccagtcttacaattttagaaactaatatgtattgtggagtgagcaagtaggtaaacagtgtggatgaggacagccagggtgtgtgtgtgtgaatggaaggtgggacaggctaggaagaaccctttgagagtgggtgggattggaggtagtacggcagatatgcttgtggcttctcatctgcagatctggaactgggcatgtgtgggagtgtgtgtgttgtctcttatgcagatggcattccttaagtctgagagtcaaaagtttcaatgcaaaggcccctgtagggactgaacctcactaacatagatcacaatagttactttctttttccactaagtgcaatccagacttcttagagaagtggatgattccagaggtggggtaggaaaattacaggtgagcttgtaacatcttgctgtgccaggaaatacaaagttgcttaagaatggtggcacgtgtcaagagaataagactaataatagtcagtatacataggagaaatgatggacatttaaaaaacctgtggctaatgagatgactcagtagatatttacacttcctcctcttcaattaattatgaaggccggagttcaaatcccagctactcacacgaacaaataagtaaaatataatttaaaaagagaaaccatggggccgggtgatggtggcgcatgcctttaatcccagcacttgggaggcagaggcaggcggatttctgagttcaaggccagcctggtctacagagtgagttccaggacagccagggctatacagagaaaccctgtctcgaaaaaccaaaaaaaaaagaaagagagagagaccgtgacctggttgtggtggtggtatgcctctgttaccattacttgagtaatggaggcaggaagatcacgtgagctttttttttttttttttaaagattttatttattgttatatgtaagtacactgtagctgtctttagacacaacagaagagggcttcggatctcattgtggatggttgtgagccaccatgtggctactgggatttgaactcaggacctttggaagagcagtcagttctcttacccgctgagccatctcaccagctccaactcttttctttttaaagtcaagcattggtgtaagaacttacctcaaaaagagagagagggagggtaggctggagagatggctcagaaatgaactattcgtaactccagcttcaggcagttctgctgaaggcaggtctctgagggcacctgcactcataagcacatatcccacacacagcccaaaccccacacacatacatagatgtacacatacagtgggacgggaagcctaaaaacccaaagcgtcacctaaaaagaagtgcgccagtattgaacacaggacactgcgcttattagtctctagaaagatgtctgtttttaagatttgtttattcactttacgtatatgtgtacattgtggctgtcttcagacacaccagaagagtgcatcctgtcccattacagatggttctttgtgattcctgggaattgaactcaggacgtctagaagagcaggcagtgttcttaactgctgagccatctctccagcccaaagaaaagttgtgtttgtttgtttcagtggtttatacacccatcccaccccctgtcccattttagtggggaagatctagtaccctgaatgtactagatatgcaatcagccattgtgctgtacctccagccccaaagctgtgttcagcagtgcatcatctcctgacagggatcttaaaatgaaaatctttgtgtatactcactcaggagtggagagctgtgtttcctttctaaaagagccaagcttttgtgatgtgttgggaatggggtttgtccagtgaggcactttctctataaaggattttttacttttatcaaatactggtgttaggggtctagagttatgaacagctactgatgatgactgcagacagattcaactttattaaaagctgatcggggccttaggggatacaaagagagttagtttattttagacccttgtgaagctgtctataaggtaatttgcatagtagacttgttgccattttcctactgttcatcagccaggaaatgcatctaaaagttgtgcccttctgggggactgctactggcatggctacacacacagttaggaagttgtagccatgctgggagctggcccatggggaagatggtatcaggcagctgcttgttggtttcagaattgaactggttcacagctttcttcccaaagaaagtacttgaggttggatttgctcttgcagattcccagaagtcgcatggtggctcaccaactcctatgactccagtccaggggatctgacacccttttctgatctcagtgggtacaggcatgtacatgcatgatgcacacacaaacatgcagacaaaatacctatattttgtattaaatgaatacagttttgttttcttgagacggggtttctttgtgtagtgctggctgtcctgaaactcactctatatagatcaggatggcctcaaactcagagatctacctgcctctgcctcttgagtgctggggttaaaagtgtgggacactgcccagatagttttgttgtttgtttgttttgttttgttttgttgttgttgttgtttttcacttaagttggtttagatttgaaagaagtttgggctgggcagtggtgacacatgcctttaatcccagcatttgggagtcagaggcaggcagatttctgggttcgaggctagccttgtctacagagtgagttccagaacagtcagggccacacagagaaactttgtctcaaaaaaaaaaaaaaaaatagaagtttcacactgtgtcttcctgccattgagcaattcgtgttgcttttcatgggtcacaaagagaaggaccatggcattctgttactcccaattttcatattaaacattcttctagtctctgtttggcttccaaaaaataattctttagtaccgttttgttttaattcctgaaaggaaactgccacttgaatttgctcatattttacccattattcttccttgttgctccactcttctgtctaatacactattaaagtcattgtcagagcctgcttgcttttgcatccctgtctccaccttcaccaatggttctgttgtattacatagattgccttcaaacttgtggaccccctgcctctacctcctgagtgctaaaatagcagtcgtaaaccaccacacctgcctctattgtattttaagtcttgtttcttaggtctctgcctgatgtggggatggaaaggaaacaactttgtattctagaactcatagcctttgccagacgtgccctaggcaggcaccattgaagcatgatgcttcccagtggggttttggtgcctggccatgacaagaactcccgggagatgcagctagccccggcagagagctgtgataatggggcagcaactgactgactgttgatttgctgccattgtgaacacagatgtttaaaaataacttacaggtaaaaagcagtggtggtgcttgtgtctgtgtggctgttatcagtggtaggtttgaaagaccacaatcattagaaaagaggaagtcttaccatccagagacaagcaaggatgatcctccagcaggaattgaggcccagaaccacaagtcctgaagctgggtggttagtggagtcatggtacatcctagtagttcctggtggtgtgcttcatggggactgttttcgtcatgtccacagaagggcagatcatactccatttccacacagagaaatccgaatcagtgttagagttaaactcagcaaagattgtgtctgaggtacctgtttaagcgtcacctcaaaagcactggaagggactggtgagatggcccagtgggtaagagccccgactgctcttccgaaggtccaaagttcaaatcccagcaaccacatggtggctcacaaccatccgtaatgagatctgactgcctcttctggagtgtctgaagacagctacagtgtacttacatataataaaaataaataaatcttaaaaaaaaaaaaagcactcggagattggtggccctgactgggagactgaatgatgccaatgaaaccgttactttatttgaacttcaggacctctgggaccttatcttattctactttgcaagatagtgaaaactgagaccaaccatgatcagatgcaataatgaaccacattgttagccacctgccttgttttttctttgcaggccatgtcccctgccccccacttccagcatctgcctgtgagctgttgacaagccccagtcccagctgcagttgttgttagagcctcacatcttttctctgactgtcagataatagtcacgggaatgtcctgtgccatcttccttctcaagtgtggttggcagagagcagcagatgcccagattcaaggccacgtgccactcaagtgctgggctggagaaagaaaaagaccctctttccctgctgcttgtgaccgtgcagagggccgtcatagtagttgtgtgactgttgtgctctggccaggctggtagatggagggccaagcaggacacagcgtgtgctcacactactcccctttgtggttctcctcttgtttgttttgttttccttcattaattattgtctttttatgctagttggaatgtccccattaaagggaaaagtcaaactccggaatcagtcatagacagaaaaatagactttctggcagaaattagagtctgaataggagtgtcatggttttaatccaattgatgagagaaatgtgactaaaaatgcagctcgaggattttagtagctgcagaatactctgttctgttcgtagttgccaccttacttctgagcttagttactgaggttcgctacggtgtagataacatggtagtgagcactgtgtaaccagccaaagctatggcttaacctgctgtgaggaatccttttcctgagagtttgctgaactcctggccccactcgtagcttacagtgatcctagagcttggatcgtattggtgtttattagctgttgtgtgtgattcattgagcactcttgcctctgctgagcactgcgtgagatgcaggtcctctgtctattgcttgagtaatcttagtgtgatttgataggcaaaaaggatgtcttattttgagtcatttctttcttttttaaaaaaaaatgcttattttatttaaattttgagtcatttctgagaattggtcctctccttcacccatcaacagctttcatgtggctgagagtttttcaaaagcaagtgagagactgacagtgagagacagtgtctttctgtcttttgagctgattcatcgtaagtccattgatgaagttctattggagagattaagtggtgaggtgctagctttctgtcgttataacagataacttaaggcagtaaactgtttatagaggaaaaaggtcccagtgtggtggcactagggaggtgtagggcaggaggatagctgcaggttctaggttctaggccaatatcatctgcatagctagcttgagacacagcggttgcatgatgtgatcatctcagaaaagtataggtgggtgggtggtccagtcccttggaactgacacagctgagcaaggtcactcatgtgtcatagacagggaagttgaagtgagggttccataatccctatcaggttgccttcagcaacctacagacctcagtcattgcagctaggagccaaggccttgtcatgtgagcacttagacaagctgtgggtagatcatctgagagtgtcttcaggggatgatctgagcatcatgtggctctggcatcaagaaggggcccctaagtatgtcatttgtggattctaggtttcccatctcaggcctggggtagagctcaggacatgtttataaagttagtatacctatgcatgcactgatgatgctgcaactggacataaggaaagcactgggcattgacctgagcagatgccacaagtcaccagagtttgcgggccaacacatggctgtctccgggtatccctgtcttctatgaccagccatatcctactgcctctgaacttgaagtacaacattgtggaggaggaggaggaggaggaggaggaggagcacgaggaggaggtgcagggcatctgacaccctctccgggcctgtgtgctcctgcatgcatgtggcataaacatatacacatagccaaagcatacatacacactaagtataagtaaataacacacacacacacacacacacacacacacacacacacacacacacacacacaaagaaagtctaattcaaaacaaaggttatcgtgaggcccagggaaatgactcagtgggctatcctgagttccagcccaggagcctgggtaaaggtgcaaggaggaaaccgaccctgcaggtgtcctctgacctccacagcatcacaaactaacacatctgaaatcaagtgttacaatggttaagccaggaggatgttattaccacttttccttactcacttctatctctattgtatgnnnnnnnnnnnnnnnnnnnngtggtggtggtggtggtggtggtggtggtggtggtgagcaggaggaggaggaggaggtggcggcggcggcggtttatttgaagcagggtctcctttagtccaggctggcattaactattatatagtaggagattaccttgaacttctaatggtccttcacctctttgtttgttttatgtatatgggtatactgtagctgtcttcagacacaccagaagaggacatcagatcctattacagatgattgtgagccaccaggtggttgctgggaattgcacttaggacctctggaagagcagtcagtgctcttaattgagccatctctctagtccctgctttcacctcttaagtgatgggtttatagacctatgctgctatgcccagctcaaagggccatttctttgttttgggcattaactaaggatggctttgaagttctgccttaatcttcagagttctgggattacagacgtacaccactcctatctttcatgtggcaatttgtttaattttgtgtatgggttttatgcctgaatgttggtctgtgtactgtgtataggcagtgtctatgcaaaccagaagaagatatcatatttccctggaactggagggttgtgaatcttaagtcctctggaagagcatgttgggtgtttataaagtggcactgccatcatgtctctatcttcagcagatagagtgtactgctgtcctggtgactcttctgtgagtaccttgtttataaatacttgataggatggcctagcaaagcagtgaaaaaaaaaacacacttgcagttcctccacaggatctacagttccagtcctgttcctggctccccgctgcagctacctgacagtttacagctgctggggatacagctcccttttctgactcctgcctacacctgcacatgcatggtgtacactcacacaaccataaaatcttttacaaagagacaaaactattagggttatcttagaagctactcaagtgagttaacacattcctgtaatgtgagaatttgggatgggatgctgagccaagaggactgccaaaagcttgcctgcctggactttgagcaaaagataccttcttagtggaaaaaagagaaagaaactaaggtgacaagaatgaagcagaaagaggaaggaaggactgaatgctttagaagggtttaatgagtagccagagctagtgctgcctcctggctctagggggaatgtgagctgggatgccacactgtcctcagggcttgaacacttgagctaagtgttcttgagtctagttttccaaaacagacttgagtcatgtggatggtattttgtgctaccctctaacttgccagatctctggcatggggtgcctttggcacagaaggtgcagcccagcagagagaactaagtgtatatggttctgcctgtgggcgagactgacctgctgagaagagcatttcctggcaccccgaggctgtagagcttctgagccctgctagtccctgtgtggttttggaccacagtgtggtcaccctgtcagaatcctctggggagatagatagagcatccatcccatttgcttggccctgcccagccctggtctgagcactggttagtatacgttaactgagtgccaactcatgatggcctcaagaatccctatcttccccaccagctgtgtcctactgagtggatgatactcagagtcaggcctgcagtcctcctgttggaagaagcatgtggtgtgtgctttccagtggtcgtcccagcactgaggacgctgaagcaagggaatcactcgctggtagatgaattctagaccaacctggacaatgtaatgaacctgtatctaaagagccaaaatgaagaaagtcttactaagtgagccagctaggggtgtgttaggaggatgaagccacggtcatctggccacaagatctgtagcataaatcagttgagccacttgtgctggggctaatttgtgacacttcattgtcttctattaaatgctgtgtgtgtgctatttgtgtggctttggttatcacagtatttgactgacttattgcttctctgctggggttaaaacccagggccttgcccttgctaggtaatgtaccatttctaaggtgcgtccctagtccctgctatagtagtactttattatctatttatgtaattacatagcttgctccaagacagggtttgatttttctgtagtgctaattgtcctggaactcactctgtagagcacactggcctgcctctgcatgctgggattaaagaaatgctgccaccaccacctggcttgcttttgagacagcatgacaaaatatagcccaggctggactagaatgggaagttctcagtgaccttgtgcagctgctagcggctctgagctctgttccgaatgcacatggttttgcatgttttttgtagaggttgtgttatgttcacatacaacagattctctttgaaataacatgaaaagacactttttccccctaaaacagggtttctgtctttctttttgtttttgtttttcgagacagggtttctctgtatatccctggctgtctctttgtagaccaggctggcctcaaactcagaaatccgcctgtctgcctcccaagtgctgggattaaaggtgtgcgccaccacgcccggcaggtttctctctacagattaggctagccttgaacacagttattgacctgccactgctttctcagtgctaggtggtggtgaccacccagctggtagttatgatcaaagtttgtcttttccattacatgagcagatcttaaacttaggcagagacatgggttgtccactagctccaacactagatgctaaccccatccacttaggcaacccacataaaatggttcagatgaagttaattaagtttggaactctgattttgtagtgtttttatgttatctgatgagtcatcttttgtcaaagctgttctccatccctggcactgtttgatctgagtgaattatcactgaaactggtaagggcacacttcagaaatacagagtcaacagcagtgtgtatgtgtaactgcctggttaagagcagcagaaagtaaaacagcagaacatacaagaacttggggtaagtcctgaggttgctgcctttctagaacatgcgtttcttcttgccctctgctaatgagcgatgacattagaaaagagagtgaaaaagacagcttctatttgctttactgcaaatacaggccatgctgctggcagccttcccagtgtcctgagaccacttcagatgtggccagtgaggtatgtgcacagtgccagcctcctggcctcatctgggcagactacacccagaacggctaagatgatgctgtcttcctttgctcttccttgtgatgccacctgatttctttctgaggtgaagctgatactactctgaagccagatgaacaaggatttcctatgctccccatctgatctagtagcttacagtggatgttatctttgtgagccttcaagaccatctagaaaatgcaccttgcaaaaatttgcgtcaaagggccagaccacttggcaccttagatgccaagttcctaaatggttctgccacttttggattccagaagcaagcctacatttatagtcctgctcctttcctcagagcagttcagtcagtcctctctctctctctgagtgtttagtcctttcaaagtagatagtgatggggtactcatacacgaagcatgttcagcatggctcctcccacagagcaggttctaccacagtttaggctttgtttccagacctgtattttataacagtagtagtggaggctggtcacttgtgaaagtagttaactcccaataacagaatggacaggattgtgcaggctaccactgtagtggctgcttctccttgctccaggagcttgcaggctggcttcctcttgctgtcatgagccactgtgcctcatctggctacttggcatcccatctatcctctgtcaatagcacccatgacccactctgggcgttagtgcttgtcttctcaagagtctctgacattgtacatgggccaccagagaaactgctctgctagactgtctgatgtcttggtctccctgttttcatgggccattagttggggcacaacagagaatggcttccactccagccagtcccagttgccagcttgggtgctgtattagttagggttttactgctgtgaacagacaccaggaccaaggcaagtcttataaaaaacatttaattgggcctggcttacaggttcagaggttcagtccattatcatcaagatgggagcatggcagtatccaggcaggcatggtgcaggaggagctgagagttctatgtcttcacccaaaggctgctagtggaagactgacttccaggcaactagggtgaggatcttaagcccacacccccagtgacacacctactccaaccaggtcacacctccaaaccatcacaggtactgtcattcactgcacatctgatgtgcagttagaagccaagctcacaagatggcagtatgtggcggctgttctctgcatgttaagtgtccagacagcactaaggggaccaatgaaagttttctcaaaactttcttaagagcttagagcaacctcaaatggctctgctttccagctcccttggagaggctggcatgccagactgcagacagtaccacgaacaagcagttgttccaaagatttttgtttggtttctttctttctttttttttttttttttttttaatgctttccatacacagaccctacactaggcaggtaacagttgccagagaaatagagacttgacattttgttcagcagagatatcccagaaatcagacttttctcttgtagtggtttgtgattttcttggaaaacttgcaacccatttccaaactctgcctaaacttcagtggagttccattgactaatgtagccctagccataagcttcacggatgcagaaatcaagtcccactcactagtgcacttccaaacctaggtctgcctgcacccatcagcgcttcagtgctggtcggtaaagtttgtgctaacgggagactgggactcagtcttggatgctcatctgccaagctgtttgtcaatctcaagataacagtatgggttttaataacacacagacaacctggggctagagagatggttcaggagttcagaaaactaactagcttttttttttctttttgatttttcgagacagggtttctctgtgtagccctggctgtcctggaactcactctgtagaccaggctggccttgaactcagaaatccacctgcctctgcctcccaagtgctgggattaaaagtgtgagccaccactgccccgcacactctctcacacattctctctctctctctctctctctctctctctctctctctctctctctctctctctcattgctttctgaacacatttgtggatagatgaaagtgtattgcctttcacctggcctacattttgattaatgtattacttcctataggtgaacacaagagagaagatgtttggggttttctacttgagagtttgaagtgatcattacaagaaggtctctctaatctctctttcccctttcccagtgctgctgaaattccgcacagataaagggagagatccgacttctgagagctacaaggaggatgcggagctgctgctgcagatacggaatgacgtgtttgactccctgggcatcagtcctgacctgcttcccgatgactttgtcaggttggcatctgaacagacagacatctgttttgggtgtttgtctttgtggagaccagagtctcaaaggggactcctgtgccacatttgccagctgcttaaaccacctcctgccggtgctttaaccagcattccaagagaagcgaagacttgtaggtttgggttttcatgtggtttaaaatttaaggtgccgtgtggtctggtgatgttgggcctttctgttctgtgttaacgcctgattgccttgtctgtcgtagggtggaggatcccagtatgtagcactttgcaccgtcccctgcgtgctggccttgtgttcagccttagctatgaaatgcttcagtgtgtctccttgtgtcatgtactgtcagctgtgggatgaatgagtaaggagggagttgccggggggaaaggtcactaccattgggcacctgtttgtacctttatcagctgagaccttagatccaatccccaagctctgggaagctctagctatggcagtctctttccctcacactgtcaggtttgaggtatttagacaagtagccccgagctccttctaagcagctctgccatcttgggcacacttagtttgccatatcgctgaactttcaggctttagcccaagggaatggcaagcatggcttatttgttgcaatttctgcaacaggcagtgggcagttgctcaggctcatgatctgtcttagtcttgcttatgacctgcaatatagttgataggtgaggggacagacagaaggtcagagaaaggaagtcagtagtctcatgccaggagagtccatgcacagaggtctttgctcagcttcttctgtcaccagagtctcttgattgcagatgtccccgttggttaaatgaagcaccagatccatcgagacccagtcatgttttgttatcattgcgaccctcttttgagatgtggctttgtgggtgcttaaatgacaggcgtgcaccacagtacctgtctctgcccaagggttttgttggtcactctagtgctgctgcctcctatctcactgcagcagcccatactgctttctggttcttttcagcaatacagttggccagagaggtccttctagtaccttctttcttcctgggctcctgaggccccctagacagcatcattcatcttggtctttgactctctgtggaggcatgaacttaaaaggctgtactccacagctaggaagcagtcattgaggtactttggctagggtggcagtataagatccgggctggcagcatcgcagactcggcactcagctcttactgcgggtaaaacctgacgacgaggttccctccaacaggcccacccagagagtggcaagtgtgatgctgggccgtgaacatgcagctaagtgaccaatttggacacttaaggtgatgaacggactagttctatcttccccaggcaacagttaaaggccttacttcccagaagtaacagcccacacatggcctaatgagctactggctggctcttctcttccctacctccctcctgtggaaactacatcccttacatccctggtctaggttctgtgttctcagctgcttctccaattgccttctaagtaagaggtgttcagaggcctcttgaagcctgtctgctggcaggcctggggtaagatagggatgcaagcgaggaaatgcgtctccagctcacagctgagctaccccttacaaattgcttgctgctgctgctgagcagacacagttgtgcttgagcctctgtccatcttcatctgatggtagcctgtgctttatgctttcacctccttgtcctgagtgctctctccttgaagaaaaagccttattgcttttctaatgatgagaaaagatgacctgttttagccactgctaacatctttgggtctgggctcacagggatggatggatggatggatggatggatggatggatggatggatgggcgggcgggtaagcaggcaggtggacaggtgggtgggtggatggacagatagatatatatttatatatatttgtatttctattgtctaaatatcacagtggacattgttcagttgcctctgtgcagcctaaccatatgctctataccagacagaaccatgtgacttgtatgtcgaggcattgcaccacctggatgtgtagttattaacttaattttcactgagttagggtgtgtttactgtttcagccttcataatgtgtaaaatgatttatattacatttttaaaattagcagttgagagggatcaagagtacagcctatattatacagtgctctactatatagtgtacttacagctagccggagttaaatgagatcctatctcaaaacaaatttatagtaaactttaatgacaaaagtacccatcttaggggctgggaaggtcgctgccactagtcctgtcaacctaaggccaaagcacagcatcctgcaagttgtcgcctgacctccgctctgctgcagtctgctcacacatacaatagagatagaagtgagtaaggaaaagtggtaataacatcctcctggcttaaccattgtaacacttgatttcagatgtgttagtttgtgatgctgtggaggtcagaggacacctgcagggtcggtttcctccttgcacctttacccaggctcctgggctggaactcaggatagcccactgagtcatttccctgggcctcacgataacctttgttttgaattagactttctttgtgtgtgtgtgtgtgtgtgtgtgtgtgtgtgtgtgtgtgtgtgtgtgtgtgttatttacttatacttagtgtgtatgtatgctttggctatgtgtatatgtttatgccacatgcatgcaggagcacacaggcccggagagggtgtcagatgccctggaactcataacaggtaaaccattttgtggtattgggaattgaacctaggtcctctacagcaacaagtgctcttagccccattttaaccatctagcacggttagtaagtgctttgaatctttctttaaatatgccacacctaggcattcatttttctttttgctgctgcacaaacatcacaattgactccctattctgttccttccagctcctggtgtctctagtgtgctgcattctgaatccctcgtgtaagtggaatcatgtagcacttgtccttggtatccgacatctcagcatatgtatttacacacctatatacctatatacctatctcatcacttgaagcagagggacaagcattgccatgagttcaaggctaaccaggactctagagagaccatttcaacctcttactaccagtgctatctttcttagtcagggtttgtattcctgcacaaacatcatgaccaagaagcaaggtggggaggaaagggttttattcggcttacacattcacattgctgttcatcacaaaaggaagtcagtgctggaactcacacagggtaggaagcaggagctgatgcagaggccatggagggatgttacttactggcttgcttcccctggcttgctcggtttgctttcttacagaacccaagactaccagcacagaaatggcaccacccacaatgggctgagtcctctctttgatcactaggtgagaaaatgccttacagctgggtctcatggaggcatttcctcaagggaggctcctttctctgtgataactccagcttgtgtcaagttgacacataaagccagcctgtacattatctttagtgaactttctgaggtttttgttgttgtctttgcttttgttattttggatttattttttgttttgctttggttttggttggtttgttccgaagactgacttaaaaggctcaaatgcaaagtgaatttataattctagcaagcccctatcaaacacacacaatctaggtattttatttacaagttgtaagcctagattgggcagatttagagctattgtaagttattttccccagctataaagtcccttgttacttgtttcttttggtcacatgctcatggtctatatcctctcatgtggcctcctttctttttctccctctacctgcaactcaatcctcaagtcccacctttttccctccgctgcccgatcacagactctagccttttattgaccagttaaatgggggagcaagggttccttagcatcacttggtatgcatgagattctaacattgcaggcaaccatgttttgagagccagtgtttaacattagaatacaagcagcatcaaaccaacctactacactcagacacactaaatacgtgctataccactgagccgcagctgcagctgacatgtttgtgtgttgattgtggatgcccgtacgtgtggtttcacatgggtggagagagcagaggttgagttggttggccttcctctgtcgtttctaaaacagcgtctctgactgactgtgtgtcttgctgatcggctagactagctggtcaggaaacgctgcatgtcatcttctctccagcatgcctagctttcatgtgggtgctcgggatgaaactcgggtctgaatgtttactcctcgtgcagccctggctgtcctggaactcactctgtggaccaggtgggctgcaaactcagaaatccgcctgcctctgcctcccgagtgctgggattaaaggcgtgcgccaccacgcctggctagcctcaaactttttaaggaggcaaaaaaaaaccaaagtactatggaatgttaacatgtaggatgtgggtgtgtgagtagcttttggttggttggttgtttggttggttggtttggttaaatagctggatgtggcagtgcatcctgtgatgtaagctgctcaggaggtaaaggcagaaagattataaggtcaagttgaacaccttagtgagatcctgtctcaaaaagtaaaaagagggccaataaaatgtgacagggtggtagagcaccttaagttcccccggcaaaacacaaaacaagcaacacaagctagcagtgggaatggtcctcactttgtatctctagccctccagaggctgaaggaggaggactcaggacagcaccagcttgaactgcatactctattttctctttggttttgtgatagaaggaacagtgataccacacctggtcattggggtttactttgttatgttctatgtgccatgtctaaaatgcagcagtcctgtctgcagtgtattttagcattgacatacacgtgtcattttaagagacattcgaagctcagtaccaagatggatggttgatgtgtggttccacaaaaacagtttaaacagcaaccattggtttaccagatcaaaaaatagatgttggtaattgggtttatgttattatgtgtataggtgacacacctttaaaaatgtctagaagacaaggatggatcggggtgggaagataaaatatggagtgtaaaaaaattaattaataaaaaataataaagatgtctaaaaggcatatgtgcctgtgtgagaggatcatggcggcctgatgtcccactttgctcctctaaagtgctccttctgtgttttggaccccaggagggtgattggaggaggccagttgggctctcctgagattttcctctgagcactctagccgatgagggtcgtgcagactttgtgctgtacccatgtttactttatttattctagcacgtaacacagcctgctcgcccatggttctgggaatagcatacagaagaacccactgcccgtgtgccgagaggagaattgcgagaatgtgctggggccactcacacatctggtgtttgtaggaccttatttttaggaagcacagatatagtgtttccttgaacttaaaaaaaagaaaaagaatcatgtgaaggaattcatgctttgcaaagttaaaggtcttccccacccacttaagagcccctggggtcaaatttaattttcacgcctggataccagctctagcactgggctctgactaggacttttatccaggacagcccctggctggtccccacccctctaccttcctgtgccctggtgctatgtttttcttgtttgtcttctaggtactgcttctctgagatggccccagtatgtgctgtggttggagggatcttggcacaggaaattgtgaaggtaaagtcatcatgtggagctgacggctgacctcaaggccctgcccgcacactcacagagccaaggggtggcagacctgcttgctctctagcccctcaaccttgcatgccctggccctgtactcaggccatcatgggccagccagctagtggtcttggatgctgcctatagttgccactttgtctgctctaccagtcgtgtgagcaggtttccatctaagaggaaaacatagaaaagagatccaacagctatgaccctaaccgacatccgtcagagtggtgtcagggcaccctgtttattctgcatgctgtgagtatgtgtagaggagggttaagttcagtgtctataggacgcgtgatctaccagcagccacatgagtggctctacagtgacctgtgacctcctgttatggacagttaatgacttaaaagaagactaggtctaggaactatgtagcccttctagaatatttggtttactaaaactttttttttccttccctgccccgtcccctggtttgctaaaactatggcaaactttgaagtagattttatttcctttggagacttaaatatttgcccaactttcttaagtttgtcttatgcagggctagggtgtagctcagtgctagtgtttgtttagcatgcccaaggctcctaaattcagaaactttaattttgttttgttttgttttgttttgtttttgtcttttgagataggatcttattcgacaactcaggctgactcttggcctcctgagtgctgggaatgcaaacatgagccacacgacagctcttctgcagaagtgtctgtagtcatgtctcttgtggacagagacatggctggctggctgacttccacgtctcttcacgttcagactgaggagggcagtgtgtggagatactggttcttgctgctttgacttggggtctccttgaatcctgtagctttaccatctttttgtctcctttgctgatttgctctctggtctaaactcatttgcccaagtctccccacttctacactctagacagcaagggctggagaaacaggagaacctagaggctctgcagatgttgccctaatagcaccactccagagactcgcatggcactgtttgccctggggggaggtgaggttggagagtggaggctggggcaggtggcctggaaccattgttgatggtggcttctctacacatccctgtcttaatgctgccccctccttcctgcctgctgggtacagctgttgctcagcatcttgtttctgtttaccccagacagccagagcactctacattcttggttgctgggtgtgtttggaatctcgtaccccaacttgcttgagaatcactttaccttttgccccatgttcaccctctgccctgtcccttcatccctccactccctctgcttagcacactacagccagctggcaggaaggcctgcatctgaggccctcgctctgagcacctattaaaagtacttgggagcagttcgagggagagtgtgaaagtcccgcagatcaggttttcctcctccctccctcctttgtatccttctagtcgctcactgtctggcaggctttataggcttcagccatccctgtggcccatgagtttctgtccatggtggtagagggaagagtgaaaacagcagccatagcagacctcatattaaaactcaagttgagcccagcagtggtggcgcatgaatcccaacacttgggaggcagaggcaggcggatttctgagtttgagggcagccaaagtgagttccaggacagccagggctacacagagaaaccctgtctcaaaaaaaaaaaaaagggccaaaaccaaaaaactcaagttgagccagcaccttcagttgcagctgttcaggaggctggagcactgatccagggagcccaggagaccagaccagcctagtcagcagagccatgaaggatatagatatgggtcatgtcccctttggcttggaggctctgggagtgttgtctctatggcaccattagataatgctccttcccattgatgacaacagctcctgttactgagagatgtatcctgggagggacaaggaagggatggcagaggagttctgcacatgctggtgacccctagagcttaggtgggccagccacagttgaggagcactaaaccgttatacatggttggttggttggttggttggttggttggttggttggttggtttgtgacaaagtcctactgtttgtgtagcccacctgcactctgctggccttgtacttcctgagatgtgaatgccattccagggactaaactcgaatatttaactctgaagctagggaaaagcctctgtttaagcttggtcatgattgtgttgggcctcttgcttttttctctgtttgtttgtttgtgtgtgtgtttgtttgttataaatggtgtttttctagacatagtttttctctaggctaagctggcctggaactcaacatcgatccacctgcctctgcctcccaagtcctaggattagagctatgtcgccacctcccatcctaagcagaagcttttacccagagggctcttggcccttcctttgtcattttcattgtagtttttccctggcccacgttagaaggcccgtcaatgtggtggtcttctgtctctactctgaagctgagccctcttctcctctctccaggccctgtctcaaagggaccctcctcacaacaacttcttcttcttcgacggcatgaaggggagtggaattgtggagtgccttggtccccagtgagctgaggtgtgtacaaggccaccgagtcacctgccctctctccggatcatttttctagagcaagcaggccagacttcatcctgcctttgtcttcgaagctatcagggaactgcggggtcccaaatatgataatcacgtggcacctctggcattgctcccttgggctgtcactggggactggcagtgcctagtgagagagagcatcatacttcatgatgtcagagtgtcttgtcacggtttggacttaacttccctctatagtcagcagaggggatccgaggcccagtgctgcctggagaactgagaatagacctctgttgttgacccttcctcaggctggagcctgggtgttggaagggagagactgtcacccagttgtcatgtcttttggttgtgagcctatgcaccttacctttaatggttgaaccatcttttcagcccaaacagtttatttctaaaaagtagatttaatgctaggggccattatgcaggcttgtaatcctagatgttgggatgccggggcaggatttactgtaaatttcagggccaagttggtctacataatgtaccaagaacctttctcaaaatataataaagggcatattccagagttagggtggggcactgttacccagctccttatactgggcacccgggcccctgacaggagtgggttggggggcagttggtttggtcttccttctaggagtatgagggcagcctgtctagtttgtagatccccttggttgctggataaaggatgataataaagtgtctttctcttaaacttgcttgtctcctctgttttagaaacatgggtgggtagctggtgtcctattttccttaaacctgaaaagtctcacaccctcttatgcttaaaagattcctactgtctccagcccagcctccttgcttcctttgtccttttgataatacagcagttgcactgcagacaggacacatggatgcttaggctcctgcctgtgtgctgagggtctcagtactaacaggctgaagtcacgtgggtgagctagagcgcccagcttaaccatggtgggtggcacactcctgtcctgtctgcacctaggaggctgagacaggaaggtcacaagttgaaagccagcccctgctgtgcagcaagttggtgaggtggaaagcagaatcctatggctataagatagggcttcccctgcaataccatcagctccagttattagtccccctgtgctctagttggtgcaagacacagttctcacccgtgtgtccccgtatccatcccaggtgcagtggaaccctttctgggcgtcattaacacagctgtagcactgggatcagcagccctgtggatttctcgggtatgaaaggccaaagaagtcacctttctggttgcagtgtgaagtcttggtcacaagggggagcagacactcctaacctacgtaaaacaagctttccatctggtgcctctaggtcacaggctgagtcacccagagggcctctgaggaatctggccgctgccagtccagattacaagtaccctacagataggaagatccctacgtgtctgggaaagccagtaaagtaatggcttctagaacctctgcaaggtatacagctctgtggggacagaacttatcctcagaggcataggagtcaagagagcagggcatgggggtgggctgcccagaggcacagtacctccagtccacccttctcaaagcgtgctggagagtgggctgcacaaaagacaaacacagttgggcaggctatcccctgcctgtcctcccagcatgcaggaaggggaggcaggacaggaaatccaggacagctaggactacatagaccttgtctcaaaccaacattcataaagcagtaactcacttctgtgctcagtcttacctacttttttaaaaaagttgaatgccagccgggtgtagtggcgcacgcctttaatcccagcactcaggaggcagaggcagacagatttctgagttgaggccagcctggtctacaaagtgagttccaggacagccagggctacacagagaaaccctgtgtcgaaaaaccaaaaaaaaaaaaaaaaaaaaaattgaatgcatttcttcaagtatgggtgttaagtgtgtaagtttacacactgcacttctcatgctgaggtcagagagcagacttagggtttagggtgctgctgacaaggtgatccacaccttaaatccgaccactctggaggcagaagcaggtggacgtctgtgtttgaggtcaacctagtctacattgtgagagttcggggacggccagggctacacggtcagaccctgtatcaaaaacaagcaaaaccagtaacataatgcttctgcagttgctctggggatacttatgttagactttcatagttatgaccggttattattttcatttgaaaattaaacataagaagataagattatgtgtctagtcttgactctcaacttgactacatctggaattaactgaaacccaatcacctgggttacacctgtgagggttcttcttaacgcatgggaagattcctcctgtctccagccccgcccccttgacatgggaagacccacccgccttcatctgggccatacctagtagcaaggatgggtggaaattcttccacgttgggtgttctgggagtcaagtcagatggagagcgcttggcctaaacagtctactgtctcggtcattccacagctctctctgctatcttcaaaggcttctctgctgacgctcagtgtgctagcagtgtatgcctatattcccaactgttgttgggccaggaggatctcaagttcaaactcagcatgagctaaacagtgagaactcatctcaaagaataaacaaggaaaaaaaaccctcagtgcatcaggcagcctggcagcctgttagactcataatcctagcagctgccctcatggctgaactcaggattttggagagaaacgtgagatgctttttggatgtgttggctgtatccactttcccccccccccccgaggtcaccctcataagtcttgagagggaagctttccagatggccaagttccacccagactcagctatgtagatgtatgtccaccatggacaagtgaggttttttaaacctcctttacacagcttgtgtttaagaataatatgttgaaaagtcagtcggtgttggcgcactcaggaggcagaggcaagcggatgtctgaatttgaggccagcctggtctatagagtgagttccaggacaacttggacaactgttacacagagaaaccctgtctcataaaaccaaacaagtaaaagaatatatgttagggccaacaacatagcccaacagctaaaagttatgtgctgctaagctgctgagttggggtccctatgccaggtgggggtcggtcaaaggattcaaaggagtcctatgtgggttacagggatcacctttacccactgagccatcccactggccccacttaggtgaatatatattttaattttttgtgtgtagtagttatgcctgcatgtatgtgtttatatgtactacattttgcctggtgcccacagaggccaggacagggcactggttcctctggaccttggagttaaatatctttgtgaaacaccatgtggatgctgggatccaaaccccggtcctccaccagagcaacaagaactcttaactgctgagctatctctccagccacagtgatattttgtttgttttgttccttgtgttttggggacagtgtttctctgtgtagccctagccttcttggaattaaatctgttcaggctggcctcgaactcaagaaatctgccttcccctcagcctccctactgctggaattaaagacatacaccacaatcacctgacactgccccccacaccacaccctacacactgggataatttttaaggaggaaataaacttgtaggcaaaagtccatctttctccaaagcagccatggcaggatggggacatgtagagaggagaggtgctgagccccttcatgggaaggtgtgggcccacttaagttcctgcatcccttgggcagaggccatgatggctgcagctgcttccttttctcttgggtttatttttctaggagcctgttggatttgtacagcatagcttcttgctataagtatccctgcgtctttgatgcaggggggaaattttctacttcagtgtttggatctgggaaaagaaggcaatcttgtggctagagagatggggttcagttcccagtacccacacggtgggtcacaaccagttgtaactcaaagggatccaatatcttctatcttctgcaggccccaagcatacatatggtatacacacatatatggggaatcacacatacatgtagaataagaacaaatctttaacaaaggaaaagtagactgggcaggggcagaggtaggcagatctctactaagtagcaagttgaatgtaagccagggtacatgagacttaaaaagttgagccgggcgtggtgacgcacacctttaatcccagcaccccggaggcagaggcaggcggattcctgaattccaggccagcctggtctacaaagtgagttccaggacagccagggctatacagaggtacactgtctcgaaaaaacaaaaacaaaaacaaaaaactatagtaaatggattggttcccggtatacccagaatcagcaacacatggtataaattaaccaaatgaatattctagagctggaaatgtacgcaatagacgtaatataatggaggtgagaaacattgaatcgaaaacacagtaagaaattttgcagccccccaaaaagtttgaaagattgaaaaggttgagcaaggtgactcagcgggtacaggagcttcctggagtttgttccctaggacccatgcggtaaaatacaaaccctgaatttcacaagttgttctctgtcctacacacacacacacacacacacacacacacacacacacactcaaagatacatacatacatatacagacataggtacatatacatatagacacagacacatgcatatacacaccaatatatacatgaagtatacatacactgtgttaaaaacttcataacctcttgtgagaaatgatctcaaggtctgaactatggtacacaaggcttcatgctatataaccagaactttactgcccacccacaaattattcaaattataaagctaactaagaggcaaatgtgttggctcaaacctatgaacctagtactcagactcaggcagaaaatggaggactgagggagggtggagcacacttttaatcccagcacttagaaggcagaggcagatgaatctataaatccagcctggcctaaaaaatgagttccagggggctggagagatggctcagtgggtaagagcactgactgctcttctgaaggtccggagttcaaatcccagcaaccacatggtggctcacaaccatctgtaatgagatctgacgccctcttctggtgcatctgaagacaactacagtgtacttagatataataataataaatctttttaaaaaaaatgagttccggggctatatcaagaaaccctagccgggcgtggtgacgcacgcctttaatcccagcactcggggaggcagaggcaggtgaatttctgagttcgaggccagcctggtctacagcgtgagtttcagaacagccagggctacacagagaaaccgagaaaccctgttttggaaaacaaacaaaccgaaaatggaagactaagttagtgtggatatagtaagtcggaagccagtctgggctccagagggaaatcatgttccaagttggtatgcatgtatacatatatgtatgtgtgtgtatgcatgtgtgcacatatgcccctatgtgtgtagtgagcatgcgcacacacatgcatgcacatgtattggtttgaatggattctccacaggtttctgtctgtggacgtttgctccttggtggcactgtctttggcactgtaaaagtgtggctggtggatgcgctgtgtttctgggcagggtgctctgaggggtccctattccctgcttctagcctgatctttctgctcttgtgctgctagagctgtgagcagccagacaagcaatcaaatgtccagggctgcctcctccagtcaacaggatgggcttgacccttaatggcgagttgagaggctggcgtgtggctggcatgcacaaagccctgggatccattgccaatgctgaggaggggaagcaggaagattggggattgggtgttcaaggccatcttgggctaatcgaaacttgtctcaaaagcaaaaaagagagggcaagcgtctgtaaaactacttaaaatgctgaagggagagttggggtatagcttagtgacttagcacttgcctgccatgggttttatggttgccccataaaacatgaataagaccaggaagttggctctgtgtgggtaaaactcaagcctgagtttgaatccctggatcccatgtgaaaggctgggtgtggctgcctgtgcctgtaaccaagattgatgatgagggcagatcgccagagctccatgagaaaatcctgtctcaaagcaggcatacctgcacagtcaccaaggcaccaagcaaaatgtaaatgagccagtggaaggcaggggaaaagactttaccctcgctatcttacagctcaggctaaaactcttccttccttccttccttccttccttccttccttccttccttcctttcttttctttctttctttctctctctctctgcctctctctctttctttctttctctctctctctctcttttttttttgagacagggtttctctgtgtagccctggctgtcctggaactcactttgtagaccaggctggcctcgaactcagaaatctgcctgcctctgcctcccgagtgctgggattaaaggcgtgtgccaccatgcccggcaaaattcattttttgtatctccatgttttgtccactgtaggtttgtctgggcaccatgtgtgtctagtgcacagaaaagccagaagaagacatcagttcccctggagcggatgttatcagctgccctgcaagtgctgggaactcaacctaagccttctccaaaaaccaggagtactgtgaagcacctggccgtctctccagtcaccaacaacaacgctgcttgttagcaaatattttggtagcagcaacaagaaattgcctaatataaggtctcacccatccctggactgcccttggactcctgatcctcctgccgccgccaccccccacccccccgccattccccaagtactggaatttcagacaggtgttagcaatctggcccatacaatacttatgaaaattaatcagttaaatcttattaaagatattaaaaatattaaaggaatcaatagttttagagacacagtgcttctgtggatggaggtcagaggacaacttgtagagaatagttctctccttctataatatgagtctgggggctgaagttaggttctcatgcctggtggcaattaattagtcttggcacttccccccacccacaaagtttctctctgtagccatactcggagatctgcctgcctctgcctcctgagtgctgggattaaaggtgtgtgctaccacatcacaccccagacttggcactttttttttgttttgttttgttttgttttgtttttgtttttgtttttgtttttttgagacagggtttcccttatagccctggctgtcctggaactcactttgtagaccaggctggcctcaaactcagaaatctgcctgcctttgcctcccaagtgctgggatcaaaggtgtacgccaccactgcccgtcgacttggcacttttgagaactgctgtgtgcacagtacacttggactcttgaacacatatatgttcttctcgtggagatgcttcggagggcagtggatatggcttcatcagattcctctcctctatgcccacagccctctagaagatccacttcccctaaattgctttttactgtcactggccaccaggaagggatatactacatatctgcctctccctgaagtcattacaaagctggcacttgagtgggttcaaggactgccaattctcagtcagttagtaggaaaaactctcctttctcaaaataatgcaaagtgggttctgaggctgtgctcagcatcgagagctggccatgtacctagccttaggacaatggtgcaaggaatgtctagttctgatcttagctccaggtccctttccagccagagagcaacctgaggctggtcacagggccaggctagaccccatgtcattcaggacagagctcacaatctgtaactcaagctcttgaaacagtagcttctaaactataagctattcgttcgtttgtacagtaaatcttaagcttagttacactcttcatacctgatgaaataagtacacatgaagtattagtccctgtgtgtgcttgctctcaagactacagcagtggctgccagctctgtgtagctacaacttctgtgcctctttcatcccgccttccttttttctcttggtataagtaactgaacccaggactttgtgctcagttgagccacacctccatatcctactaggcaggggctctaccactgagcaatgctcccagtctttctactgtttttttgtttgtttgtttgtttgtttgagacagggtttctctgtgtagccctggctgtcctggaactcactctgtagaccaggctggcctcaaactcatagatccacctgcctctgcctcccaagtgctgggattaaaggtgtgtgttaccacgcccggctttatttttaaattaattgtatatgaagtttgtatctatatgaaagcctgcaggccagaagagggcattggataacattatacatagttgtgagccaccatgtggtagctgggaattgaactcaggacctctggaagaacggctggtgctcttcacagttgagccacctccctggcacatttacctattttatgtgcatatgtgtttttggggttttgggtttccttgtccgcatggaatgggccctgtgcacatgcctggtacccgcaggccaggaggtatcagatctggaacttgagttacagagtgtgagctgcagcatgggtgctgggacctaaatgcagatcctcttgaagaacagcccatacttctacctgctgagccagcgctccgcctgtcccctccacctgtcccctccccattgctgagactgggtctcagttgctcaggccttccaactagctacgacaggcctgtgccaccagaccagcctctagcttaccttttagtatgactgccccttaagagtccaaaagttccagtttctttctttctttctcttttttacatttatttattgttatatgtaagtacactgtagctgccttcagacactccagaagagggtgtctgatctcattatgatggttgtgagccaccatgtggttgctgggatttgaactcaggacctctggaagagcagtcagtgctcttaaccactgagccatttctcacacacacacacacacacacacacacacacatacacacacacaccgtttctttcatgtcctcacaggtagtgccagatgctctgtcactggtaaagctaacaaaaagagtgttcactgttcaatctgattttattgaaaaggaaacatacaaaaatcatgtacaaaaaaaattaaccaaacatgtacagaaaattcattccagtatatctacagcagtgcatgtacagtatcttacaggctgggccgtccctccccgctcccagactcctccctcttctgagacttcccccctccctgactccccatcttcctccccagcgctttgccctggggactaaggctggggtggcttccgccaatatctcccaccccccaaatgaatgccagtggtcacacgtgctctctctaaacctatgcaatgagatggatggggattgggggggtggggtggtcccgggcagagcacaggattcacagtctggacccctcctggacacccccagatgaaggtgaggcaggcatcgttcaccgcccgccggcggctcagggaagatggctgggcactgggttaagaaggccttcacacgccccccattctctggctccaggaggctagtggtcaggtttggctcatatgctcttcacagaccccctcctcaggaggagggggggaagcaccaggggcctgaggccaggcccaaagtgaaggcgcactggggacacccccagcgtcccccctgcagctggaacgggcagccagcaccagcagcctttcctgagatggtggtgggcggcagaggcgggcggctcggtccccaccccctcagtcaccatgagtccttcagccctcccttccctggctttcgggaggccagggtccccccaagtccgtatctccatcagtgcacccaggctgcccgggctcgagtggcatcccttgcctgcccctgggacgggcaaggctggcagtccagtatgctacatggtgcagaaaaagtcccccgcgctggccagggtgtcagaaggcggagggggtcctgccccccaagtctccgacgtcccccgggcgggtgtaggcacctagttgggctccatttctggggctccaggatccctgggtaaggggaggagtcccatgaagagattgtacatgaccctccagggtgagggtcggtgtcgatgctgctcttcttgtctctggggagaggaggaagtaggaattagcttggacccgcagacagtgggttagtgagcaaaaggtgtgggttcgagatcggtcccaaaactgagcgcaaccctcttaccagccatttttcagcccctcactcaccagggcacactctcccaacctaggtgggaaggggctggggcagaattcccatagcatagagcctagcacacacaccctacgaatcacaagggctctaaggggtgggctgaaacgcagcccactcaaggtgagagacaggcgtggtggctcgaactcatcttagtgtgcctcactaaatttgtgctagagcacaggctcctaactggaaaaatcaaaccaaccaaacaaaaggctgttgggacatgggagagagtaaggagcagcccgacagcctaagcagttctcaaaccaccccggaagagtgttgagaacagcaggccatgccagcaaggctgagagaaggtatctcttggcaatgctggcttcagggaaactcttgttcgatccctggtggtagagaaaaagtgtgatgtagcatctagatttcttctgtgatggcacaggcctgtaatcccagcgactcaggaggctgaggcaggaagacaaaagttcaaagcctgtctgagctataaagtgagttcaaagccagtgtgaacagcttattaagagccagcctaaaaaagaaaaagaaaaagaaagaaaaggaaagaaagaaaaaaaaaggaaaagagaaaaagaaagagagaaagagagagagagagaaagaaagaatgctgggtgtggtagctcacatctttaatcttagaacttgtgaggcagaggcaggcagatctctgagaattcaaggctagcatggtggtctacatagtgtgttctaggacagccagtgttggaaggaaagaaggaaggaaggtaggaaggaaggaaggaaggaaggaaagggagggtgggagggagagtgagagaaagaaagaaagaaagaaagaaagaaagaaaagaaaagaaaagaaaagaaaagaaaagaaaagagaaagaaaggaagggagaaaggaaggaaggaagaacggaagagagagagagagagagagagagagagagagagagagagagagagcaagcttttatttggtccttccactggttatggccaagcagatccaccgggctcatgttcttggttgtgaagaatgtaatccatttggaagatgtcaggctaatgaccctattagagtacatgcccagaactagcccaggcctcctgtgccctcctcctccttgcaactgggcgaggtggtggatgccaccttgtgagttcactatcattatacttagcctattagggggagcacggagccctgggtgttcactctgaagacaacagcacatgggccaagccagagatggccatctcttagaaaagaggagaaaacactaatgctagacaatgtttgctgctaagccacaccttttgccactcactggtggattccaggcatgtgttttaaaaaaaaaaaaaaagctcagctgagtggaacctttaagcccagcacttgagtgggggaagggcaggaggagagaacctctgagttcccggccagtttgcctagtctacagagtgagttgcaggacagccaggactacacagagaaaccctgtcccgaaaaaacaaaagaaaaaaaaagaaaaaaatcttcctgtttttgagacctcacctcatgtcgcacaggatgtcctggaactgaaactgtatttgagggtgaccttgacccacagacctaagggtcagtgtctctctcctaggcaagcactctaccaactgagctacatcagcctcccctgaattataaataagtaaataaataaaacttaaaaaataataatatgtgggctggagagatggctcagccgttaagagcactgactgctcttccagaggtcctgagttcaaatcccagcaaccacatggtgactcacaaccatctgatgctctcttctcctgtgtctgaagacagcaacagtgtactcattaaacataaaataaataaatctttaaaaaacaaactaactaacaaacaaactaatgtgtacgtgctggcaaataccagaaggcattggatccctggacctggaattacaggcagttgtcagctgggaacctgaccctggttctctgtaagagttctcttaaccattaacgtgtgtgtgtgtgtgtgtgtgtgtgtgtgtgtgtgtctgtgtgtgtatgagaaagagagagagaggggggatctgtgtgtgcacatgtggaggttagagaacactatgtaagattagactcttgacttttactaagtgggtcctgggaatcgaactctgttcatcagttttggtagcaagcacctttatcctctgagccacttcaaagactatttctgaagcagaatatcactcactaggttgcccaggctggctttgaactttctttctccctccctgagtaggtgggattacgggatgctgccaccgggccatgctacttgcctagtctctaggatttgctcagtggtaaccaatgaaggagatggaggactttggaaagccatagttagaaggcgcgccagagccaggatgggagctaaaaacaacgcccctggctgtgcatgtaagtgggtgcaaaaaaaacacctgctgggagtgagtcgctgctgggaggatgtcccttttacaaaaggtaggcgacagggccagggagcagagtgagggacctgtacccatccaacgtcagtggggtgcgcctctctctctctctctctctctgttgaaatcagcaaacaatgcaagggccatgtgcagagtgcacagcgctaggggcgggaaccgggctctgggggtttcatggggggctccgatctaggagcaccaagtggcgggcccgagccagggaggtgccggcgcgaagcagccggcgggaggcgctgcggggcgcagttcggcgggggcgggcgcggcgggcgcggcgcgttgctgactcaccggctataaatagcccgggatataggagccgccgcgccgagcgccgccctcagtccccgcgaccgcgggctccgagtagctttccccgaccctggctaggggctccagtcctgatctggcccacaccggatcccagcatccagcagatccattccttcccccacacccccatctgcttgtccctggcgcgacctcgcgcgcgctgggccagcagctgcagcacatctggcggggtgtgcagccccctccccacctgcctgccgccccgcactcacccgccgctcgtactgcgcgttgaggtcgtccgccatccgccgcagctgggccccgatctcccgggcccactcctcctcctccacacgcactcccggggcagcttgggtggggcctcctgccagggcctccggggcgctgggcacgggcgactctaagtgctgctgggctggtgacagggagggctgaggacctgggtgaggggaaaggggcgtggtcaccatccacccagtctgcccggaggcgcccaggagctacactgtgctttcttctccactcagccatagaaattccctttttcccactctttcccacaggccctagaaaggggtcttacggaagtggctctggggtcacctggatggtcaattacccattaaagctcatatgaatgtggaagtccctcaacttatccgacctaagtacccctattttaatacagggtcaaatctagcctgttctatttgacagacggggaaactgaggctccacccatagaagtgaccaaggtcacacggggataccgccactgaccccacccagtcactaccctcaggtctccagctcactcctgcccaaccacagtgaggccacacccccggatgtggcattggcctgatgaccagaaggccaaactgggactaacccaagaggactagggtttgggtgagggtggcaggggtactgggttagactttgtgctccaccccctctggcactcatccttgtgcctcggtcctgtcacactagatcctgagcctcagtttccattatctctgaacctagtcctgaaacgcagggaaagttggaaagtttttctctcttcatggggaggtgggggcaaatagaaagggaaacccagatggtcattccccgtagccgggcaccacagggttaacagcccatcaggcgagggacctttaacccttccctccctgagcctcaccctctccccgagggggactttcccaacacaatggcccctccccctctccttcctcctgggggactgcggactaaccctgccagtgccaaagagattcaaataaaagggtaaggcctccgacccctccccaaagtcctgaggtgacagtcctcccactggccacactccttcccactgcaatcctcatgggggtggggggcgcccagggacccgggctgggggaggggagctgagaaacagctgttgcccgaggcccgggaagggacgtggactgcaactccggggactgcagtcagattctaagagggacttcccactcgacttggcccctccatccatgtctcccactctgtcttcctggttcttgctacacaaagaccacactggccacaccctcccggtggccccactcagctccactcccgcttcagcttccccgggtgcggggcgggcactcaccgtccgggcgcgggcctctgggccggctgcggtgacccccaggccagcgggggccccccagggcggcggtgacggcaggtggagcggtgggggcgcagaggtaggcggccggcagcaaggcaggggcagcaggggcggcgggcaggccgggctcgcaaaggctgcaggatacagcggagggcatcaggcggccgagcgggaaggggcgcggactgtcgcgggctagaccctctacgggctccggagagctgccctcctggcgtgcgcgggccatggcgctccctggagcctgcgggacacggcgggaggtcagtggggcgactgcggggggggcctgcaggaccccacctcgcagacaccctgcctggaagtcactcccacccaggaagggatgaccccagggacagcctggccgggacacatggtgaggggcgcacagactgcgtctggggtttgtagcaaaacccaccaggaaaactgcctactactctcagggcttgggccagggagaactttctcaacagagaagagcgcagaaggggtgctggggctcccaggatacacggtgctgtcagagaaccgtgtgtgtgtgtgtgtgtgtgtgtgtgtgtgtgtgtgtgtgtgtaatgggaagacaccagtgaactcagagaagtgtccaactttaccgcccctcccgctcccccagtgaggtggctcacccagaaacacatggggacacagacatgcacacacagccatccagagccctttcaacatatttacaccagtctcacactgacccgctgctgacatgccagcgctcacccgcccacaatgcagccgtcacacactgaagcacaacagactcaagtcttcaacgtgtttctcccgcatacacacagacaacccaaagacaccccccttactattccttagcacatgcaccaccatcatctcaaaacacacctgaatgtgcacccccccccaactttgagctcctgggacacaacagccacacatagacacaagtcatcatatccagatacatcatcccccctcgtgtgcggggcagccacatcgggaggcaccagccgcagctggtagaagccataggtccagcctctactctcagccccaatacaccacagccaactgtcagccccagaaaacacacacacacacacacacacacacacacacagagcccagcagcacacacacctaatgcagagacagaaaacactggcctcacgtgactgctataaacactacagagagagagcaccacatgacacatagcctggatcacagagacaaacccctcagacccaaaactcactctcacccccccctctctctttctcacacacacacacacacacacacacacacacacacacactgcatgcagagagaggggctggcactgaacccgctagatcccccccacccccaaagcccttcatgctcagcgtgccttgtgtgccttttgctgctcagaagtcacccagcgagcgatcaggcactgggtggcatcccatcccaaaagctgggtacagcagatgcttgtcttggagacacccagagacagcacgcgcgcgcgcgcatacacacacacacacacacacacacacacacacacacacacacgcagcgcacacttgggcgagacccctgcacagcaacacagctcactcaagcgacacacaaacacagctcaagtgccccggtcgtccgcaccaccaccaccaacactaccaggcaagcgacagatacagatccccttttcaccccttaagagcacacgtatacaactctggtttggggggtggccacccacacccgtaaacggacaggtgcaccccaccccgcagacacgcgggcaaggactcacgcagacacccctccgggtgacaaacgccaacatctcggtgtagggatac

SEQ ID NO: 915 - DNA, 1452 bp, Mus musculus
caggcgcggctctctgcgcaggcgcaagcgcgtccccggtgcacggactcgctgctggcggttagcgagagcgggagcgggtgagctgaaagccggcgccatggtagagaaggaggaggctggcggcggcggcggcggtggcatcagcgaggaggaggcagcgcagtatgaccgacagatccgcctgtggggactggaggcccagaagcggcttcgagcttcccgggtgctgattgttggcatgaaaggacttggagctgaaattgccaagaatcttatcctggcaggagtcaaagggctcaccatgctggaccacgaacaggtatctccagaagaccctggagctcagttcttgattcagactgggtctgtgggccgcaatagggccgaggcctctttggaacgagcccagaatctcaatcccatggtggatgtaaaggtggacactgaggatgtagagaagaagccagagtccttcttcacgaagtttgatgcggtgtgcctgacttgctgctccagagatgtcatcattaaagtcgaccagatctgtcacagaaacagcattaagttcttcacaggagatgtctttgggtaccatgggtacacctttgcgaatcttggagagcatgaatttgtagaagagaaaaccaaagttgccaaagtaagccaaggagtggaagatggacctgaggccaagagagcaaagcttgattcatcagagacaaccatggtcaaaaagaaagtgcttttttgccctgtaaaagaggcgctagaagtggactggagtggagagaaagccaaggctgccctgaagcgtactgcccccgactactttctgctgcaagtgctgctgaaattccgcacagataaagggagagatccgacttctgagagctacaaggaggatgcggagctgctgctgcagatacggaatgacgtgtttgactccctgggcatcagtcctgacctgcttcccgatgactttgtcaggtactgcttctctgagatggccccagtatgtgctgtggttggagggatcttggcacaggaaattgtgaaggtttgtctgggcaccatgtgtgtctagtgcacagaaaagccagaagaagacatcagttcccctggagcggatgttatcagctgccctgcaagtgctgggaactcaacctaagccttctccaaaaaccaggagtactgtgaagcacctggccgtctctccagtcaccaacaacaacgctgcttgttagcaaatattttggtagcagcaacaagaaattgcctaatataaggtctcacccatccctggactgcccttggactcctgatcctcctgccgccgccaccccccacccccccgccattccccaagtactggaatttcagacaggtgttagcaatctggcccatacaatacttatgaaaattaatcagttaaatcttattaaagatatt

SEQ ID NO: 916 - protein, 328 aa, Mus musculus
MVEKEEAGGGGGGGISEEEAAQYDRQIRLWGLEAQKRLRASRVLIVGMKGLGAEIAKNLILAGVKGLTMLDHEQVSPEDPGAQFLIQTGSVGRNRAEASLERAQNLNPMVDVKVDTEDVEKKPESFFTKFDAVCLTCCSRDVIIKVDQICHRNSIKFFTGDVFGYHGYTFANLGEHEFVEEKTKVAKVSQGVEDGPEAKRAKLDSSETTMVKKKVLFCPVKEALEVDWSGEKAKAALKRTAPDYFLLQVLLKFRTDKGRDPTSESYKEDAELLLQIRNDVFDSLGISPDLLPDDFVRYCFSEMAPVCAVVGGILAQEIVKVCLGTMCV

SEQ ID NO: 917 - DNA, 1936 bp, Mus musculus
caggcgcggctctctgcgcaggcgcaagcgcgtccccggtgcacggactcgctgctggcggttagcgagagcgggagcgggtgagctgaaagccggcgccatggtagagaaggaggaggctggcggcggcggcggcggtggcatcagcgaggaggaggcagcgcagtatgaccgacagatccgcctgtggggactggaggcccagaagcggcttcgagcttcccgggtgctgattgttggcatgaaaggacttggagctgaaattgccaagaatcttatcctggcaggagtcaaagggctcaccatgctggaccacgaacaggtatctccagaagaccctggagctcagttcttgattcagactgggtctgtgggccgcaatagggccgaggcctctttggaacgagcccagaatctcaatcccatggtggatgtaaaggtggacactgaggatgtagagaagaagccagagtccttcttcacgaagtttgatgcggtgtgcctgacttgctgctccagagatgtcatcattaaagtcgaccagatctgtcacagaaacagcattaagttcttcacaggagatgtctttgggtaccatgggtacacctttgcgaatcttggagagcatgaatttgtagaagagaaaaccaaagttgccaaagtaagccaaggagtggaagatggacctgaggccaagagagcaaagcttgattcatcagagacaaccatggtcaaaaagaaagtgcttttttgccctgtaaaagaggcgctagaagtggactggagtggagagaaagccaaggctgccctgaagcgtactgcccccgactactttctgctgcaagtgctgctgaaattccgcacagataaagggagagatccgacttctgagagctacaaggaggatgcggagctgctgctgcagatacggaatgacgtgtttgactccctgggcatcagtcctgacctgcttcccgatgactttgtcaggtactgcttctctgagatggccccagtatgtgctgtggttggagggatcttggcacaggaaattgtgaaggccctgtctcaaagggaccctcctcacaacaacttcttcttcttcgacggcatgaaggggagtggaattgtggagtgccttggtccccagtgagctgaggtgtgtacaaggccaccgagtcacctgccctctctccggatcatttttctagagcaagcaggccagacttcatcctgcctttgtcttcgaagctatcagggaactgcggggtcccaaatatgataatcacgtggcacctctggcattgctcccttgggctgtcactggggactggcagtgcctagtgagagagagcatcatacttcatgatgtcagagtgtcttgtcacggtttggacttaacttccctctatagtcagcagaggggatccgaggcccagtgctgcctggagaactgagaatagacctctgttgttgacccttcctcaggctggagcctgggtgttggaagggagagactgtcacccagttgtcatgtcttttggttgtgagcctatgcaccttacctttaatggttgaaccatcttttcagcccaaacagtttatttctaaaaagtagatttaatgctaggggccattatgcaggcttgtaatcctagatgttgggatgccggggcaggatttactgtaaatttcagggccaagttggtctacataatgtaccaagaacctttctcaaaatataataaagggcatattccagagttagggtggggcactgttacccagctccttatactgggcacccgggcccctgacaggagtgggttggggggcagttggtttggtcttccttctaggagtatgagggcagcctgtctagtttgtagatccccttggttgctggataaaggatgataataaagtgtctttctct

SEQ ID NO: 918 - protein, 350 aa, Mus musculus
MVEKEEAGGGGGGGISEEEAAQYDRQIRLWGLEAQKRLRASRVLIVGMKGLGAEIAKNLILAGVKGLTMLDHEQVSPEDPGAQFLIQTGSVGRNRAEASLERAQNLNPMVDVKVDTEDVEKKPESFFTKFDAVCLTCCSRDVIIKVDQICHRNSIKFFTGDVFGYHGYTFANLGEHEFVEEKTKVAKVSQGVEDGPEAKRAKLDSSETTMVKKKVLFCPVKEALEVDWSGEKAKAALKRTAPDYFLLQVLLKFRTDKGRDPTSESYKEDAELLLQIRNDVFDSLGISPDLLPDDFVRYCFSEMAPVCAVVGGILAQEIVKALSQRDPPHNNFFFFDGMKGSGIVECLGPQ

SEQ ID NO: 919 - DNA, 99787 bp, Homo sapiens
ctgagaccacaggtcgtgccaccacacccagctgtttttgaatttttggtggagatggagtttcaccatattgcccaggcgggtcttgaactcctgaactcaagtgatctgccttcctcagactcgtaaagttctgggattactggcatgagccaccacgcccagcctggggacatttttttttttttttgagacagcgtcttgctctgtcgcccaggctggagtgcagtggtgggatctcggttcactgcaagctccgcctcccgggttcatgccgttctcctgcctcagcctcccgagtagctgggactacaggcgcccgccaccacacccggctaattttttttttgtatttttagtggagacggggtttcaccgtgttagccaggatggtctcgatctcctctcctcgtgatctgcccgcctcggcctcccaaagtgctgggattacaggcgtgagacactgcgcctggccttttttttttttttttttttgagacagagtctcgccctgttgcccaggctggagtgcagtggtgggatctcggctcactgcaacctccacctcccgggtccaagcgattctcctgcctcagcttcctgagtagctgggattacaggtgcccaccgccacgcctggctaacttttgtaatttaagtagagacggggtttcaccatcttggccaggatggtctcaatttcctgacctcctgatctgcctgcctcggcctcccaaagtgttgggattacaggcatgagccactgtgcctgaccagggacacattttaaaagttaaaaacatgactcttagccaggtgcgatggctcatgcctgtaatcccagctacttgggaggctgaggcaccagaatcacttgaacccaggaagtggaggttgcagtgagccgaaatagtaccactgcactccagcctgagtgacagagcaagactctgtctcaaaaaaacagaaaatgtatacgtgtgtgtgtgtgtgtatatatatacacacacacacacacacacacacacatatccctgttttatttcatttttattatggggtttttgttgttttctgtttttgtttttgtttttgtttttgttttgagacagtcttgctctgtggcccaggctggatcggctcactgcaacctccacatcccacttccaagtgattctcctacctcaacctcctgagtaactgggactataggtgcccactgccacacccggctaatttttgtatttctagtagacagggtttcaacatgttggccaggctggtctggaactcctgacctcaggtaatccgcccacctcagcctcgggctattttttattgaagaataacatacgtacagaaaaagcatataatcacaggtacgcagcttgacacatttacgcaaagtgaatattctatgtaaccagcagctaaatcaagaaacagaaaattataagcagagcagagtccccgtcctgttcccatgtagtcactggtccttctaaagcaatcaccattctaacttctagctacatacataaatattctcttaatttgtcttaattttctcataaaaatggaatccataatatgtactcttttgtgtctggcttctttcattccacattatgtttgtggcatgtagttatatttcattcattctcatttctctatagtattccacagtgtgactaaactaggtattacatgattatgtggaatgattggaatgctctgacaccgctgcaactttaaataaccactttgcgctgtgtacagtggctcatgcttgtaaccccagcattttgggaggccgaggcagaaagattgcttgagcctagaggtttgagaccagtagggcaacatagtgagtccctgtctctacaaagaataaaaaaattaacaaaccatggtggctcacgtcagcagtcccagctacttgggaggttgagggaggaggatcacttgagtccaggaggtggaggttgcagtgagctggaaaacaaaacaaaacaaaacaaaacaaaaaacagaaaagaaaagaaatagcccctaagtggccagatgcggaatcccagcgctttgggaggccaaggagggcggatcatttgaggtcaggagttcgagaccagcttgacctacatgtcagaccctgtctctactaaaatacaaaaattagctggacgtggtggtgggcacctataatcccagctcctcgggaggctgaggcaggagaatcgcttgaatccaggaggcggaggttgcagtcagccaagattgtgccactgcactctagcctgggtgacacagccagattccttatcaaaaacaaacaaacaaacaaaaaatgcccctaactgggaactgcttaaatgtccataataaaagaagacaggggccaggcacggtggctggtggctcatgcctgtaatcccagtactttgggattcctaggtgggcagatcacttgaggtcaggagttcgagaccagcctgaccaacatggtgaatatccatttctactaaaaatacaaaaaatttagctgggcgtcatggggcatgcctgtaatcccagctactcgggaggctgaggcgtgagaatcgcttgaacctgggaggtggagattgcagtgagctgaaattgtgccactgcactccagcctgggagacagagtgagactctgccttaaaaaaaaaaaaaaaaaagaacagtgtattgtactgcacgcacatattttgtgcatctgctgggttataagacctaaatggtagagtcatttgcaccacatcctggacaggctagagaatctcctcttgctctgggctccaccggccttacagttcacttcgctgatgagtgagagcaggtctcccggccatgatacaagctgcccccaaaattccaaagggctttttcttaccaccttttccatcaaaggatgggggtataggggatgaaagtttcagtagcttgccctgtatttagggaaaaaacaaaattctaacaaaactcttctcccggacctccaaaatatctctgggctggcaggtctctgtattttttttttttttattgaacttccttaaatgcacataagtcagctaatacttccatggtacctgtttctttctgctcttggtacatcgatattattattattataattatttaattattatgaaacaaggtcttgctctgtcgcccaggctggagtacagtggcacaatcacagatcactgcagcctccacctccttggctcaagtgatcctccagccttagcctcctaagtagctgagaccacaggtgcacaccaccatgcctgataaatttttttttttttttttttggagacggagttgccctctgttgcccaggctggagtgcagtggtgtgatctcagctcactgcaagctccgcgttccgggttcacaccattctcctgcctcagcctcctgagtagctgggattacaggcacccgccaccactcccggccaattttctttctttttttttttttttttgtattttagtagagacggggtttcaccatgttagccaggatggtctcgatctcctgacctcatgatccacctgcctcagcctcccaaagtgctgggattacaggtgtgagccaccgcgcctggcccaatacccggctaattttgtgtgtgtgtgtgacgcagtctcgctctgtcgcccaggctggagtgcagtggcgctatctctgcttgctgcaagctctgccttctggcttcatgccattctcctgcctcagcctcccgagtagctgggactacaggcacccgccaccacgcccggctaatttttttttttgtaattttagtagagacggggtttcaccgtgttagccacgatggtctcaatctcctgaccttgtgatccgcctgcctcggcttcccaaagtgctgggattacaggcctgagccaccgcgcccggccaattttgtatttttagtagagatggggtttcaccatattgtccaggctggtctcaaactcctgacctcgtgatccgcctgcctcggactcccaaagtgctgggattacaggcatgagccaccacgcccagccagaattttttcttttttctagagaagggggtctccgtatgttgcccagtctggtcttgaccacctgaccttcattgattttcctacgtcggcctcccaaagtggtgggattacaggtgtgagccactgccaccggccagtaattatgctgatgaaagacctgttttttctccagttcctgggatggctctagggagggttatttacactgtgagtgaggaggcattcacagagaagttcctccagagtgtggaagaagcactaccatttggcaccaacgcctggagaacaaaggaggagaccattggccaaagagaggcatttccattttgttggaacctgctgaccaccaacccatagcattttttccctttcttccttgctaatccaatcgcagattcattgaggaggtgagaggtcctgagatccaggctggaagaggagtgattggtctacctggttctcaagggataatgttgccccctagaggacattttggaaattattaaggaaaattaacgactggttttttggttgtcatctggttctcaagggaacagtattgcttccttgggagaatttggaaacttaccttttttcatcgtcacaatggtgaagggtttgttactgggattagaggacaaggaccagacatgccaagatgttctacaatatagcattcctaattaataatcacctaatgaataaagctcagatagcacttaaaaagtggggaaaggactgtttatactaaattatgctaagctgtaacactgaactattccagttcttttgaaattgtttacatagcaaaatcatagttgactcctggccatttaagacttatgccaccactcttgggatagtgaaaatgttttgcaactagattgaggtggtgattgtataatatggtgaaagtactaaaagccactaaattgtgcacttcaaaatgctgcctaattttatattatgtgaatttcacctcaataaaaatgtctttttttttttttttttgagagggagtcttgacctgttgccaggctggagtgcagtggcgcaatctcagctcactgcaacctccacctctcaggttcaacccattctcctgcctcagcctcgcaagtagctgggactacaggtatgcgccaccacacccagctaatttttttgtatttttagtagagacagggtttcaccatgttgaccagcatggtctcaatctcctgaccttgtgatccacctgcctcggcctcccaaagtgctgggattataggtgtgagcccccgggcccagccaataaaaatgtttttttaaaaggatgcatatttccaaacatgagactataccatcacatttaatttttcccagaaactataaaaagtagaagtgaagagaggaaagggagacacttttagaccttcaatgagtctgcaagtacaggagaaaataatttatgcagcaattagctttattttcagggctctttttcttttcttttttttttgttgagacggagtctcgctcttttgcccaggccggagtgcagtggcgctatcttggctcagtgcaagctctgcctcctgggttcataccattttcctgcctcagcctcccgagtagctgggactacaggcacccgccaccatgcccagctaattttttgtatttttagtagacacggggtttcaccgtgttagccaggatggtctcgatctcctgacctcatgatccgcccgcctctgcctcccaaagtgctgggattacacgcgtgagccaccgcgcctggccaacaaagtgatcattttacaagagttatggcatagtcacaggtaagaacctgggtcactgggtcactccctaaccaattacgaattactatatgccatggaccttcaggattactttcttttttgttttgtttttgtttttttttttgagacagagtctcgctctgtcacccagaccggggtgcagtggcgcgatctcagctcactgcaacctctgcctcccggattcaagcaattctcctgcctcagcctcccgagtagctgggattacaggcatgtgccaccacgcctggctaatttttttgtatttttagtagagaccgggtttcaccatattggccaggctggtctcgaactcctgaccttgtgatccacccaccttgacctcccaaagtcctgggattacaggcgtgagccaccgcgcccagcccaggattactttctttctttcttttgagacagagttttgctcttgttgcccaggctggagtgcaatggcacaatctcggatcactgcaacctccacctctcaggttcaagcgattctcctgcctcagcctcccaagtagctgggattacaggcatgcggcaccatgcctaaaattttgtatttttagtagagatggggtttctccactttggtcaggatggtctcgaactcccgacctcaggtgatccgcccgcctcggcctcccaaagtgctggtattacaggcatgagccaccgtgcctggcctctatttttctttctataatccatgtacattttcctttaataatataaggcaactaaacagcactttattttcagaggcttatctaaaagatacttgacacagccctttgcagctgggtcattctctgaattctaaatgtcgtttcctgcacaaagtggttatttgatcttgtaactggcattttccccggagattaggaagtggcacaccaaagtgcaaaaaactttggaatcagaactttaatttttaatctttattttatttatttatttatttttgtgacagagtctcgctctgttgcccaggctagagtgcaatggcaagatctccactcactacaaactccacctcccgggttcaagtgattctccgccttcagcctcctgggtagctgggatcacaggcgcacaccaccacactcggctaatttttgtattttgagtagagatggggtttcaccatgttggccaggctggtctctaactcctgacctcaggtgatcctcccgtccatgcctcccaaagtgctgggattacaggtatgagtcactgtgcccggcctaatttttatatttttttgtagagacggggtctggctgtgtttgacagcctcaaactcctggcctcaagtgatcctctcaaagtgttgggattacagacatgagccacagtgcctggcctattgaaagcttttccatcataataggtccttccccccaatgcttgcagcaagtcaatagtaggagaccccaggttgcagcagagaaagaggtttaatcataggggccactgaaaaccaagagaggagatggaaggaaccacgaatccacttccccagggagttcggggctttttaagggttttggagtgggttgaagtgtggaggtcattggttggttgaagtgtgcagggtgaagtaatgaaacagggagttgaagaaactctattctcctgtcgatttggttcctctgcggggtcttcacactggttggtatcagctgttttgctggaattcaggatctgaaaaatatcttaagcttttttttttttttttttttttttgagacaaggtctgttgtccaggctggagtgcagtggtgccatcatagctcattgcagcctctaacgcctgggctcaaaggatccttccaccttagcctcccaagtagctgggattacaggcatgcaccaccacacccagctaattaaaaaatttttttttttgtagagacaggggtcttgtcatgttgcccaggctggtcatgaactcctgacttcaagtgattttcctatctcagtctcctaaagcgcatggattacaggcatgagccaccatgccgggcgctaagcaattcttattatttatttatttatttatttatttatttttttctgagacggagtcttgctctgttgcccaggctggagtgcagtggcgcgaactcggctcactgcaagctccatctcccaggttcatgctattctcttgcctcagcctcctcagtagctgggactacatgcgcctgccaccacgcccggctaattttttgtagttttagtagagacaaggtttcaccatgttagccaggctgatctcgaactcctgacctcgtgatccgcccacctctgcctcccaaaatgctgggattacaggcgtgagccaccacctccggcctaagcaattcttaaataaaaatctatgattccgccaggcatggtggctcacacctgtaatccgtgcactttgggaggccgaggcgggtggatcacaagttcaggagttcgagaccagcctggccaacatggtgcaatccccgtctctactaaaaatacaaaagttaggtgggcatggtggctttttttttttttttttagacgggagtctctgtcatccatgctggagtgcagtggcaggatcttggctcactgcaacctctgcctcccaggttcaagcgattctccggcctcagcctcccaattggctgagactacaggcgtgtgccaccacgcccggctaattttttagtattagtagagatgggggtttcaccatcttggccgggctggtctcgaactcctgacttcgtgatctgccctccctggcgtcccaaagtgctgggattacaggcatgagccactgtgccctgccaaaaagcctatgattctaacatcagaaatccttccacctcagcctcccacgtagctgggactatagactcagtaccaccacaccaagctaatttttgtatttttaatagagatagcgtttccctatattgaccacctggggccatccctggttttttttttttttcccttccttccttcctttccctctctctttccctccctccttccttcctttctttctttctttcttttttttttttttttacagagtcttgctctgttacccaggttggagtgcagaggcatgatcttggcttactacaacctccgcctcccggattcaagcaattatcctacctcagccttccaagtagctgggactacaagtgtgagccaccatgccctgctaatttttttatttttactaaagacgggatttcaccacattagccaggctggtctccaactcctgatttaaagtaatctgcctgccttggccttccgaagtgctgagattacaggtgcgagtcaccgtgcctggcctattcctgttttcttaacgctcctctctcccactgggccgtgactgcctctaaggcagagatgtgttcatttttattattattgtatgtccagggctgggcacaaagtgcaacacatagtagggacatgaaaggctgggcacagtggctcatggttgtaatcccagcactttgggaggcagaggcgggaggatggcttgaggccaggagttggagaccagcctaggcaacagagggaccccatctctatgaaaaaaaaaaaaaaaaattgacagttcaatgtcacctctgataagccttccctgaccacccctgttactctgtagccccatgtcctgctttatttttctccaaagcatttatcatcgctgggtttatatttatttctcttcgggcttttctcactggatcgtaaactccatgaggacagggctttgtcgatttcactcaataccgttattttacaacatccctattgctgggatctcagtatgcactccttaaatatttgcagaatttaagtgccacataagtgaccacgtgggcaacgccctcggggccttaagccgcgccatttttggggctaggattggttggaccctccgtcacgtgacatgcagtcgccggatcgcctttgagtctcgtgaggtacttttggtcccaggctccgcggacgaggtactgcgcaggcgtgggagggtctgcgcatgcgcagaagcactccgggcgtgctgccggcggcggtaggtggcgcgcgggtccggcgggcggttggcttgagcgggaccggagctgaggcaggaagagccggcgccatggtggagaaggaggaggctggcggcggcattagcgaggaggaggcggcacagtatgaccggcagatccgcctgtggggactggaggcccagaaacggtcagggccggcgcggcttgaggccgcgagggtctggagggggcgtctattctgaggcgtttgcggcccggaaggagcgggaaggtgtgatttgaagggaggaggcgggaattctgtgctctgggatcgtctctctcttggggggactggaggagttgattggggatgtttctggaaggtctgggaagtggttgggagggccgttccgaaggatgggagctctgaagggggcgttggggagtcctgagagagcgggagaattcaaactcaggaaatccgaggcccgaaagcggtgattgtggggtttgatcgcggttaggggataagaggggctggggatacgtggaaagggtgaggtgagggacgcagttcattcattcgagggtatgggacctggttccgtgctgcacacaggggagactggactggccaaccggacagacgggagcttacactcttgtgggagctcacgggcgggccagtctgagagaatgcgggttttgaggagttttggagcaagttatctcaaatgggaatcttgagaggctcggagaggctggagggggacggccgtaggctcccgaaaaggttgcttgtgtttggtatggggctgtgtcttgataggacaggagacgtagtttgggcattgtggagtagcttagggaattctttttttttttttttttttttttgagatagtctctctctgtcgcccaggctggagggcagtggcgcgatctcggctcactgcaacctctgcctcccggattcaagcgattctcctaactcagcctcccgagtagctgggattataggggcccgccagcacgcccggctaatttttgtatttttagtagacacggggtttcgccatattgacgagactggtctcgatctccttacctcaagtgatccacccgcctcggcctcctgaagtgctgggattacaggagtgagccaccgcgccaggacgtcttttgttttgtgcagttgggtgacctcggttcactgcagcctctggcctcccgggttcaagacttcctctcacctcagtcttctgagtagctgggattacaggctcgcgccaccatgcctggctaatttttgtatttttagtagacatgggttttcaccatgttggccaggctggtctcaaactccggacctcaagtgatctgcccgccacagcctcccaaagtggttggattacagacgtgagccactgtgcccagcttgttttttttttttttctttctctgtggcccagtggagtgcagtggtgggatcacagctcactgtagcctcaacctccaaggctcaagggatattccctcttcagcctcccaagtagctgggactacaggcgtgccccaccacatcatccgactaatttttgtttttttttttttttgtaggatggggttttgccatgttgcccagactggtcttgaactcccaagctcaagcgatcctcggcctcaagagatctccccccatctcagactcctaaaatgctgggattacaggcatgagctaccatgcctggcctcattgatcaatatttttacttagcctggacgcagtgactcacacctgtaatcccagcactttgggaagctgagttggggggaggggacctcttgagcccaggagtttgagactagcctgggtaatgttgccaaacccagtctctacaaaaaaatacaaaaattagccaggcatggtgacataagtttatagtcccagcttgtcaggagactgaggtgggagcatcacctgagcccctgggaggtggaggttgcagtgagccatgatcacaccactacaccccagcctgggtgacagagtgaggccccgtctcaaaaaaaaaaaaaaaatccacaagcgtgtgtatatgtgtcagttattaaaggatggtgaagtgagagggttgttttgataggttggccagggaagggctctgaagaggtaacattgagcctcagacttatatgggaaagagccctgtggtcatctgggagaactttcctagctaagagaacagcaagtgcaaattcccagaggcccaggcatgattgtcaaattagagaaataaggtggcaggaaccaaatgatttgaggagtagcttttattctaagtgtgtgggaaaacctgttggagtgttttgagtgtgggagtaacatgatctgttttttgtttgttttttgagacggagtcttgctctgtggcccaggctggagtgcaatggcacgatctcggctcactgccattgcagtgaatccgcctcccaggttcaagcgattctcctgcctcaccttcctgagtagctgggactatcggcatgtgccacaacacccggctaatcttgagtatttttagtagagacggggtttcaccatgttagacaggatagtctcgatctcctgacctcgtgatccgcctgccttgggctcccaaagtgctgtgattacaggcgtgagccactgcggcctggcctggtttgtgttttaaaatgatcgctccagaataggttaaagtggtcagaaatggaagtaaagattctggctggactgttgcagtaatccagttgagataaaaatattggtggcttgaaactcaagagaaggggtcaaataaatatattctggatatattttgaaggtagaagagggaacagaatttggggcagaagtccaggatgacaccactgtttttggcttgagcacctacctggaacgatggaattgccattttgaaagatatggagagctgtaggtttggtggggtcggggaagagtcagttctcttttaggtttcagatttgttttttttgtttgttttttttttttttgagacggagtctcactctgtcgcccaggctggagtgcagtggcatggtctcggctcactgcaacctctgcctcccaggttcaagcaattctcctgcctcagcctcccgagtagctgggattacaggcgcccgccaccatgcccagctaatttttgtatttttagtagagacggagtttcaccgtgttggtcaggctggtgttgaacccctgacctcgtgatccacctgcctcggcctcccaaagtgctgggattacaggtgtgagccaccatgcccggcctcagatttgtttttttatacaactaagtagaaatatgtgaggggttgagttcagaggtaaaatttgggtgatggtgggtattgtgtgagtacagagtatagaattaatggaggggttggggaggcagacacgtcaggagaatttagtttgagggggtgggagctttcagaaggttttagagggtgcagtggtgggatgggaattacctcaggctcatttcagatctgtggggtcttctttgatggggtggggggatgtcatcatgaggcattaacattggtgggagggttgaaggcacctggaatagattgggaattaagtgatgagaatgtgcctctggacataggtggactgcattgattttagggactgctattttctggatggagtggaaagaggatttatgtgagttggaggaaactttgaggaagcttggtgtgttctgagatcctaaagggttggggaggggattctaaggtactggaagggttaatcgaaggggtttgcggcagcagatagctttgtttgaagtggggcaaagttggtgaggtttaaactggaatgtagttagggaactttcagagggatggggatgatttttctgagaagcagtgaagaatggatgggggcctctgagtgggagatgacctaagggacaagtcagggtcagggcatggaatttgtgggaggtaggaattattctgagggagtggagctgtaccaaatttggtggagaacatgaaaaggattggctgggggttgcaggagggagggaagaggttgtttgtaatttgtactctatttttagacagtcttagagagtttattaaagtgttttttgtccattttcagccgaggtttttagaaattaaaaatttttttgtgtgagtacatagtaggtgtatacattttgggggtatgtgagatactttgatacaggcatacaatgggtaataatcacatcagggtaaatggggtatccaccaccttaagcacttatcctttgtgttacaaacaatccaattatattcttttagttgctttgaaatgtacaacaaattattgttgactgtagtcaccctgttatgctatcaaatactgtatcttattcattgtatttaattatatttttgtatccattagtcatccctccttcccctccaccccccactacccttcctagcctctggtaaccctcagtctactatctgcatgagttcaattgttttaatttttttagttcccacaaataagtgacagcgtgcaaagttttctttctgtgcctgatttatttcacttaacataataacatccagtgccctccctgttgttgtaaatgacaggatctcattcccttttttttgtagacagggtctctctgtcgcgcagactagagtgcagtggtgtgatcacaactcacttcagccttgacttcttgggctcaggtgatcctcccacctcagcctcccggtagttgtgactatagcacgtgtcacaagcccagctaatattttagtacaggtggggtttcaccaggctagtctccaactcctgggctcaaataatcctcctgcctccctgcaaagtgctgggattagaggcgtgaacagcaatgcccagcctttgtaccacaatttctatttttttttttgaaacggagtctcgccgtgtcgcctaggctggagtaggctggagtgcagtggcgcagtcttggttcactgcaagctccgcctcccaggttcacgccattctcctgcctcagcctccctagtagctgggactacaggtgcccgccaccacgcccggctaatttctgtatttttagtagagacggggtttcaccttgttggccaggatggtctcaatctcctgacctcgtgtaccacaatttctttatccatttgtctgttgatagacatatgggttgctttcaaatcttggctattgtgaagagtgctgcaataaacatgggatttattgcagttttttttcttttgagaccgagcctcgctctgttgcccaggctagaggacagtggcacgatctcagcccagtacaatctccacctcccaggttcaagcgattctcctgcctaagcctcccaagtagctgagattacaggcacctgccaccacgcccggctaatctttgtattttttagtagagatggggttgctgtgttggccaggctggtctcaaactcctggcttcaggtgattggccctccttggccccccaaagtgttgcaattacaggcgtgagccaccacacccagcctgatttattttcatttgggtatatacctagcagtgggattgcatttttacccgagtctttttttttttttttttgagacggagtttcgctcttgttacccagactggagtatggtggcgtgatctcagctcaccgcaacccttgcctcccaggttcaagcaattcttctggttcagcctcccaagtagctgggattacaggcgtgtgccaccatgcccggctaattttgtattttagtagagacgggattcctccatgttggtcaggctgtgaactcctgacctcaggtgatccgcccgccttggcctcccaaagtgctgggattacaggcatgagccacagcccccggccttcacctgagtcttatagcagctctctggagtcggaagggcagtgatttccttctctgttcagatgaggaaggaggctccacagagcaaattgacttgcctctaagagggctctaggtgggataggagggttctaggtgggataggagaactctggagactggagttcctttatgaaacagaagccctggaaatgggcaggctgataaaatgtacaaattgtggggcattttataagacagttatcctacttctcttccaaaagtcagtttcatgggaaaaataagtgaagggactgttgtggattaaaagagagtaaaggccgtcacagtgactcagcctgtaatcccaggactttgagaggccgaggtgggtggatcacctgaggtcaggagttcgagactagcctggccaacatggtgaccgtctctactaaaaatacaaaaaaaattagccaggtgtggtggtgggtgcttgtaatcccaactacttgggaggctgaggcaggagaattgtttgaatccaggaggcagaggttttagtgagccaaggtcacactatcgcactccagcctgggtgacaagagcgaaactctgtctcaaaaataaataaataaaataaaataaagtaaagaagcagcttcctagagcagatttggttgcttaaattgaggccaagtttctggagtttttattgatagttgacaattacaactaaaatttttttttctcgctctgttacccaggctggagtgcagtgacgcagtgacgtgatcttcagctcactgcaacctccacctcccgggttcaagggattctcccgcctcagcccccaagtagctgggaccacaggcgtatgccatatcactcagctaattttgtgtgtgcatggcgtatgccgtaacactcagctgattgtgtgtgtgtgtgtgtgtgtgttgtttttttttttttttttgtgatggactctcactctgtcgcccaggctggagtgcagtggcacaatcttggctcactgcaacctccgcctcctgagttcaagcgattctcctgccttagcctctggagtagctcggattacaggcgcgtgccaccacacctggctgatttttatatttttagtagagacggggttttaccatgttggccaggctggtctcaaactcctcacttcaagtgatctgcccacctcggcctcccaaagtgctgggattacaggcgtgagccactacacccggcctatgtgtgtgtattttatttttttatttttttgagacggaatttctctcttgttgcccaggctggagtgcaatggcgtgatctagactcactgcaacctctgcctcccgggttcaggcaattctcctgcctcagcctcctaagtagctgggattacaggcgcctgctaccgcgcccagctaatgtttgtatttttagtagagaccaggtttcgccatgttggccagggtggtcttgaactcctgacctcaggtgatctacccgcctcagcctccttaagtgctgggattacaggcatgagccactgcgcctggccagaagttaccttctttgtgcctgttttctcagctgcaaaagaggggtaacaaagtgccagcccattagattgtcatgggaattaaatgacataatacatacaaagagcttagtagaacagtgcttggcacatagtaagtgttagataaatgttggccattattattttattatgtaccagatttctataattctgctgatggacacaggtttgttttggtgtgtctattaattcacagccatttgagtaacagtatgtcctaaatgccaaggaagttactggttctagtgatacagtggtttctggagtttacattctaatggaggagggggcagtaaacatataaacaagtagtgtagcttagcacagtggtgtgtggctgtgatcccagctactggggaggctgaggttggaggatcacttgagccaggcaattgagactagcttgggcaacttagtgaggccccatttcaatcaaaacagtgggcaacacagaccccatcttaatcaaaacaaaaacaagtagcataattcgagatagaagaggatgtggacctattttaaattaggtggccagtatggacttctctaaggaggtgacaattgagctgagacctaaagaatgtgtcccttaagaagttgagggaagaagcaatgggaagcactaatgccaaggtcctaaggtgggagcaaggatgggagcaaggatgatgttctctaggatcagcctcccgagtagctgggactacaggcacgtgccaccacgcctggctaatttttgtattttgagtagagatggagtttcaccatattggccaggctggtctcgaactcctgacctcaagtgatccgaccgcctcggctaattttgtgtatttttagtagagacggggtttcaccgtgttagccacgatggtctccatctcctgaactcatggtcctcccaccttggcctcccaaagtgctgggattacaggcgtgagtcgccgcgcctggcacacccagctaatttttttttgttttgtacagatggagtcttactttgttgcccaggctggtttcgaactcatgggctcaagtgatcctcatgccttgccctcctaaagtgctgggattacaggtgtgacccactgcgtccagcctgctgtagttttgtcggagagaaacgatggtggctcagactagagtggtgtttgtggaacttgagggaagtagatggacaatgctgctgtgaatgtgtatctttttttttttttttttttgagacagagtctcactcttgtcacccaggctggagtgcagtggcgcgatctcggctcactgcaagctacaccttccgggttcacaccattctcctgtctcagcctcccgagtagctgggactacaggcacccgccaccactcccggccaatttttttttttttttttttgtatttttagtagaaacggggttttaccatgttagccaggatgatctcaatctcctgacctcgtgatctgcccgccttggcctcccaaagtgttgggattataggcgtgaggcaccgtgccctgctgaatgtgtatcatttttgtgcccacttgggtatttctttttttttttttttttttgagacggagtctcgctctttcgtccaggctgaagtgcaatggtgcggtctcggctcactgcaacctccgcctcccgggttcaagcgattctcctgcctcagcttcccgagtagctgagattacaggcgcctgccaccactcccggctaattttttttttttttctttttgaaacagacccttgttctgttgcccaggatggaatgcagtggcgccatctcggctcactgcaaactccacctcccgggttcacgccattctcttgccttagcctcccgagtagctgggactacaggcgcccgccaccatgcccagctaattttttatatttttagtagagatagggtttcaccttgttagccaggatggtctcggtcttctgacctcgtgatctgcctgtctcggcctcccaaagtgctgggattacaggtgtgagccaccgtgcccagcccacgcccggctaatttttgtaattttagtagagatggggtttcaccatgttggccaggctggtctcgaactcctgacttcaggtgatctacccaccttggcctcccaaagtgatgggatttgtaaacccagcactttgagggaggcagaggcaggaagattgcttgagcccaggagctggagatgagcctgggcaacatagtgagaccctgtgtctacaaaaaaaaaaaaaaacccataaatcagccaggtgcagtggtgtgcacctatagtcccaggactcaataggccgaggtggcgggatcacttgaacctgggaggttgaggctgcagcgagccctgatcttgccactgcccttcaatctgggttcacagaatgagaccctgtttcaataaaacaaaacgtaaacatggtatttggtgttgatggcagttgagtatttaatttaatttaatttaattttttttgagacggagtctgtcacctgggatggagtgcagcggcacagtcttggctcattgaaacctctgcctctcaggttcaagcgattctcctgcctcagcctcccaaatagctaggattacaggtgcccgccaccaacatgcccagctaattttttttttttaaacagagtctcgctgtgtcacccagactggcatgatctccgcttactgcaacctccgcctcccaggtttgagtgattctcctgcctcactgtcccgagtaactgggactacaggcgcctgccaccacgcctggctaatttttgtattttctgtagagacacggttttgccatgttagccaggctggtctcgaacccctggactcaagtgatctgcccgccttggcctcccaaagtgctgggattacaggcgtgagcccccacgcctggccataattttttttgtatttttagtagagagggtgtttcaccatgttggacaggctggtctcgaactcctgacctcaggtgatccacccatctcagcctcccaaagtgctgggattacaggcatgagtcaccgggcccggctgaataatgaattttaaacaactgcagagcagtctgtagagctatgtaggaatgtaggtcgtggagagcagatttattgtcagggactttttatatgtagctgttgctggaagagttcggggagggggagtgcttgctggtattgactcagccatgataaaaaagcctttttttgaggaaatggcattggagttgggttttgaaggggaaaggcgtaggtaggcattgagaggaagaaatggtgcattttgcgagggtggaatgttgtgattaaattttatttaatttttaattaaattaatagcaaactcttaccagcagaacttaaattgtgtgaaaattattcttagttattactaaatccttttcagtatgaataatacatttgctgcagaattattaatgagtttggttacatgatgcagcccaagatcttgatgagttgtttcataatacatgatgtaaagtctgtatttcctttttgaaatctgaaaaaattgtgactctgaaatacttctggttcaagagatttcagataagatatagttgacctattctgcttcctactgacctcagagaagtcttgggatggcctgacctctgattgccttttttcagcctcatcttctgtcactttacagatttaaaaagctaaaaacaaggctgggcacggtggctcatgcctgtaatcccagcactttgggaggctgaggcaggtggatcacttgaggtcaggggttcgagaccagcctgaacaacatggtgaaactccgtctgtaccaaaaatacaaaaactagccaggcgtgacagtaggcgcctgtaatcccagctactcgggaggctgaggcaggagaattgcttggacctgggaggcggaggttgtagtgagctgagatcacgccactgcactccagcctgggcaacagagcgagactctgtctttaaaaaaaaaaaaaaaaaggtaaaagcaattcctgtgtacatgctcttttcatgccaccatgtgttttgcttgtgtgttatacttaactagtgcctcttctcagcacctcttctgctgtcatgctagtttgagccaccatcatcctccctcaccttaactgtgacatcttcctacccccatggctttccatcatgcctcgaagaaaatccagaatccttccattgcatgtaagagccttcatgatgtggccccttgttccaacttttcagcctctctgtcattcctgtccctagaacatgccaagcactcctgcttcagggcttttgcatttgctgttttctctatctggaatgttctgctgccaaatatctgtgtgtttgtcctttatttcattttgatttttgctcatatggcatctcctcagaaaggcttgtatgatttctgtctcaaatagcgttctccatcattcttgattcttgtcacacttgattttcatcactttttcacatattatgtatctatttgtttatctgtctcctactttttcatgagggcagggactatgtctgattcaccgccttatttccacaccatagaaggatgcctggcatagttggtactcaataaatatttgttgaatgaattgttttgtgcagtatggattagagcctgtctctttcctagattcgaggtgtgatgcctcaatgcagttagaaccaaaatgatttttttttttttgagacggagtctcactcttgttgcccaagttgaagtgcagtggcatgatctcggctcactgcaacctccgcctcatggtttcaagtgattctcctgcctcagcctcccaagtagctgagattacaggcgcctgccactacgcccagctagtttttgtattttagtagagacggggtttcaccgtgttggtcaggctggtctcgaactcctgacctcaagtgatccgcctatctcagcctcctaaagtgctgggattacaggcatgagccaccgtgcctggcaaaccaaaatgatttgtgtattttttgttcttctgtgattctgcaagctcactgttctgtatcatcaggttaacaatgtttgtcttacaggctgcgggcctctcgggtgcttcttgtcggcttgaaaggacttggggctgaaattgccaagaatctcatcttggcaggagtgaaaggactgaccatgctggatcacgaacaggtgcgctgttgtgagctcattcctcccctgctctggctcccctttccagcatgaagatctgcagattttgtgagttcctccttgtgccttaagggctgtgaaaggagggctaacattaataaaccattgcctctggagactgaaggtgctattgttgggtttgaattctagctccaccacatctagctggatgagcagtagagactcacaccccctcattgagcttgcctgcctgtaaaatggggttagtaatatctcccttggtggttgcttgtgaggaggtgtagagaagtgtttttccaatttgtgcctaaaaatgacctgagtgactaactgaaaatgcagagtggcctggaggcttcgtggtgccctagctttcacccctagtgattctcatttaggtctgaggcgagctcaggagtatgtgcatttaaaaggtgttttagggctggacgcagtggctcatgcctgtaatcccaacactttggaaggctgaggcaggcggatcatctgaggtcaggagtttgagactagcctggccaacatggcgaaactctgtctgtactcagtatacaaaaattagccaggcatgttggtgtgcacctgtaatcccagctactcgggaggctgaggcacaagaatcgcttgaatctgggaggtggagtttgcagtgagctgagatggcaccactgcactccagcctgggcaacagagtgagactttgccttaaaaagaaataaattaatgaaaggtgtttcaggagattatgatttagatggtccacagacatcactttaaaaaacactggatcaggccaggcacagtggctcatgcctgtaatcccagcactttgggaggctgaggcgggcagatcatgaggtcaggagatcgagaccatcctggctagcacggtgaaaccccatcactactaaagacacaaaaaattagcagggcttggtggcgggcgcctgtggtcccagctactcgggaggctgaggcaagagaatggcgtgaacctgggaggcggagcttgcaacgagccgagatcatgccactgcactccagccttggcaacagagtgagactccgtttcaacaacaacaacaacaaaaacaaacaaaaacaaacaacactggatcagagagaatgtgggcagactgctttgtatagtgcttgaacctaacaagtatccagtaattaggaataatgatctgacatgctgtttgtttgtttgtgtgtttttgcgagacgagtcttgctgtgatgcccagactggagtgcaatggcgcaatctccgcacactgcaacctccgcttcccgggctcaagtgattctcctgcctcagcctctgaagtagctgggattacaggcacgcaccaccacgcctggctaagttttgttttgttttttttttgagacggagtttagctcttgttgcccaggctggagtgcaatggcgtgatcttggctcactgcaacctctgcctcccaggttcaagcaattctcctgcctcaatctcccgagtagctgggattacaggcatgcaacaccatgcctggctaatttaacgtttttagtagagaccgggtttctccatgttggtcaagctggtcttgaactccgacctcaggtgatcctcccacctcggcctcccaaagtgctgggattgcaggcgtgagccaccgcacccggccatgcctggctaagttttgttatttttagtagagatggggtttcaccatattggccaggttggtctcgaactcctgacctcaggtgatccgctggcctcggcctcccaaagtgcggtgattacaggtgtgagctaccatcccctgctgacataatgctgtttgattaatattataatggtagagcccaactccaatgtagctttctctgaccaggctcatcttcaaggtgaaaataagtgctgctctctctacattcccatgcctcagtgacattttatttattttatttatttattttgagacaaagacttactctgtcgcccaggctggagtacagtgacacaacctcagctcactgcaacctctgcctcccgggttcaagcacttctcctgcctcagcttccctagtagctgggattacataattacttcatctggttgtaagaatccaacattggaggccaatcacagaacagtgcgattctgacaccacaggtgtgaggccactgcacccatcttagagcgtattatgtagtttacattcaacaagcatctgagagcacctactgggtgccctgaagtctgctaggtgctggtgatagaaagatgctcacggtttggttcccattctcaaggttttttttttttttttttccggaaaccatagcaggctccctgactgaggttgtggtacatgaaagatttcctggagtcctgatctgagctaagtcttaaagaacaaggagggtttgtcaagataagagcctgtgttttaggcaggggacatagcagtgtcacaaaggcaccctacagtgtggtagaaatggaagctaaaagtagtttggtgtttttagagtgtgagacccaaagtggtgggtagggacaggttgctggtgaagtccaagtcaggaggggctcctaggaagccccactgtaagcttttacttaatcctctgggtggtgcagactcactgaagagtttcaaatgacaggaagggtgacatggttagctttgggctttatgtgtagatcagtaattactgtataaactatggttggcacaaaatacagggcagaagaccacttagaaggcagtttttagtagtttaggtgagaggtgaaagtggccttgctgatagggatggcaggaagcacacagatgtgagaaatagatttaggtggtagaattgggaggtctgtgtatgggagcttaaggaaagccaggaataaccagagcagctgacactgaaggggctaggcactgttctcagagctgcagttgtattatctcattgagtcctcacaacacatctgagatcaaggacccattaccatccctgttttacagatgggaaaactgagtaaaaggaagaaaagtactggcccatccaaggccccagtagttagtggtacggccgggacccaggcatctgactccagagcccatgttctcagccacctcactatggaccactctcatggaaatagcaaggatatgaagatgaggcttctggcttgagtgactgggtgggtggctggtggactccggagacagcacacagaagcaggcagacatgtagggtttatggatatctgagagaaaacggctggtgggcagtacagtagagaagactcaggtggatcaggaagaaatctgcaccagaaagagtgatttgaaaaataacagcagattttggtagaaactgaaagaggcattgagttggtttatggagctatacagagtggaaagataagtaattctgagatggaagcttggggacagccacacctaagagggcccaaattgagactagaatgtgtagcacgagaggagagcaaagcaaggaaggtgtgatctgtggactgatagtgatgaaatgataattgtatgtgtatgggtttttttttttttttttttttttttttgaggcagtctcactgttacccttgccggaatgcagtgggcatgatcatggctcactgtagccttaacttcctgggctcagggtattctcccacttaagcctcccagtagttgggactacaggtgcacgccaccacacctggctaattttttgtattttttgtagagactgggtttcatgattgttgctcaggctggtcttgaactttctgggctcaattatatgttttttttgtttgtttttttgagatggagtctcacttgtcgcccaggccggagtgcagtggtgagatcttggctcactgcaacctccgcctcctgggttcaagtgattctcctgtctcagcctcccaagtagctaggattacaggcgtgtgccaccacacccggctaatttttgtatttttagtagagatggggtttcaccatgttggctaggctggtctcgaacttctgacctcaagtgatccacccacctcagcctcccaagctgctgggtttacaggtgtgagccaccgtgcccagcctcaactgtatttttttttttttttgagacagagtctcgctctgttgcccaggctggagtgcagtggcgcgatcttggctcactgcaagctctgcctcccgggttcacaccattctcctgcctcagcctccctagtagctgggactacaggcgcccaccaccacgcctggctaatttttttgtattttttagtagagatggggtttcaccgtattagccaggatggtctcgatctcctgacctcgtgatctgcctgccttggcctcccaaagtgctgggattacaggcgtgagccaccacgcgtggccctcaactgtacgtttttatccatgtcctcgttttatatgggattcccacattcttgctgaggttcacacagttgttgagccaggatttgaatcaaagattgaatccagcctgaattatttcagagccttactgttaaccattgtgtggtacagcttctcagcacataatgagatccctgaagaagcaggatggaatgggtcaaggatacagggttagcctagaatgggaagtgggccagctcattttcttggaggagaaggtagtaagatagagagtgtgctgtggatggttggtaggaggtgttgaggggagattacttctgttgtacctagtcttggtgaaggtggcaaggttatttgcagagattaatggttaaattagatgtttgatgtgtgaagaaatactttgagagcagtatggaatctgtaatcttactggtggctattaggggattatattatcctgtctttgaggctctgctctgctgatgttcagccttaggggtgaaataattcctctgttccagtccccactcatctctccacctctctgagttctttttttttttttttgagacagagtctcactctgttgcccaggctggagtgcagtggcacgacctgggctcaatgcagcgtctgcctcccaggttcaagcgattctcctgcctcagcctcccgagtagctggaattacaggcgtgtgccaccacgtccggctaattttgtatttttagtagagatggggtttcaccatgttggtcaggctggttttgaactctggacctcaggtgatctgcctgcctcggcctcccaaagtgctgggattacaagcgtgagccaccgcacctggccatagtctatctatgttttttaaaagttcatttcaagcattcttaattgtgtctgatttttgcacaagtttgattttttttttaagttttctcatgaggttgcaatttttgttgttttttgagagagggcctctctgtgttgtccaggctagtcttgagctcctggcctcaagcagtgatcctcctgctttggcgtcccaaattgctgggattacagatgtgagctactgtgccaggctgcactggtctactttttttttttttttttttttttttgagacggagtcttgctctgttgcccaggctggagtacagtggtgcaatcgcagctcactgcaacctccgcctcccgtgttgaagtgattctcctgcctcagcctcctgggtagctgggattacaggcacacaccaccacacctggcttatttttgtatttttagtagagatggcatttcaccatgttggccaggttggtctcaaactcctgacctcaggtgatcctcctgcctcggcctcccaaagtgctgggattacaggtgtgagccaccgtgccctgcccacactggtctagttttaaaccactggaagacagagatttaatcctttaaactacttgtgtatttccccaaatgcttatagttgggcacatgctaagtatttagtcaattcttgccactgttaatcagtcatttgttagcagttacaaatttgcatagaagaagaaagcatggatttttttgttgacagtgaattttctttataaacacaagggggtgctctttaaccatcaatgaccagtttaaaaaaagtttaaagtcattttaaagccttagaaggaagcctgcataaggcaaattgctacaggaacagtaatacattttagggctgtgcacagtgtttcatgcctgtaatctcagcactttgggaggctgaggcaggcggatcacgaggtcaagagattgagaccatcctggcaaacgtggtgaaaccctgtctctactaaaaatacaaaaattagctgttgtggtggtgcgtgcttgtagtcccagctacttgggaggctgaggcaggaggagaatcatttgaacccaggaggcggaggttgcaatgagccgagatcatgccactgcactccagcctggtgacagagcaagactgtctcaaaaaaaaaaaaaaaaaaaaaatttaggtggtaggtattttagctatcctttaaaatttaaagattctttttaagatttattttccctaaaaatacaagacttaaaaaaatatgtgtattattcctaggtaactccagaagatcccggagctcagttcttgattcgtactgggtctgttggccgaaatagggctgaagcctctttggagcgagctcagaatctcaaccccatggtggatgtgaaggtggacactgaggatatagagaagaaaccagagtcatttttcactcaattcgatgctgtaagtttcttattataaaatctgctgtgggaattaaacaaattaaggtgctagttgtatatactttcaaatcccaaagcaatctgagagcattcaaatatcaaattctgagctttttcccaagaaaatgtataagctgttctattgtttaggcttagtatattgtgtgaatgtgttgctagagaggtccagtctgttgcatctgctgtagttgttggtgacttgctgtctgctggcttcttctctgggcatatgttccctcagccaggtttcgtctttggtgttttgtcttccttccagaatctttgcacataactttaatccatgttattgcaaatgttttcttccgaaaacttaacaagttggtgattaatttctgtggcagcggcatttttttgttagaaatatcaaactacagcttgtgttttgtcttaagaaaagcacacctgatcttgatctatgtctgtctgtctgtttctcacagtcacattgaccatgttgccatggataactagagaaaaatcactgtagtcgtaagtcaaatgaggcatatccagcctcatttagtttcactgccaaatctatgcggaggtgaaaggataaattctttgtcaatatctgcaacctttcagacatagttccctgcattctggaaaagcttaacaaatcttgataaatgtgaaatagtcatagatgagctactagttttttaaatgaaaggccccagtatgttacatgagaggttagaatttgggttgggtagttttttttttttgcacctttttttatttgagatggagttttgctcttgtcgcccaggctggagtgcaattgtgcgatcttggctcatggcaacctctgcctcctgggttcaagtgattctcctgcctcagcctcccaagtagctaggattacaggcactcaccaccatgctgggctaattttttgtatttttagtagagatggggtttcaccatgttggtcaggctggtcttgaacccctgacctcaggtaatccacctgcctcggcctcccaaagtggtgggattacaggtgtgagccactgcacctggcctgttttttacacttttctttctttctttctttcttttttgagatggagtctcactctgtcgcccaggctggagtgcagtggcatgatcttggctcactgcaacctccgcctccctggtttaagcagttttctgcctcagcctcccgtttttacacttttctatttcatatgtgcatctgttcaaatatgggcttggaaggatggatcatctgtgcatttgtcctgttttctttttcctagtcccttctattttttaacttgaggtattgggacactttccatttggacataagtcttcattttcttatctgtagtaaccacatttattttatgccaggtgtcccttgaacttgtagagttagagggtttgttaaaactgaagtgtgaggccagttgattgtgtaatgcgtgtgcatggggccatgttgaccgccttgcaggccgtgtttggctggtccttgcaggttttatagttactttagactctgcagggttccatttgatcaattggttgcatgttcacctgtggatttcttactttttagatgggatttttccttgggtggctgcattctttgaaacaccaaaggaacacatttctctgtgagtgttatttcggtattcaggctgctagacaacagcaaagagggtctatcaagtgaaaatgtccttttgttcaggagaaagcatgtgcaatttggaagttgtcttttgaccatgatcacaaagcttctcccgaaaagatggtattttgtgcagtagaacttagccatttccaatacctcaacttactggaatacaacctggaggccccagagcaacactgataattccactgagtggatcaccagttcattgtctaagcctgaatggaaggtcacttggtctgtaaccttttcttttgtccttaaattcagataaagtttcacaccgcaatctgtggaaaaatgatctcaacaggacttgtttatcttctttatcttaacatatcaatcaaaaggaggggggtaaaaagcccttgtatttaaacatgacctttgggtcaatttaaaaaactggttttgcttgtccctgtagcttatttggattttaatagatttagcagtatagaaacaacttgctaagttattttttttatgagaactatgaaatgtgtatatgttcgtggattacagaaaacatttgttgaatggcttttactttttagctaaacacattttattttggctgcagaacgtgacggtctcataacttatattttctacacattgaaacctgcaacttttcttttgtcttctagccatagggcccaaagaacctgttgtaccagtttgaaacatgctttgagcatgcccagagagactgttcattaagatttatttagacatcagggcagtgattcacagtttgcaaaactcaaacccagccaatttctttctttctgcaggtgtgtctgacttgctgctccagggatgtcatagttaaagttgaccagatctgtcacaaaaatagcatcaagttctttacaggagatgtttttggctaccatggatacacatttgccaatctaggagagcatgagtttgtagagtaagtgttgggagaggaggggagaacataacattttctcctttttatactttttttttttaaattatgtatttatttatgtgtagagacaggatctatgctatgttgttcaagctggtcttgaactcctgggctcaagtgatcctcccaccttggcctcccaaagtgctgggattataggcatgatccactgcgcctggtctgctgacatgttttcaagttgagagatagtaaaatgattacaaaatagttgggcgattctggaggcatattcaaccaaagtctaccttggaaaaggtgtccaatatccagagagactcctctggtagaacaaacagacctcatcctctcattttgaacactgaggctgcagaacttggtaattcttacatgacaggacttgccgtgttttgactttgtagtctctaggtgaaagatggcagatgatacattattgtaaaactatatgagttaggtattttggctgcagtttctgaccaccccctccaaaaccctccaacttgctaattgagagggaaagacaggctctgtgagataggagcttcctaccaagagactgagaactcttctcttgttcagcctctcaggcaagtcactgaaatttctctggtctccaagtttcttgcctgtaaaatcaagatgggggaaggacagtcatgttccagacatctcctaactctagtgttttatggctttaggataatctagttctttgggcatattattattattattattttattttttgagacggagttttgctgttgttgcccaggctggagtgcaatggcaccatctcagttcagaacaatctctgcctcctgggttcaagccattctcctgcctcagcctccggagtagctgagattacaggcatgcgtcaccatgcctggctaattttgtatttttagtagagacagggtttttccatgttggtcaggctggtcttgaactccggacctcaggtgatccacccacctcggcctcccaaagtgctgggattacacaggcgtgagccaccgcacccggctattattattatttttgagacggagttttgcttttgtcacccaggctggagtgccatggcacgatcttggctcactgcaacctccacctcctggattcaagtggttctcctgcttcagcttcctgagtagctgggactgcaggcacccgccaccatgcccggcaaatttttgtatttttagcagagacggggtttcactatgttggctatgctggtcttgaactcctgacctcaggtggtccacccacctcagcttcacaaagtactaggattacagccaccatgcctggcttctttgggtatattataaagaagttatagtagtgggaagcaatccagattattttaacataagctgcccacagcagaggggcagaattaagtttggcttttttttttttttttttttttttttttttctgagacagactttcactcagttgcccaggctggagtacagtggcgtgatctcagctcattgcaacctcctcctcctggggtcaaccaattctcctgcctcagcctcccaagtagctgggattacaggcgcccaccaccacgcccggctagttttttgtatttttagtagagacggggttttgctatgttggccaggatggtctcaaacccttgacctcaggtgacacgcccgccttggcctcccacagtgctgggattacaggcgtgagccactgcacccagccaagtttggctatttatttcatgattcaagtagagtgtttacaaagtaatcactttgatttattgagagcagctgtgtgcccagcagtgtgctgagcaacttacgctgctctgtttttcccacaataatttcctgagtgcccaacagtgtaccagactcatcatgttatcaatggcagagctcgatttgaaccgagatctgactccaaagcttttgcccttaaccaccatcccgatctgtgacctggagaggctttttttgattccaataacatgattcctagggtaaaattacattctctccccttgtcaccctctagggagaaaactaaagttgccaaagttagccaaggagtagaagatgggcccgacaccaagagagcaaaacttgattcttctgagacaacgatggtcaaaaaggtatgtgtaacgtgggggcagaggtcagaaaccctggggccttggaggggtcaggcaatgacgattgaaaaggataagagcaagcacttcttgaaggggtggggcgggtgcttgtcccatctaaagggaggctgccacagcttagtgtcagccagctgttgctgtgagggaatgtgggcccagtgattccagatgggatttttcaagacaatgagaaatgcaaacttttgtaggctctgtcccaaacttttttttttgtgtgtgtgagatggaattttttcttgtcgctcaggctggagtgcaatggcatgatctcggctcactacagcctccacctcctgggttcaagcaattctcctgcctcatcctcccaagtagcacccctggctaatttttttttgtatttttagtagagacggggtttcaccatgttggccaggctggtctcgaactcctgacctcaggtgatccacccgcctcagcctcccaaagtgctgggattacaggcgtgagccaccatgcccggccccataccctttttttttttttttttgagatggagtcttgctgtgtccaggctggagtggcacaatctcagctcactgcaacctccacgtcccaggttcaagagattttcctgcctcagcctcccaagtagctgggactacaggtgtgtgccaccacacccagctaatttttgtatttttagtagagacggggttccaccatgttggccaggatggtatttatctcttgacctcgtggtccacctgcctcagccccacaaagtgctgggattacaggcatgagccaccatgcccgaccagaaaacttttttttttaaagcagcaaaacaccagccctgggttacagtagcaagaccccgtgtctacaaaaaaaatgtaaaaatttgtctggcgtgatggtgagcacctgtaggcccagctactcataggctgagctgggaggattgtttgagcctgggaggtggaggctgcagtgagccatggtcacaccactgcaccccaacctgggccacctagcaagatcctgtctaaaaaaaaaaaaagcaaaacaaaaaattttttgtattttctctactaacaatacaaaaattagctgggcaaggtggtgcgttgcttgtagtcccagctacttgggaggctgaggcaggagaatagcttgaactggggaggcggatgttgcagtgagccgagacggcaacactgcactccagcctggcgacagaacgagactctgtctccaaaaaaaaaagttttctttgcctgtttttttccttttgccaaataacctttaataagaaaaatccttcaatgttgtcttgctgtgtccaggctggagtggcacaatctcagctcactgcaacctccacgtcccaggttcaagagattttcctgcctcagcctcccaagtagctgggactacaggtgtgtgccaccacacccagctaatttttgtatttttagtagagatggggttccaccatgttggccaggatggtatgaatcctcagattcatatttgttaatgtagtttatattaggggctcagcctctatttggattaggtgcaataattacatttatagaaaggagtggagaagggatcagaagacgatggtttctgtagctagtgctggaatctgagatgggaaccatgcgatggggaaagcaagatgaaggggccagaattggtttcattgaactgagaggaaagacatgaccaagcccatatttactctttgctttgtagatttaaatgttgagaaagaaaaacagctggtcagaatgttgagttaaattacgctaacgaggggattctaaagagtgcagaaaccacaaaagagactgcagaaaaccacaaaagtggaactctcagactctccagcaaggcggcgttggagattttctttctcattttgtgtttgtgttggagtagtttggtgctgtaagtgtgatacagaggaattaagccctaattttagtgtctattcacagaaccataattatccagagtgaaccttggtgttttggccaaaacttgggtgcctttctttctttttgaggcccagtcaagatttatctgaatagctccgtgaatttggtggggggagataaattgttaacaaacggaggagtacaaaagctgctttgtgggtgctgtcagtttataaatcacaccctcttacaagtgtgacacttggccttggtgtgaagggttttatggcttaagggccttctctgattgaggcaggtctttcacattcaaatggagagagtgcctagctttgttagccattcacagctggaagtttccctggagtcagttctgatggtgcccactggggtggatctggaaacctcttttgggaaccactttatctcgctatgaggagaatgtgggcagcccaggcctttgcccaccattccggagggccctacaggcacagaggtttttgtgcagcctcttcctacgtggagctgagctggaaggtatcaaaatattccccagctgacattgttagtcagctgttacacttgaacaatgcaggctcggattccaaccccaagcccttaaggttacgaggcattcagtgcattcctgctgacaatccctgggattccaaaccttgcctttgtgcagcctcaccaagggccctgcggaccgactgggctggactgggttttggccatggctttgtcaccttgcaataacatgcctccttccgttttggcacagatggccctgtgatttcaaggttctcttccaacaccaaagattccttgattcagatgctgcccttttgcctaattgtacagaataactagttgggttgtgctcagagagtgcagggtgggggtggggaagcagctacttcctgtttcctgtgaaaggttttctggttagggttcccttcccctccccgctttccctaggtttaaccaaaggttgtaaagccacttttgcttcaaggtacactttgtgctcctaaattagtaacgttgaaaaacaaaaaggaaaaacagcctgtggttttcacaccctctaggaagctggtgggcctttctagcacctgtgccattctgataaataagggcttaggaaaatgcctagcccagaaataggtgctcagtagtttgtttgcttcctttggtgctcaggagaagatttgagacggatttcgtcacaatcaggtctcgggcacaagcctcacatggacactgacatgcaggagccagaggagacagcaatgaggtggtggtaaggaagtgcccaaaaaggtttcccagaggaagagttgtttgtgttggcatgtgagggacaagctttccaggcaccagagccaagagcagtgctctgtccgaggaagtaggataaaccgaaagacggacgtaggggcagagttgctgtggctgccctcactgccgcagccagctccttccatgagttgcagaatgcctactgtgtgcaaggcactgtgttgagtgcagggaatcacatccagtcttgttgtccccatctatagctgataaagaagctatgagaaattaagtgacctgaccaaggccacacagctgtggaagaaggggcgagagcatagacagtgggtaagggcataggctcaccctatgatttacaaagagggatacccctgaagttgctagggtaacgtgacatattaggaggatggtgggataaaatatgtgaacatcgggatcattctggaaaacctttaggataaaaggccactgtcatgctcccatgttcacgtttctttattgtgagttatctgtgttaggtgctgccagagatgatgagatgcctgacagtggttactctgtaatagctctttaaaaattaaagacaaagtagggtttgttcctgactgtactagaaatacagatttaattttacctctgctcctgaaataggtgactaatttggagtactattaatactcttttcatgaattagttgagaaattccacagttgaggagtgattcattcttttgactccctctttctgagcaatttgttgacagccttctcatcctctcttacacccgtcattaaagaaacagtcgagttctttttctttcatgtggtaccttggtttccactgctggtggcccttaggttgcttgtctctgtctccccgcttccattttaagctccatagggggaaggtagtcttgttcactgctagactcctagtccagtgtctagcacagtcatatccacggaatatttgttcagtgtactggtggctgttaactgcagcataatccagcaaccctggagattattttcttcctttttttttttttttctttgaagcagggtctgactactctgtcacctaggctgaagtgcagtggttcaaacactgctcactgcagcctcccaagtagctggaattacagacatccactacacctggctaatttttaatttttaaaaattattattatttctgagatggagtcttgctgtgtcacccaggctggagtgcagtggcacaatctcagctcactgcagcctctgcctcctgggttcaagcaattctcctgcctcagcttccggagtagctggaactgccagtgtgtgccaccacactcgactggtttttgtatttttagtagagacggtatttctccatattggccaggctggtctcgaactcctggcctcaagtgatccgcccactttggcctcccaaagtactgggattataggcgtgagccacagcttccagcctgattgtttccattttaaaaaagagtaattgaagtaacctttgttaccaatgaaatgaattaaccttctagtatattaattctcacggtttaggttatttgaactaagctgagagaacagaataccaaagaagacaatagacttgcccagaaatatttagaagtaagtcactcagttgcctggattggaaccctcaggccagagaggttcaaaatcctgcatttttttttttttttttttttttttgagacagagtctcactctatcacccaagctggagtgcaatggtgcgatctcggctcactgcaacctccgcctcccgggtttaagcgattctcctgcgttagccttccgagtagctggaactacaggtgcgcgccaccacgcccagctaattttttttttttttttttttttttgagatggactctcgctctgtcgcccaggctggagtgcagtggtgcgatctcagctcactgcaagctccacctcctgggttcatgccgttctcctgcctcagcctcccgagtagctgggactacagatgcccgccgccatgcccgactaatttttttgtatttctagtagagatggggtttcaccgtgttagccaggatggtctcgatctcctgacctcgtgatccgcccacctcggcctcccaaagtgctgggattacaggcgtgagccaccgtgcccagcctaatttttgtatttttagtagaaacggggtttcaccatgttgaccaggatggtctcaatctcctgaccttgtgatccacccgcctcagcctcccaaagtgctgggattacaggcgtgagccaccactcctggccaatcctgctaattattaatatcagaactacttggttcaaaggagtggaaatagggcaacgaggggtgtaaatttgcagttaggtggaatgctgatagcaagttttccaggtaggagagttagttggggtgggggatgctaatgttagcttatctctgtatatatatttaattttatatgttatttatttttgagatgggatgtaactctgtagcccaggctggagtgcagtggcacaaacacagctcactgcagccttgaactcctgggctaaagggatcctcccacccacctcagtctccaaggtagctgggaccacaggcatgtgccaccatgctctgctaattttttcgggttttttttttttttttgagatctcttgctgtgttgcccaggctgatctcaaactcctggcctcaagtgatcctcttgccttggcctctcaaagtgctgagattataggcatgagccaccgtacccagcctatattttttttattgtgacatttaatgcacaaaagaagatatgcagcatcaatgcagataatggaacaaaacaaacactatccgccttaaaaacacaaatatttttggtacttttgtaccaatctgtatgctgtttctctatcttctacttcttctccctgtaccctcaccaggtaagtaaccccagagctgctggtacatttgtgtggattaaaaaagacacctggaaggggcagatacagccctgcttgacttcctgttttatcacgtgtttataaatctaaacaatgacatggaacttattatacaatattttaggcataaattaagaatgatttcgctcaccatcatagacctaccactcaatttgaagcatcaaacattactggtatggtgaggccctctggctgtccctccaacagaagttaccaccctcctcagttgggtttctcattcctatgcatttcttcttactacttatgtatgtatttccaagcaacacatagaattgctttgcatgctttttatcttcttaaaaattggttttatattgtatgcatggtgccacctgcttttaaggagaagcaacacgtttgtgaggccatctgtttatatgttgttctagggctttgctgtccattttggtagccactagccacagctggctgtttaaattaattaaaatcaaatcaaatcaaatatttagttcctcagtctcactggtcacatttcaagtggccagtaagcacatgtggccattggcatctgtattgcatagcacagattacattctgttccatcatcacagctagttctcttggacagccctgcagggcatttctttttggtttttgttttgtttttatttttgttttttgctagagtctttgttgtgtaaatacattactattttatatccatttttctatttataagcatttgggtatgctcataatttgctgttacaaattgtgctgcataagcattttgtttgtgtgtgtatagatgatctccttgggcaattgtgttaatttctcttgggtatatacctgggagtaaaattaagataagggcattttcagctttaccagaccccgttaagttactctcaagtggttttatcaatttatattctagaaccaacattatgtatcagtaacatttggtaacttcaggcgttttttttccattctgctgagtgtgaaaaatgtgttttgattatggttgtcatttgttagaatactttgttaaagctttttaaagattcttggtccctctaccctccccaccccctaccccaggaattttgattgggtaggacctggggattatattcatctttatatgcagaattatattacttgttactgttaggcctgatttaagaagtaaaataaggctgggtgcagtggctcatgcctgtaatcccagcactttgggaagccaaagtgggcacatcacttgagcccaggagtttgagaccagcctgggcaatgtggctaaaaccccttctctaccaaaaatacaaaaattagctgggcgtggtagcacgtgccagtggtctcagctactggggaagctgaggcgggaggattgcctgagcctggcaagtgtaggcagcagtgagctgagattgtgccactgtagtacatcctgggtgacagagcaacacactgtctcaaaaaaaaatttttttttaagtaaaataagttcataattccaaatgtggaaaatgcagaacaagttaatgaaatgttaatcctactaccaaatgataactataaccttcctttcagtatttttctatgtatatacaacaaaattggggcactgtttaatacagataatatatatagttagctctccttattaatgggcttcacattcatggattcaaccaactgtggatcaaaaatctttagtgtgcttggagtacatccaaaaaaaaaaaaagaaaattgaaattatgttaataataaaatatttgggaaaaaacattgcgtctatctgtaccaaacatgtacagactttttttcttgtcattattccctaagcaatacaatataacaactgtttacatagcaattccattaggtattataagtaatctagagatgatttaaagtatatgggaggccaggcgcagtgcctcacgcctgaaatcccagcactttgggaggccaaggcgggtggatcacttgaggtcaggagttggagaccagcctggccaacatggtgaaaccccatctctaacagaaatacaaaattagctgggcatggtggctcacacctgtaatcccagctactcaggaggctgaggcaggagaatcacttgaacttgggaggcagaggttgcagtgagccaagatcgcaccgttgcactccagcctgggcgacagagcaagactctatctcaaaaataaataaataaataaagtatatgggaggatgcacgtagagtatatgcaagtactgtgccatttatttatttagagacagagtcttgctttattgcccaggctggagcgcagtggcgtgatctccgtctcccaggttcaagtgatcctctggcctcagcctcccgagtagctgggattacaggcttgtgctaccacacccggctaagttttgtattttaagtagagggcgttttcaccttgttcgccaggctggtctcgaactcctgacctcaggtgatccgcccacatcggcctcccaaagttttgggattacaggcgtgagccattgcacctggcttgtatatgtgtatatatatgtacatggttttgtcttttgcttttttcactcaataagcattccccaaatctgctttggagcacatgattttattttatttttatttttttatttttttgagacgaagtctcgatctgtcgcccaggctggagtgcagtggcgcaatctcggctcactgcaagctctgcctcctgggttcacgccattctcctgcctcagcctcccgagtagctgggactacagacacccgccaccacacccggctaattttttgtatttttagtagagacgggtttcaccgtgttagctaggatggtctccatctgctgacctcgtgatccgcccgccttggcctcccaaagtgctgggattacaggcatgagccaccacgtctggcctggagcgcgtgattttaaatgtctgtgtcatttttcctcttcttgcctagccataatctattttaccagtcacctattgtattgaggttattgaggttattgcagtttcctactatgctaaatggctcctgacaacaaatttgatggttgatgggctatgtggagaattcacctttttttttttttttttttttttttttgagacagagtctttctctgtcacccaggcgggagtgcagtggcatgatctcagctcactgcaacctctgcctcccaggttcaagcgattctcctgcctcagcctcctgagtagatggaactacaggcacctgccaccacgcccagctaattttatttttgtatttttagtagagagggggtttcaccgtgttagccaggatggtctcgatctcctgacctcgtgatccgcctgcctcagcctcccaaagtgctgggattacaggcgtgagccacagtgcccggctaatttttgtatttttagtagagacggagtttcaccatattggccaggctggtctcgaactccagaccttgtgatccactcaccttggcctcccaaagtgctgggattacaggcatgagccaagtctttttttttttttttttttttttttgagacggagtcttgctctcttgcccaggctggagtacagtggtttgattgtgatctcggctcactgcaacctcagcctcctgggttcaagcgattctcctgtctcagcctcccaagtagctgggattacaggcacatgccaccatgtccggctaatttttatatttttagtggagacggggtttcaccatgttggccaggctggtctcgaactcctgacctcaggtggtctacccaccttggcctcccaaagtgctgggattataggtgtgagccaccgcacccggccttgttattagtcttaactagattgttgattgaagtccttaagcccagaaatgtatgtgaaggatggtggagaagagtggctcaggcattctaggcagaggtattcttgagctgaggaagtggaggagaggaggtatgtaagttacctgttttcaggggttcattccagtggatagtggatgccactccctggcagacactgtgggtgcctcacctgaaagactcctgattccctgaaggcattgtcgggtgtattttttctttataagcgtaatgccagtggagtgggtaagacaggtaccaccttttgcatctgctgctacagattaggcagcttggttaagttttgttttgtttttaattgttatgagttagtttgaaccaaaaggattgttaagtggagtgtaagaagcactgaataactactgttatctgagaggagtagtaaagaccagggccactgggcaatcccagaggcattaggaatttgtggcctttccctttagagcattgtcattatgtgtatctgcatctctgcattccaactttcacattttcagttcccaggagagagaatctgattggcctggttggggtcctgtgcccacttctggctgtcacctgtggctttcttccctcagttgtagaccacactctggatacctgggacccctgaaatctcctgcccagacaaccccaagcttctcaggactttttgtgggctgcttccctgttctgcctgtgcagtgcaggccttgtcacaatgtctgaatgcttaggccagagacgtgggggtttggtgagaaaggatgagctgggtagctacactcaagtgcagagccaccagtattgtgggacagagccaggcatgggaagagaagtgggcacggatgggggccagctttcccgatgtgccttaatctggcacagaactcctaaggagtgtgaaaatttcaaatttgatccaggccttccaggtggttatgaagaaggcgagtttgtcaagacaggataatacaatatacttcatttaatagcttgttagtgtgatttataactaaatatgtagacatcatatatgggtcttcattcatactcttgccccaggccctgaaagtgttagctaacaggcaagacctgcctgggactgagattctaaaacacaacctccacccccaactccgtttcatcatatagtagcctaacatattagttggttcgttgcttatagtcaggcaaacaacaaagactccgaattgagctcttggtaatttttgaaacctgcctggtaatactgtgtttcctcattctgatggcattcccagaccatattgcaaatgacttgatgtgtattttcagacttgttgagaagggcctggtggtctatatagcaggcataaaatgtcaccaggccgacttcatgacttatcttttgaggtcaaacagacccattgaccaaaagatttgagggcagtgaaaacatcttgtatactatctttaacaatggatttaactcctaaaggaaagccacctaaacatgactgtttaatcttcactagcaatttgaacttttttttttttgagacggcgtctcaccttgttgcccaggctggagtgtagtggtgtgaccttggctcgctgcaacctccacctcctgggtccaagtgattctgctccctcagcttcctgagcagctgggattacaggtgcctgccaccacacccagctaatttttttgtatttttagtagagacagggtttcaccgtgttggccaggctggtctccaattcctgacctctagtgatccacccgccttggcctcccaaaatgctaggattacaggtgtgagccaccacacccggcctgcgcccagataatttttgtattttttttttttttgagagtctcgctctgtcccccaggctggggtgtagtggcacgatgggttcacgccattctcctgcctcagcctcccgagtagctgggactgcaggtgcctgccaccacgcctggctaatttttttgtatttttagtagagacggagtttcgccatgttagccaggatggtctcgatctcctgaccttgtgatctgcccgccttggcctcccaaagtgctgggattacaggtgtgagccactgcgcccagccaacaatttgaacttttatctgtcaaatctatatgcatccttagcaagctttgtaaactgcctggtaactgatagatcttggttcacttagcttcccaaattatgctgttatcatcttgtctctctgttctttaaatatctggttgggagggtatggagagagagggaggaagaaagacacctctgtaagtttgaaattatttgcatcccccccaccgcccaccaccaacctttttaaaatatagagacacagagtctataccacgcctggcctaaaataattttttttagagacgggatctaacagtgttcccccagcttggctatcttaaacttcttaagggtagctagttctaagaactgcttttttctggctaggcacagtggctcacgcctataatcccaacactttgggagaccgaggcaggcagatcacctaaggtcaggagtttgagactagcctgggcaatatagtgaaatcctgtctctactaaaaatacaaaaattagctgggcgtggtggcatgcatctgtaatcccagctactgggggcgctgaggcacgagaattgcttgaacccaggacacggaggttgcagcgagctgagatcatgcactgcactccagcctgggtgacagagggggagactgtctggaaaaaaaaaatgtttaaaacaaaaaactgtttttttgtatgtgtgtttatatgcgaaccatttgtgaaagtggtcccagcatgatgccacatgtgtcatttccaaatatttcagtctgtatttttttctctctctctctgttttttctgtcacccaggctggagtgcagtggtacgatctggctcactgcagcctcgacctcctgtgctaaaacagttctcttgcctcagcctcctgtgaagctggtaccacaggtgcatgccactgcacccagctaacttgtagagattggggtctcactttgttgcccaggctgttatttgactcctggactcaggtgatcatgccactttggcctgccagagtgctgagattacaaaagtgagccaccacactcagccataaatgtgttgttgttgttgtttttgagacagagtttcgctcttgttgctgaggctggagtgcaatggcgcgatctcagctcactgcaacctcccccctcctaggttcaagcgattctcctgcctcagcctcccaggtagttgggattacaggtgcctgccaccacgtccaactaatttttgtatttttaatagagacggggtttcactatgttggtcaggctggtcttgaactcctgacctcaggcgatccacccgcctcggcctcccaaagtgctaggatcacaggcgtgagccactgtgcctggacttgtaaatggtatttcaaagtaaaatatatgtcattgcatttatcaagataatttgattgagctttgtaggtcctagccatccttctgcctattactgggctttttgcaaatgctgttcctgtttccacaacctggagcattgtcccatcccttttattgtttctcttgctgttatttattatgtcatccatcatcattataccattcctctgccaagaaacatttaatttttgtttttgtttactattacaaaaatgttttatagaatattgttagacttacattcttgcccctcattgtggaagtattcctgtagtatgaatacagccagaggttttttagttttgttttggtttttttgaggagtcttactccttcatccagaggctggagtgcagtgacgcgatcttggctcgctgcaaactccacctcctgggttcaagcgattctcctgcctcagcctcccaagtatctgggactacaggcggccgccagcatgcctagctaatttttgtatatttgtagagacgggggtttcaccatgttggccaggctggtctcgaactcctgacctcatgtgatccgcctgcctcggtctccaaagtgttgggattacaggtgtgacccaccgcgcctggcccagtgagagttaaagggccagagtggaagcaggtctttggaagcttggctctgtcttccttcagtgcagggagtttgtgttgtccatccccagcctctacagaagcacacagtgagtgttcaataagcatttcttggatcaaatggcccctgcttcttttaatggtcagtaaactttaaataatgagatttttctgcaatagagaagagcaactgccttgtgattggaagccagcatatgttattcctaagcagttctgccttttttccacagaaggtggtcttctgccctgttaaagaagccctggaggtggactggagcagtgagaaagcaaaggctgctctgaagcgcacgacctccgactactttctccttcaaggtgaggtctcaaagcacaacttaccccgggagagcttttggctctgatttctgcaaatgtggttgcaaggtccagatggttttgtgatgtttgccttgggtggcattcttcattggctagttctcagtgatcacttgagaaaggggtggtcacttgaagggggtgaggtctaccattgagctctgggttctaatgacttctcctttttttacttgttgaaatgacctccctgtcaagttgaccttatggtaatagtgttacaggtcacagattgagaaacctctttttttttcttttttctttttttgagacagagtcttgctctgtcacccagactggagtgcagtggggtgcaatcttggctcactgcaacctccacctcctgggttgaagcgattctggtgtcttagtgtccccagaagctgggatgacaggcatgcaccactgcgcccggctaatttttgtattttgagtagagatggggtttcaccatgatgcccaggccctgaagttctgagattataggcatgagccaccatgtgaagcctgatcaaccaacttctcttcaccgccccccgcctttttttttttttttttttttgagacagagtcttgctctgtcacccaggctggaatgcagtagcgctatcatggttcactgtagcctctacttcctgggcttaagtgctccccatgcctcaggctcctgagtagctggtactacaagcacacgccactgtgcccagctagtttttgtatttttttgtagaagcgaagtttctccatgtagccaggctggacttgaactcctgagctctagtgaaatccccgcgttggccttccaaagtgctggagttaaaggcgtaagccaccagtgcttgttcccctcttcagaattctttctctgcctcaaaaccatcctcacgcttatgaaaggtggggttgtttttcctcttgctattaatgaactacttatcagtccatctttgctggtggtcaagagactgttagtaagtattggttggcttttcagtgttcttcctgtacctggcacttttttgtttgtttttgagatggagtctcgctctgtccccaggctggagtgcagtggtgtgatcttggctcactgtaacctctgcctcctgggttcaagcgattcttctgcctcagcctcccgagtagctgggactgcaggcgcgtgccaccacacccagctaatttttatatttttagtagagacagggtttcaccatgttggccaggttgggctcactctcttgacctcgtgatccgcccacctcagccccccaaagtgctgtgattacaggtgtgagccaccgcgcctggcaaacctggcacttttaatttttattttaattttttttttggagacggagtctagctctgtcgcccaggctggagtgcagtggcacgatcttggcacactgcaacctctgcctcccaggctcaagcaattctcctgcctcagcctcccgagtagctgaaatacaggcgggcaccaccatgcccagctaattttctttttttttgagatggagtctcactctgttgcccaggagagcagtggcgtgatcttggctcactgcaacctccacctcccaggttcaagcgattctcctgcctcagcatcctgagtagctgggatcacaggcacctgccaccacgcttggctaattttttgtatttttagtatttttgtattttttttgtattttcaccatcttggccaggctggtctcgaactcctgacctcaggtgatctgcccacctcagtctcccaaagtgttgggattacagacgtgagccactgcacctggctgcgctaatttttgtattttagtagagacagggtttcaccatgttggccaggctggtcttgaactcctgaccccaggtgatctgcccacctcagcctcccaaagtgctgggattacaggcatggtagttttttaaaaagtattttttttaatgttatttatgcatttatttttttgagacggagtctcactctgtcacccaggctggagtgcagtggtgcaatcttggctcactgcaacctccacctcccggttcaaacagtttccccgcctcagcctcccgagtagctgggattacaggtgcccaccagcacacccagctaatttttgtatttttagtagaaacggggtttcaccatgttggccaggctggcctcaaactcccaacctcagatgatccacctgcctcggcctcccgaagtgctgggattacaggcgtgagccaccacgctcagctggatgaactatttgaaagtcccgaatatccatttgtgtagaaataaatgggttgagcaggaatgagtgttgcatgtgagtgggctgcactcagaaaatgcctcctcttgatagtgggatcaggtgtggaagaggcaccagcagtaagagcagagtcttttccatgtgggaacagtgcctgggccctttgggagaagcttgttgctcactgcctcgcacatagaaagccctcaggaaacaatggcgctaatttgccaaggtttgggtttgacttgagcatctctaactgctgcttatgaaaggagtcaactgggctgggctactaaaaatacaaaaattagccggatgaggtggtgtgcgcctgtaatcccagctactcgggaggctgaggcagaagcacttaaacctaggaggcaaaagttgcagaatccgagatcatgccaaagcactccagcctgggtgacagagctgaactccatctccaaaaaaaagggggagaaacagagtcaatcacagatcatctactccagagttgaaaagtgtacacgccaaaaaaaaaaaagagaaaagaaaaaaagcacatatcttcacggatgacagagttctctaggacttgctctgtgccgggcgttttccatgtatatcaccttcatctcacaaaggccctcaggcaagtgctattaacaccaccagctacagaggggaatctgaggctcagggaatttaaagtcagtggctcaagatcacccatctaaaacaaaatggcagtgcccactggaagccaggtctgttttgattccaaaggtcttgttctttttctttttccccagagacagagtcttgctctatcacccaggtaggagtgcagtggggcgatcttggctcactgcaacttctgcctcctgggttcgagcgattctacaggcacgcaccaccacacccagctaatttttgtattcttagtagaggcagggttccaccgtgttggccaggctggtctcgaactcttgacctcgtgaaccgcctgcctcggcctcccaaagtgctgggattagaggcgtgagccaccgcgcccggcccaaagtcttgttcggaacaaccatgcaccactgcctgccacagaagtcatatagctactgtttcttcctcaaccacctgtccacccctccaaccccgtaacttctgatgctgatgtccagtagcacctgcactgaatattcactttgctcctagatatcagttttgtcccctcagttcaatgacccctgtgatgttgagatggatgagaaaatactctggaaactgcagaggataaaatcaggatttcctcacttcagcacactactgacattctgtgctggataacactgtcacgggggactgtcctgtgcactgtgggatatttagtaacacccctatcctctactcactagatgccagtaatatctccccacccagctctaacatcaaaaaatgtttccagacaccactgccacatgtccccagttgagaaccactggattatgctaaactcaaaggccagttgactcctttcttttctttcttttcttttttttttttttttgagacggagtctctctctgtcacccaggctggagtgcagtggtgcaatctcagctcactgcaagctcagcctcctgggttcacgccattctcctgcctcagcctcccgactagctgggactacaggcgcctgccactatgcctggctaattttttgtatttttagtagagacggggtttcaccgcgttagccaggatggtctcgaactcctgacctcgtgatccacccgcctcggcctcccaaagtgctgggattacagacgtgagccacttcgcccagcctgtttacccttaattccatccctcagtgggtattatggcaacagtctcatgagtgcctatgaccctttgctggataatatatcctatcatgtttaccactctctcccagatggcattaattatctgtctttttcagttttgagttccagggctttggatatggtaatcaaaacattaaaactatgtgcagtaaatttcttttcttttttctttttctttttttttttttttggtgtggtgaaaagcacataacataaaatttaccattataacttaagcgtataggtcagtaataatcatacaatgttttattttattttgtttttttctgagatggagtttcgctcttgttgaccaggctggagtgcaatggtgcgatctcggttcaccacaacctccacctcccaggtttaagcaattctcctgcctcagccttctgagtagctgggattacaggcatatgtcaccacgcctggcaaatttttttttttttttttttttttttgtgagacggagtctcgctctgtctcccagcctggagtgcagtggcatgatctcagctcactgcaagctctgcctcccgggttcacgccattctcctgcctcagcctcccgagtagctgggactacaggtgcccgccaccatgcccggctaatttttttgtatttttagtagagacggggtttcaccatgttagccaggatggtctcgatgttctgacctcgtgatccgcctgcctcagcctcccaaagtgctgggattacaggcgtgagccaccgcgcctggccacatttttgtatttttagtagagacggggtttcaccatgttggccaggctggtctcaaactcctgacctcaggtgatcctcctgcctcggtctcccaaagtgctgagattacaggcgtgaggcaccgtgcccggcagtgagaacatttacaatcacatattgtgtagcatcaggaaggatttttaagatcaaagttagcacattagaagtggaaataatttaaaagtggccttgattttttttttttttttttttttttgcctactgtaaagtcaagcctcagtaacattctgatttcaggatgcagggtggctttgggggatatccaagttgagtggtaaactttgtaggcactactcttgtttccatgttcctggcacctaagttgatatattttctcacagtcttgtgacaatctttgaagtatagttgttatcccattttcctataaggagaccaaggttgagcatggttgtgattgccgaaagtcatatccgtggttttatagacagtcagaatttagaccatgaggtttgttttacctgtggacttagttttcaacatatttaagatatatctgtagtctgggcgcggtggcttatgcctgtaatcccagcacattgtgaggctgaggtgggcagatcatttgaagtcaggagttcgagggcagcctggccaagatggtgaaatcccgtctctactaaaaaacacaaaaattagccaggcatggtggcacatgcctgtagtcccagctacttgggaggctgaggtgagagaatctcttgaacctaggaggcaaggttgcagtgagccgagatcgtgccactgcactccagcctgggcaacagaacgagactctgtctcaaaataaaataaataaaatatctctaaactaatatatctcattaaatttcagatctggagttctgtgagttagggaaacaggatcaccaccatagtagaaaaaactctggtgcagatagttttagacacaaagattatctgaattcaggcccagataattgtcttctttttccccaagaaacatttgaattgtatttctgttagataagcatcatagtaaaaagtcttcaaagtttttgaaggcagaaaaagttttctttgttaaacccttcccatttttttgtcttctaaatttctaggagaactactgttaagttttttagtatcttgttgaacaatggttaacaattataatcatttgtgtttatgtaatcaaactgtgaaacaccggttgggaacttgcttgtgtacacttgatggcgtaaatggtaggggaagagcatacatacaaaagtggcctcttttgctttcttggcagcatgatgttatattcctttggatgtaccgtcatctatgaccagtctcatcttgaaaggcatgcttattttccatttttcccagtgcttggaatttgtttccaaaattgtttctaggaacatgactaatgtgactgacgatgccttaggaattcctagtggggacaaggtgcttggctgggatgcatacctaagaatatctcacaaagaaacctgattttgtttcactattgcctaatggcgcacatagtaggtgctcaataaataaatattttttgcatgagtggtttttgcttgtctggtcatttgccctattgtagagggagagcagtgtgcccactggagtccccacagggtccttttgcctgcatgcctacccctgtggcacccatcaggcttttgattccaatgttgccctgggctctcactcacaggtagatgttttttattgccccattcacaattcagccacctgctgtccgcatgcatgtgcttgccatgtttagatattgggtgtttttccagtttacttaataagttagtggccagactgtacgcttcctgctgcatttttccactgtcttgagagttggcctcgccatctgtgagcaaaaggtctcttctttttattattctcccatggcatgttgcaaaacagtaagcgtgagctggtttcctgtggcaaaaaaatgactttgatttgttctttttgaggttactgtgagtttatcataacaggagtgctaaaaataccgagtctggtatggaaacagcattcacttaccagcatgaacaataacatacaggtttagcctagagcaggaagaaatggacttcatctcaagatgagaatacttatcagagaattcttggcaatcttaacttgctcagtctctgttctgatgagttatggaaaagtacttagaccatctttgagccacagaattgaagctgaaaatattcttagaccaaacattttgtgagcacctgctatgtaccagatctcatagctgggactaatcagaggaagaggaatagaataagtgttcttgccaatgtgaaagacaaacaaataattctactccttgtgaggacagctataacagagggctatagaaactatcatgtgttgttcctggtttttgtttgttttttttcccccccaaaacagggtcttgctctgctttccaggctggagtgtggtggcacaatcataactcactatagccttgaactcctgggctcaagttatcctctcacctcgacctgcaaagtagctgggactacaggcgtgtgccaccatgtccagctattttaaaaaatctgtttgtacagattggggcagggaggtcttgctatgttgcccaggctggccttgaactcctggcctcaagaaatcctctcacctcagtttcccaaagagggactataggaaagcaccaccctgcctggctcgttgttctgtttttaaatacatttgcattattccataataatcaaagtaatttattatgggaacttaggaaactgaaggtctgaccatctttggggagttgtgaagtcttgacagaggaggggagatctgagctgtatttctcggaacaggtatttgccaggtgggaaagagggaagaatattgcagagcaacacatgcacagggccagcaggatagaggctgagcctcggaggggactggagcttggagagagcaggctagtggtttccctattgatagaatatcagaatctggccaggcgcggtggctcacgcctgtaatcccagcactttgagagactgaggtgggcagatcatgaggtcaagagatcgagaccatcctggccaacatagtgaaaccccatctctactaaaaatacaaaaattagctgggcatggtggtgtgcgcctgtagtcccagctactcgggagggggaggcaggagaatcgcttgaaaacctggaaggcagaggttgcagtgagctgaggtcgcgccactgcactccagcctgacgacagggcaagactccatctccaaaaaaaaaaaagaaatctatctatctatcagtcagaatcactgaggaaaccgttgaaaaatgcggagtgcctgcttgtagctcacattactgaatccagatagctaggagtgacttgcatgtctgcatttttctatagcacccaggtttctcaaatcagccaagttaggggaaagtactgtcataggaaagggaagcccatttcccaggtcaaagcctttgcttactcgtttatgtttattttatttttgagacagagtctagctttgttgcccaggctggagttgcaggtgcaatctcagctcattgcaacctccgccttttggattcgtgcaattctcctgcctcagcctccaagtagtggggatcacaggcacacgccaccatgcctggctaatttttgtatttttagtggagacagggtttcgccatgttggccaggctggtctcgaactcttgacctcaagtgatccatgcacctcggccttccaggtgctgagtttataggcatgagccatcgtgcatagcctgcgtttttcttttaaaatgtgttaagcactgtatttcaaattacatttgtgcactgaagcagggaggaaaaaggagctaacccaagtagctgttcaatatagtattttgactgcataccctcaaagtaaagaaaaatctcacctggcgcggtggcttatgcctgtaatcccagcactttgggaggctgaggtgggtggctcacagggtcaggagatcgagaccatcctggctgacacggtgaaacctcgtctctactaaaaatacaaaaattagccgggcgtggtggcgggcgtctgtagtctcagctacttgggaggctgaggcaggagaatggtgtgaacccgggaggcagagcttgcagtgagccgagatctcaccactgcactccagcatgggcgacagaacaaggctctgtctccaaaaaaaaaaaaaaaagaaagaaaaatctctagccggtcgcgatggctcacgcctgtaatcctagcactttgggaggctgaagcaggtggattgcctgagctcagaagtttgagaccagcctgggcaacacggtgaaaccctgtctctactaaagtacaaaaaaattagccagacatggtggcacactcctataatcctagctacttgggaggctgaggcaggagaattgcttgaaccctggaggcagaggttgcagtgagccgaggttgctccattgcactccagcctgggtgacagagcatcttaagaaaaaaaaaaaaagaaaaactctaaataaatattgaactctgcttagtagggattttgttttcagatgaggtcttgctctgtaccccaggctggagtgcagtgtcacgatcataacttactgcagcttctccctcccagctcaagcaatcctcacatcacagcctcccaagtagctgggattataggcaagtagcagggattacaggcatgcaataccacacccagctgattttggtattatttgtagagacggggtttcactgtgttgcccagggtagtctctgtctcctgggctgaagtgagcctcctgcccaaagtgttgggattacaggtgtgagccactttgcctggcctagtaggtttgtttttcacagtgataggggttagcaattctgaaactacttactgttcttctaagattgagcagataggtaagtatagtgttaatagtgagaatcaagttttcttattgtcagaaaagggtgttcctatgaatgtggacagtgggaaaggctagaaggagccatgtggtattggattggaattgaagttatctggatgaactcatggtttcttatacgtagatgtagtaatagatgtatgtgtgtatgcatatccacttttacacgtgtttatttcctagaattgtttcctagaattgttgagagggtttatgcccagagacatcccagaagcactgaacgcactcatgccaagatgttaatacctttcctcactaaagagaaaccagggttccttggagaaatggctgtttccagatctggggtaggaaaattacaggtgagcttggaatatcctgctatgccagaaagtaaggaagtgctctaagaatgataggggcatgtcaaaagaacaagaagaataatcaattaatgtaaacaaggaattatgaagataacaaagtctatctttgactatcaccatagtagtaacaattgtttcaatcaagaatcaaagtgctaaaatcaatggggaacagtttgcggtgaaacagtgtagatgtttccttatcagatgcttttatgctatgcctggtggctcacccctataaatcccaagaggctgaggcaaattgatcacttgcacccaggagttttgagaccagcctgggcaacaaaacgagaccccatctctacaaaaaataaaaaagttagccagatacagtggtgcatgcatgtagtcctagctactcaggaggatgagatgggaggatcggttgagcgcaggaggtcgaagctgcagtgagttgtgattgcaccactgcactccagcctgggagcaagactttgtctcccccgaaaaagaagatgcttttaaatgaattacatagagagacattggagaaccctggcaggttgtacctcagctgagtgatgaaattaacaatctagggatggacagttagacctcatgcctcttggaatatgtaaccctgggttggatctgagaatagaggaaggttttttttcttttgctctaaaggatgttagtggaacaattggtaaaaagaggccccggcgtggtggctcacgcctataatcccagcactttgggaagccgaggcaggtggatcacctgaggtcgggagttcgagaccagcctgcccaacatggagaaaccccatctctactaaaaatacaaaattagccaggcgtggtggtgcatgcctgtaatcccagctacttgggaagctgaggcaggagaatcgcttgaacccaggaggcggaggttgtggtgagccgagatcgcgccattgcactccagcttgggcaacaagagcgaaactctatctcaaaatagtaataataataataaaataaaaaacaaataaaaaggtctgtaggttagatagcagtactgtttccatgttatttatttttacagttatgataattgtctcatggttatttaagagaatggtttttgttttgtttttcttgttttttcttttcctttttttttttttttttttgagatggagtctcactctgtcgcccatgctggagtgcagtggcatcatctcggctcactgcaagctccacctcataggtttacgccattctcctgcctccccctcccaggtagctgggactacaggtgcccgccaccacacctggctaatttttgtatttttggtagagatggggtttcgccatgttagccaggctggtctcgaactcctagcctcaggtgatcctcccacctcagcctcctgaagtgctgggattataagtgtgagccagtgcacctggcctctttttttttttttttttttttaattttacagaattttttttttttttaagacagagtcttgctctaaggctgtagtgcagtggtatgatcacagcttgctgcagcctcagcctcctggactcaagcgatcctcccacatcacccttctgagtaggtgggattattgtaggctaaatttttaattttattgtagagaggcctcactccatggcctaggctggtcttgaactcctgggctcaagtgatcctcccacttctgcctcccaaagcattgggataacagacgtgagccactgcacccagcctgttagataatttagaaaattttctttcctcattcttcaatttcccctcattcacactcccaactttcctgttttgtgatttttaaatgacgttgtctttggatgccggctggatttggtgattagttctcttcagaagaaacttcttattttagaacttgtaacctttgcaaagcaggccataggcagccatcgctatttgggtatgacattccccagtgggtttttggtgtccagtaatgacaaaaactgctgagaaagagacagccacagggaaatgggttccgataatggggcagcagctgagtgcttgttgatttgctgctgtcatgaccacagatgtttaaaaataatttgtaaggaaaaagaaaaaagcgtagtgtgtgtgtgtgtgtgtgtgtgtgtgtgtgtgcgcgcacgcacgcgcgcgcgcacaccactgccttatcagtggtagagaatgcagaccacagtcattcagaaaggaagaaggcaccaccatggaaacaggagaggtgaggagaagggcagaggtgacccacaaatgcggctcagtgccttacagcagagagctcatgagagaacagaactggttagtcaccgactctgctcctcggtctgcaagagaggttcagcaccaagtctatactacacagtactggaaggattagatgaaggcctggcacacattgtgaattaatagttactggttacaggcggggtgtggtggctcaggcttgtaatcccagccctttgggaggccaaagtgggaggattgcttgaggccaatagtccaagaccaacatgggcaacatagcaacaccctgtctctttttttgactgtttttttgaaacagtctcgttctgtcagccaggctggagtgcagtggcacaatcttggctcactgcaacctctgcctcccaggttcaagcaattctcctgcctctgcctcccgagtagctgggattacaggtgcctaccaccacgtccggctaatttttgtatttttagtggagatgggctttcaccatgttggccaggctggtctcaaactcttgacctcaggtgatccacccaccttggcctcccaaagtgctgggattacaggcgtgagccactgtgcctgaccggttcacgtactttacatgcattgtgatcatattaaatcttcatgacagccttactagatcaggtcttgtcctgttttcacatgaggaaattgaatcttggaagggctaagtcatttgtccagggtcatcacacgcagtaagtgttagagtctaaacgagccagagctgtcacactgtcatccccagggccttgtgtttaagcatcgcccaacaaagtgctcagtcagactttaattattagcattactaataataccattatgatgattattttgtctaaacttcacaggcacctcgtgacattttcttattccacttttgcagatgggaaactgaggcccaccaagatcagattacaataatgggcaacattgtcagcaacctgccttgctttttttcttagcaggcccacatctcccccactcccccacccacttggcagtagcctgtgtttgagctgctcacaggccccaaggcccagctgcaattcttgtttaaagcctcacatcttttctctgactgtcagacaacagtcacgggaatgtcctgtgccatcttccctcggcaagaggggttggcagagagcagcagatgcctagagtcaaggtcatgtgctgctcaagtgctgggctggagacaagaccctctctccctgctgcttgtgaccaggcagggtggctctgaatgtagagggctctgtcagaacagttctgtgaccagagggtgtggttggcaaagcaatgcattaggggcccatggaagtttattcttgttgtccacattatttccctgtgacttttagatttttttttcctttttgtaaattagttttttcatactagttagaatgtttcaccttaaaggtgagagtcaagctctggaatcgcctgacatttttaaggaaaggaatagaatattgggctggggctagtctgaaatggtggtttgtattattttaaattgatgggctctgggttaggggagccaaatccattttaaagtgatttttgtaaaaattggcatgtcttctgtttcttctcttttccaaaggtgacactataacgtagaggttaagaatgtggtgacttttaaatccgtcgtgaccataagcctctcctaagccccagttttcctaccactaaaatgggggtggtaacagttgtacctacctcattctgtcttttttgttttttgcttgtttgtttgttttttagatggagtcttgctcttgtcgcccaggctggagtgcaatggtgtgattttggctcattgcaacctccacctcctgggttcaagcgattctcctgcctcaacttcccgagtagctgggatgacaggcacccgccaccatgcccatttagtttttgtatttttagtagagatggggtttcaccacgttggccaggctactcttgaactcctgacctcaggtgatccacccacctcagcctcccaaagtgctgggattacaggcgtgagccaccactgccggcctcgttctgtcgtatttttttacgtaggagagctcagtctgaatgtaggatatgacatggttgtggggttttttttgtttttgttttgtttttgttttgttttgttttgttttgttttgttttgttttgtttttgagacagtctcactctgtcccccaggctggagtgcagtggtgtgatagctcactgaaacctctacctcccaagttcaagcgattctcctgcctcagcccccaagtagctggaattacaggtgcccaccaccatgcccagctaatttttgtagttttagtagagatgaggtttcaccatgttggccaggctgctctcgaactcctgacctcgggtgatccacccgcctcggccttccaagtactgggattataggcgtacttggaaggtaccatgcccggccattatatgctttttaaaaaaacctaaatgttgcaaaaaacatgtgtctaaaatctctgtttcaacatagttttttaatagccatgtaatattccattctgtcaatatgtctttatatgtggtacagactgagtgtctaaatccaagaacccaaaatctgaatttttttttatttttcatttttatttgtttacttatttttgagacagagtcttgctctgtcacccaggttggagtgcggtggtgtgtcggctcactgcgacctccacctcccaggttcaagtgattttcctgcctcagcttcccaagtagctgggattacaggtgcccgccaccatgcctggctaattttttgtatttttagtggacacgaggtttcaccgtgttggccaggctgatcctgaactcctgacctcaagtaatcctcccacctctgtctaccaaagtgctgggattacaggctgagctactgcgcccagcctatttttgtttttttgagacagagtctcactgtgtctcccaggctagagtacagtagccccatctctgctcactgcaacctccgcctcctgggttcaagtgattctcctgccttagtctcctgagtacctgggattacagacgtgtgccaccacacccggctaatttttgtatttttagtagagacagggtttcactatgttggccagcctgatcttgaactactgacctcaagtgatccacccatctcagcctcccaaagtgctgggattacaggcatgagccaccgcaccaagcccccaaaatctgaaatgttttgagtgccgacataacactcaaaaaaatgcttattggccccgggcgtggtggctcatgcctgtaatcccagcactttgggaggcctaggtgggtggatcacctgaggtcaggagttcaagaccagcctggctaacatggtgaaaccccgtctctactaaaaatacaaaaattgaccaggtgtagtggtgggtgcctgtagtcccagctactagggaggctgaagcaggagaatcacttgaacccaggaggcacagcttgcggtgagccgagatcccgccactgcattccagcctgggcaacagagagagactctgtctcaaaaataaaaataaaaaaaaaataataaaagctcattggagcattttggatttgggattcttagatttggggtgctctattggtaagtacaatgcaaatatttcaaaatctgaaaatacccaaaattcaaacacttctgctccctgacatcctgtgtaaacaacactgcagtgaacatttataggtaattcattcagcgggtaagggtcaggaccttttatagggatccttaataccacatttttacatggttcattgagcattcgtgctcccctctgctgtgggtgagggtgcaggtccctcagccttcttgcttgggttgagtcatcctggtctttaatttggtaagcaaaaaatggcatcttgtttttgagctcgtttctgagaaagtgcatgctccttttccccatcaacaactttcatccggcgcctcggaacctcttcagtagagagtgagatgcaaatagcgaggcacagcttctttccctcttctgagctgatgcctggtgaggtcatagactgggtttcattgcaaagacgaaagcgtgggcaggacttttggagcacaaaaaggggcatttcagagtagtcttcatgggcggccactccagaggtgaagttttctagagaaagacatgaaagtactgtgtggctgtggcgacagacagaggcttacgagcctgccctctagagactgtgagctccgcgtgtgagggcaaggcctggggctgtctgggtcgcttctgggtccccaccacagctagcatagggtaggggtggagggggggtgctcaggaagtgatttttgaagagtggatgactgaatacatgcacacacatacttttaagtttctgggttaaagaggaaaacagaatgaggtaaacaaaggaaagtaatgtggaggtgaactgagcagatggcaagatgccgtgaatggttagaggccaggagagccagaatcagagtggcttccgtgaagtgtccctacctcctcccccagcccagctatgtcactcctctgagcttcacacctatggactgttctgcaccctagccctcagatgcaacggtgaaagtgggactcctattgggtttccctgttgaggacagacatggtgccctgtgtatctgctgctgcttttttctttttttcttgctgagtattccatgtgtagcatgtttgtaacacttgataagaaacagaaccatcccagatagcttgaacacttttcaattcagtcagtaacagaccaggtctgctttggatttccaggagcttgtgtcactttattttttttctgagccagggtctcgctttgtcacccagctggagtgcagtggtgcaatgtcagctcaccacagcctctgcctcctgggttcaagcaattctcgtacctcagcctcccaagtagctgggactacaggtgcctgccacaacacccggctcatttttgtgtttttagcagagacggggtttcaccatgttggccaggctggtctcaaactcctgacctcagttgatctgcttgccttggcctctcaaagtgctgggattacaggcgtgagccactgcacccggcctctggattgcccgggcctgtgtcactttgtcatgagcccttctcccctagttatcctttattcttcaaacaggcttcctgtgtgacatattttttgagtgcctgctatggggcaagccctgtgccaggtgttcagtatagagtagtgacatcgcctttgccccacagagcataaaaatctaatggaggagacaagccagtccttgtgctagttcatttccacaggtgaatataaaaccacaaactgggcagggcatggtggctcacgcctgtaatcccagcactttcagaggacaaggcaggtggacaacttgagctcaggagtttgagaccagcctgggcaacatggtgagacctcgtctctacaaaaaataaaaaatgaaccaccaggcatggtggtgcatgcctgtagtcccagctatttgggaggctgaggcaggaggatcacttgagttcaggaggtccaggcagcaatgagctgagattgtgctgctcattccagcctgggtgacagactgaggccatgtctcaaaaaaaaaaagaaaaaaataatcacaaactgtgagtaaggtatctaagggaaaaaactgtgctgggagtgaatgtcaggagacagggagatctgaggcagtatcgtgtccagagcccacagctgaattaatggtaatgcaggtaaatgagctactgtgtgacacaggttaccacagcaagtgtatcggcttttctagggcgagtgtgagctgggtttctggactttgcttaagagcagtgacagacctggaagatactgccccaggcactcttgggtgctttacatgtattggttcatttaatctttaaaccccacaagtgcccttgggattcccattttgcagaggaggctcagggtccttgtcacttgcccaaggtcacagtaagtggaagaatagggagtctagagctgtgctcttcgctgctgccctccagttggaaagctgtccaggccagggacaggctttgcagagagaaggtacagaggacgggacaggcaaatattcagagactatgaggactgaggtggttctgccaactgtggagggcctggtcacttgacaaggcacctcattgcacccccctgaggctctctcaaagccccttttcgagttaggacattgttatctcctgtgtagtttttgttgattgccctctgaaatgctgtgagagggtagaccatccattctgccctcgcctgcccagcccagcacctggcacagtcattgctcagtgtatatttattgaatgaacaattgactgaatgtcaggcccagggctttgccttaggaaacaggctgttggataagaggtagtactaccatactttgcaatttttctggaaatttatgtcacctgggagtggagcagattaccaggctgtttccagagatagcgactctccataaagtgagccaacctgggggctgggcgcagtggctcacgcctgtaaccccagcgctttgggaggctgaggcaggcggatcacgaggtcaggaatttgagaccagcctgaccaacatggtgaaaccccatctctactaaaaaatatgtatataaatgagccgggcgtagtggtgcgtgcctgtaatcccagctactcaggaggctgaggcagtagaatcgcttgcacctgggaggcggaggttgcagtgagcaaagatcgcgccactgcactccagcctgggtgacagagcgagactctgtcttaaaacgaacaaacaaaaaaaacaaaagtgagccaaccctggggaggagtctacgttcagctgcagggagccagggaattggggccgaggtgtctggcacagaaaagctttgggcctgtctcaggtaaatgaagttttgatatagattcaactcccctgccccccacaattgaactgtttttgggggccagcaattaggggctaatttgtgacagtgactttattttcttcctactaaagtactggtttattcggtggccttggtgattagatttaggcataatagttaaatgtaatagaagtttatgtaacaaacagtgattaataatgttgctgtccagattcccgttatagcgctaacctgatgttatgaactgagattaaatttgaatttgagtgcttacattattttgtaaaggtggttgtatattcacatatccacagttttttctataaataacgtgaaaccgtgcttggtttctcttttccaaagtttgccttttccattacatgggcaagtcctgaacctaagccgagacactagtccatcatctccagcaatgaatgtcatccccccagacttcagcatcctgagttaattaaaaggtgcagatgaagttaatcaagtttggaactctaattttgtgcagtgttttgatacgatttgatgagtcatcttttggtagagcacctctctatccctgacagtgtttgatcttaacggaacagttttataatgtgtaaactggtgggaggtgctcttcagaaatgcagtcaacagtggtatgtgtgcgtgtttggctcttggggcggggcggaaagcagaacaaaggagaatttaataagcgagaacttgtcaggggctagggtcagttctgaggctgctgcctgtcaagaacatggctttcttcctgcccccctccactgctgctaactggagtctgaccttcgagaaagagtgaaaaaagacagcttctgtttgttttgctgcaagtaagtggctggactgattggcccccttcccagaggccctgcaaggacttcagatgtggtcagcgaggtatgtggatggtgccagcctgccggccctcgtccagccaaactgcaccaggaacaggcaagggtcccagagaaacagcggggtcagctgctgccgcctttgctcctgctcttaatgctgtcctatttcttcctaagaggaagctggtttactctctcaagattgatgggcaaagttttatatgaccacggtctccacttctcacccactgaacttacagcttgaaattaacagaggcgaggcccatctggaaaaatgcatttgacaaaaacttgatcaaatgggggatcccctgaggtgggtggcaaagaaccagaccacttggaatcctaggtgctgtgtccctgtatggacctgctgtttcttttggattccattagggttaagaagcacaaattctgaagctagatttgagtttacatttctgctccagtacttgggagttacagtgaccaagtcatttaatgtttctgaacttcagtttcctgatctgtaaagtaggatgggtaggttgggcgtagtgggtcatgcctataatcccagcactttgggaggctgaggcaggaggatcacttaaggtcagaagttcgagaccagcctggccaacatagtgaagccccgtcactagtaaaaatacaaaagttatttgggcgtggttgtgggcgtctccagcctgggtgacagagtgagactccatctcaaaaaaaaagaagaaaaacaaaaacaagtaaataaatgaataaaaataaaggaatccagccatctgttagtatagccaaagcagaggatattgcatcaaatgttaaacgctagtcctgtcagtcactcctgagagaacagggcaacaagacccagaaagggtatcaacactgcctgagcagatggaggcaaagctgtgcatgggctgcttatagggcacagtctgaggccttgcagcagtcacgtggaaactgaggctgcctgctttccaggtgcaaggtgatggacagtggcaggaaccctgtgctagatgactcttgtgcgatcttatttctttgttactgggacacaagcaccaactgtcacaagggaccaacaagaggaggtgattttttttttcagctgttaccacaaagcttttcatcttttggtttgaaaacatagctgtgggaataggccgggcgcggtggctcacacctgtaatcccagcactttgggaggccaaggcgggccgatcacaaggtcaggagatcgagaccatcctggctaacacggtgaaaccccgtctatactaaaaatacaaaaattagccgggcgtggtgatggccgcctgtagtcccagctactcgggaggctgaggcaggagaatggcgtgaacccgggaggcggagcttgcagtgagccgagatcgcgccaccgcactccagcctgggcaacagagcgagactctgtctcaaaaaaaaaaaaagaaaaaagagagagaaagaaaatatagctttgggagcaccaaagcccaaagcgttatagtgcctactatgtgtcaggcactatactaaacatttcacatggcttagcactcatgtgatcttcacgataacctggtgagcgggtaattattatcacccttcctactggtttgttgttgttgttgttgtcgtcgttgttgttttgagacagagtctcgctctgtcacccaggctagattgcagtggcacgataccggctcactgcaacctctgcctcctgggtttgagcgactcctgcctcaggctcccgagtagctgggattaaaagcgtccgccaccatgcccagctaatttttgtatttttaatagagatggggttttatcatcttggccaggctggtcttgaacccctgacctcgtgatccacccgccttggcctcccaaagtgctgggattacaggcatcagccaccatgcccggctacttaatttattttttgagacagcctctctctgtagcccagactggagtgcagcggtgtgatttcggctcaccgcaacctctgaatcctgggttcaagcaattctactgcctcagcctcccaagtacttgattataggcacccaccacactttcggctaattttcctatttttagtagagatggggtttcaccatgttggccaggctggtctcaaactcctgacctcaagtgatctgcccaccttagcctcccaaagtgctggggttacaggtgtgagccactgcacctggcctcctttattttatgggacattttttgaaaagaggcttggtccaaacaggcagtacttgccacttctgcagtcatttctctaccctgccccaaaatggttactcagttgcatttatttactacaatcggaataccagcaggacatctacaaaagtagaagtattgggtggtagcagatcagtgctctctggcatccagatcgtctagatggtcacagcctttttttttttttttttggagacagagtcttgctctgtcgcccaggctggagtgcagtggcacaatctcggctcactgcaacctccacctcccgggttcaagagattctcctgcctcagcctcccgagtagctgagattacaggcacccaccaccatgcacggctaatttttttggtatttttagtagagatggggtttcgctgtgttggccaggctggtcttgaactcctgacctcaggtgatccacctgcctcagcctctgaaagtgctgggattacaggcatgagccaccacacctggccaattgttatagctttgagttgactgccaagtgttgaggtagcattgagggttgcagaagctgtgttcttgaaaaagagaagagagtaacattctcagaaagcaaacagtattcagaagagtcaatgggtgttctggagcttttttcttttctttcctttttttttttaaagaaattaccagctgggtgctgtggctcacgcctgtaattccagcactttggggggccaaggtgggaggatcacctgaggtcaggaacttgagaccaggaatttttctatttttagtgaaaccccatctctactaaaaatacaaaaaattagctgggtgtggctgcaggcacctgtaatccccagttacttggcaggttgaggcaggagaatggcttgaacccgggaggtggaggttgcattgagccgagatcacgccattgcactccagcctgggcaacagagcaagattgtctcaaaaaaaaaaaaaaagaaagaaaaagaaaaagaaattacctcttctctgatatgcagagccccgtctatactggacaggtggaagttaccagagaaatacaggccaggggcctttgtctgacattggcactgagaaaagcatagcccagaagcagggtgtgtcttttttttttacctgggcatctgtggtttgagatcttcttggaacactttataacccatttctgaacgtctcccaggcttcagtggagccacctgttgtagcttctaaaactgtgtcctcctcagttgttctcccacccattgccttcacagatgcagagaccaagattcactcactcgccattggacctttagcacccaggtctgtctggcacaaagtaagtgccaggctggtggagtgaatgaattctacttagagaatggccctcaacacaggctgctcattaccaaaactatttggtctttaaaaagtgtgactctgatgcttcagtctggggtgggtaccaaatacttgtattttttaaagagcctcacagcaacttgaatttaccttaatttttatgtaggaacccttgtcctggtagagagtataatttgctgaataagtctactttttcaatcaacatatacggaagagatatcaatgaaagaactgacaaactgtaaagccccctctccaggtgtaaagcactcagggcttgggcctagaagctgatccatgtctctgtgtctgttctgaaatagcctgtgtgatgtgggagaaagagtattgtccttagagacaaggctcgagactggctgtgccctttccttgggcagtatgtagggaacaagaatgcctgcccgcccgcaggcaggttacctgtggacaaggtgtagtgggcagttagaaggtgttggtatgttaatcagtcttttttttttttttttttttgagatggagttacgctctatcgcacaggcaaagtgcagtggcgcgatctcagctcactgcaacctcccaggttcaagtgattcttctgcttcagcctcccaagtacctgggactacaggcgtgcgccaccacgcctggctaatttatgtatttttttagtagagacggggtttcaccatgttggccaggctggtctctaacttctgacctcgtgatctgcctgcctcggcctcccaaagtgctgggattacagacgttacagacgtgagccaccacacctggccagtctttttttttttttttctgagatgaagtctcactctgttgcccaggctggagttcagtggcacgatctcggctcactgcaacctctgcctcccgggttcaagcgattctcctgcctcagcctcctgactaagtgggactacaggtgcctgccaccacgcctggctaatttttgtatttttagtagagaccgggtttcaccatgttggccaggttggtctcgaactcctgacctcagatgatccacccgccttggcctcccaaaatgcttggattacaggcgtgagccactgcacccagcctaattagtcttttgctcctatttgtctttatttgggataaaagttatagccttgttggggtcttcttacacagtagttctgactcacagccatcatctgaacctttcctctggttcacaaccaaaattaaacatccatttatggggattgagatagttttcatagtaaaggaagttttgtttgtaatgaccttcctgtttgatgggtctaagtatatggctggcccttctggctaaagcaggctttaaactggtcctgcctagaatgtgtacctcccactccttatcatctctcttctaggtcccttcccctttccctttcccttccccttccccttcgcttcttccttccctttgttccttttcctttcctttttttcttcttttttttttttttttttgacagggtctcactctgtcacccaggctggagtgcagtgatgagatctctgctcatgtagccttgaccttctgggctcaagtgatcttctgccttggcctccttagtagctgggactacaggcaccaccatacctggctaaattttttttttttttttggtagcagtgaggtctcactatgttgcccaggattatctcaaactcctgggctcaagcgatcctcacgccttggccccccaaagtgttgggattgcagatgtgtgccatcacactctgcctcttccgggtctttttttttttttttttcccagacggagtctcgctctgttgcccaggctggagtgcagtggcacgatcttggctcactgcaacctctgcctcctgggttcaagcgattctcctgcctcagccttccgagtagctgggattataggtgcctggctaattttttttatatttttagtagagacggggtttcaccatgttggtcaggctggtctcaaactcctgacctcgtgatcctcccacctcggcctcccaaagtgctgggattacaggcgtgagccaccgcgcctggcttttttttttttttttttttttttttttttaattttacttttttgagacggagtctcactctgtcacccaggctagattgcagtggcacaatcttggttcactgcaacttccgcctgctggattcaagtgattctcctgcttcagtctcccaagtagctgggactacaggcacgtgtcaccacacctggctaatttttgtatttttagtagagacagggtttcactatgttggccaggctggtctcgaactcctgaccttgtgatccacctgcctcggcgtcccaaagtgctggggttacagctgtgagccaccgcacccggctcttccaggtcttaatagagcctttttcctctactgaaagcttccactgctttctgcccccttcaaactcatatatacttcattgaattgtttcctcggggaagccttcctgataccaccctacagagggtgtcagacgccctattatgctgtcacagcacttttcacagtaaggtaaattgcttttataattattggattgcctctctgactatgtttgttgaataaataaaaaaaggtggccaggtgccgtggctcacacctgtaatcccagcactttgggaggccgaggcgggcggatcacgaggtcaggagtttgagacaagcctgaccaacatggtgaaaacccgtctctactaaatatacaaaaattagccaggcatggtggttcgtgcctgtagtcctagctactcaggaggctgaggcagaagaatcacttgaacccgggaggcagaggttgcagtgagccaagattgtgccattgcactccagcctgggcgacagtgtgagcctccatctccaaaaaaaaaaaaaagtggctttataacctgccttctttttcttattcccagtgctcttaaagttccgtacagataaaggaagagatcccagttctgatacatatgaggaagattctgagttgttgctccagatacgaaatgatgtgcttgactcactgggtattagtcctgacctgcttcctgaggactttgtcaggttggtgtcagtatttatcactgtttagtctggacagataaagtttgttttcaggatttgccttaatttgacaagctcttttattagaaacccttcagagagcaccctgccacattctgctcgctcctgtagacttctgcctctccactagaatagcaatatataaaaaataaagaggggacagattctgatttttacaataagtatcttatattcacgtggttcaaaattcaaggcaatgtaagatctgtaaacattattctctaccttttttcactttatgtgatcttgttatctcttggggacatctccagatcagtacatagtttgctccctcttttccacagctccttagtattctagagtgtgaagcgatggagtttattgaaccagttgcctgctcactcaagttgtgttcaggcttttctaactgcgtaacactgcagtgtgtgaccttgtgtcgtacgtgtgcaggtacaactgcaggataattaggaggaagggagttgctgggtcagaaggttgtaatttatcatttggtcagcattgccaccttgcctccattggtatcctatcaattcatacccccagcagcaaaaccacccatgttcccagcatcctctcacttggacactccatgctttcaccttacgtgactacctttttgctctcataaacaggcttaggatttgattggagaagaccacatagtgactaggtcacaatctctctctctcttttttttttttgagacagagttttgctcttgttgcccaggctggagtgcaatggcacaatctcaactcaccgcaacttctgccgcctgggtccaagcgattctcctaactcagccttttgagtagctgggattacaggtgcctgccaccacgcccagctaattttttttgtatttttagtagagatggggttttccatgttggccaggcaggtcttgaactcttgacctcaggtgatccgcctaccttggcctcccaaagtgctgagattacaggcatgagccaccacgcgctccatccacatctccttccaagcagctctgggatcatgtacacaccctaattccctttccatgtcttgagaggcttcctaaactcggctttgcagtgcctccagcttgtagcagtgataatgatggctgcagtttactgagcagctgttatgtactaggcatcaggtagtaagtagccaacccagatcccaccccaggtatcattacagtgcttgctctagtagcagcatgctaccttggtttcttatcaacagtaaggtctgccagagtccctagtcctttctttgttgacttcctgctgggaacttcaggtgagcaacagcaaaccccactccatttagggccagcagtggtctttgaagcacctgtggtgccctgacccaaaaagccatgattgtcctggtacagtggctcacacctataatcccagcactttgggaggttgaggcaggcagattgctttgagcttaggagtttgaggccaaccttgacaacatggtgaaaccctgtctctacaaaaaatagaaaaattaactgggcatcgatgactggtgcttgtagtctcagctactctggaggctgaggctagagcatcgcttgagcccaggaaagcagaggttgcagtgaaccaagattgcaccactgcattccagcctgggtgacagagagagaccgtgtctcaatacatatagcgtaaggctgggcgcggtggctcacgcctgtaatcccagcactttgggaggccgagacaggcagatcatgaggtcaggagattgagaccatcgtggctaacatggtgaaaccccatctctactaaaaatacaaaaaattagccaggtgtggtggtgggtgcctaagtcccagctactcgggaggctgaggcaggagaatggcgtgaacccgggaggcagaggttgcagtgagctgagatcacgccactgcactccagcctgggcgacagagcgagagggagactccttctcaaaaaaaaaaaaaaaaaaaaaaaggcagcaatagagtggcagtgcctgagcacacgagactgagacatggaaaagcggtttccccaaagagggtgggcagggaaggaaccactttggagagaaaaccagccagcagctcgttaggctgtggctttcctcttctaggaagcagggccttcaactctgctggccggtgatgcagagccagaccgttcatcactttgaatgcccaagtagtcacttggctgcacactcacggcccagcacacagccccaggtatgctcagtggctgccgcttgccactggctgactggctgggattattggaactgaagccctgcatgacccagtccttcttcctgctgcgaagcacagcagaggaaacacttgcttctcacaaactggtcattcctccaccaagagatgagtgccccagtgagttaccatgagatccaagcctgtacagtgtcatcagccgctgacctcacggtgctgatgttacaaaggcaccttgtaaactgctgcctatgtttagatgatggctttttttttttttggagacagagtctcgctctgtcccccaggctggagtgcgatggcatgatcttggctcactgcaagttccgcctcccgggttcacgccattctcctgcctcagcctccccagtagctgggataacaggcgcccgccaccacgcccagctaattttttttgtattttttagtagagatgtggtttcgctgtgttagccaggatggtcttgatctcctgacctcatgatccacctgcctcggcctcccaaagtgttgggattacaagtgtgagccaccacgcccagcctctttttttttttttttttaagatagggtctctctctgttgcctaggctagagtgcagtggcacatcatagctcactgcagcatcaacctcctgggctcaggcaacactctcatctcggcctcttgcgtagctgggactataggcgtgtactaccaagcctgcctaattttttttttttttttttttttttgtattgacagggtctcactatgttcaccaggctgtttcctattttttaaagttatgaaccgcataacaagagagtatacaaagcacatctgcctgagttaaatgataattaatacttatttatttttgttgtagagacgggggtctcactctgctgcccaggctgttctcagactcctggattcaagccatccttctgccttggctttccaaaacttctgggatagacaggcgtcagccacttgtatctcttttaatttggaatagcccttggcaaactggcttgccacctctttttgtaaataaagttttattggcacacttactcatttatatattatctgtggcagcttttgtgccacagcagggttaaatagttataacaaagaccatatggcccataaagctgaaaatattttattatctggttcttttgtttgtttgtttgtttttgagacaaagtttcactttgtcacctaggctagagtgcagtggcatgatctcggctcactgcaacctccacctcccgggttcaagtgaatctcctgcctcagcctcctgagtagctgggattacgggcatacgccaccatgcccagctatttttttttatttttttattttttttatttttttttgagatggagtcttactctgtcacccaagctagagtgcaatggcccgatcttggctcactgcaacctccgcctctgtgctctgtggttcaagtgattcttctgtctcaacctcctgagtagctgggactacaggcgcgtgccaccacgcccggctaatttttgtatttttagtagagatggggtttcaccatattggccagactgatctcaaactcctgacctcatgatccacccagcttggcctccgaaagtgctgggattacaggcatgagccactgcacctggcctgttatctggttccttttttttttttttttttttgaatcagagtcttgctgtgtcacccaggctggagtgcagtggcgtgatctcggcttattgcaacctctgcctcccagctttaagtgattcttttgcctcagcctctggagtagctgggactataggcacgtgccaccacgcccagctaatttctgtatttttagtagagacggggtttcaccatattggccagactgaactattcctccaatacggccaaaatgagattctaccagcaatgggaggagtttttttaattattattattgggagtctctctctcacccaggctggagtgcagtggcaccatctcggctcactgcaacctccacctcctgggttcatgcaattcttccacctcagcctcccgagtatctggcattacagctgcccgccaccacacccggctaacttttgtattttagtagagacggggtttcactatgtaggtcaagctggtcttgaactcctgacctcaaatgatccacccgccttggcctcccaaagtgctgggattacagatgtgagccaccgcacccagccctagttctccatgtattttagagctctgtagtggaccttgataagcaggaagatgttacccctggatgaacaaaatgggaatgtgctggtcctggccagggcgtaaggagccggaggtgcctttggacacagctcttgggattggaatggatacagccttttgggagggcattttggcaatacatatgaaaaactagcattgctatatttagaaatttgtcttaaggaattatttcgacgcctgtgtctttgtcaagatgtatgattacagtgttgaacagcttaaatgtccctcaataggttatagaacagaagagtaatagttgataatatttgggtttaaaattatacctatttatttatttatttattttttgagacagtcttgccctgtcaccaggctggagtgtagttgtgcgatctcagctcactgcaacctatgcctcccaggttcaagcgattctcctgcctcaacctcctgagtagctgggactacaggctcaccccaccacaccaagctaatttttgtatttttagtagaaacggggtttcaccatgtgggccaggatgatctcgatctcttgactttgtgatccgcccacctcgacctcccaaagtgctgggattacaggcatcagccactgagcccgccctaattatacccgtttagattgtgcacttttaaaaatgtctagaaggggctgggcgcagtggctcacacctgtaatcccagcgctttgggaggccgaggcgggcggatcacgaggtcaagagattgagaccatcctggccaacatggtgaaaccccgtctctactaaaaattcagagtagccgggcgtggtggcgggtgcctgtagtctcagctactcaggaggctgaggcaggaaaatgacatgaatccgggaggcggagcttgcagtaagccaagatcgcgccactgcactccagcctgggtgacagagcgagactccgtctcaaaaaaagtctagaaggatgtgcaccacactggggagattggaggtagttctgtagggaggctttccctttcacttgtctgtgttccagtttgcttggtgagcacacagcattgtgttcaggagtaggagctggcagagcacacttcctttggggaagtggtggaattaagtgatttgcttactaggatgggtaacttggaggggcaggtgactgtgtcatctaaaatttgtcctctagatgccccatcctggcccagaagggctggtttctatgtgggttgtgaagactttttctgccctcatactttaatttcacgcctcaaatttcccttgcttcctacatgttaacacaggcctgctccctgacatttgtctgggaatagcatatagaacccactggccattatgggtaagaagagaattgcgagaatgtgaccagggcactgaaacatctgatatctctaggacagatataggaagcacagatatagtctttcctttaacttataaaggtaaaaataaaagtattgtgaaagaatttctgcttgccaaagttcaaaggtcttttccaaccacttatgaatcccttgctcagatttcattttcacgcctagatgccagcattaacactgctatctgaatcgggccctcctgctagaagttgtttttattcaggagagcctactactgaatttctccagatgtcatggtcacagttctgttcccagtgctccattttccttgtcttcctctcttttaggtactgcttctccgagatggccccagtgtgtgcggtggttggagggattttggcacaggaaattgtgaaggtaaaacatcactgtggagcagaaaattgttaaccatgactttgtatatgtgctgacagagagaatggaaactgtcttagacagctgcctgctttctctcaccccattcatctttgtttcatgccctccccatttccacctcatcccattttctctggcccatccaggtgccattcagcaaatgaccttggagtgcctgctctgtgcttagctcacagttggccatagtgcctcgaaggtgtgatctgctctcccctaactgtattagttatccagtgcctgttgtattggtcagggattctgcttctcatagctctataagtgagtactatcatgatccccacttaagaggaagacacttgggcccatgaaagggactccagaacctgtgctcttaacctctgtacagtttatctctattcatcaccatgacatcaaagccctcccttttttttttttttttttttttttttttgagatggagtctcgctctgtcccccaggctggagtgcagtagcacgatctcagatcactgcaagctccacctcccgggttcacgccattctcctaccttagccttccaagtagctgggactacaggcgcctgccaccacgcccagctaatttttttgtatttttagtagagacagggtttcactgtgttagccaggatggtctggatctcctgacatcgtgatctgcccacctcagcctctcaaagtgctgggattacaggcatgagccactgtacccagccgcacccccccccctttttttttttttttgagacagaatctcactttgtctctcagactggagtgcagtggcatgatcttgactcactgcaacctccgcctcctgggttcaagcgattctcctgcctcagcctcccgagcagctgagagtacaggttcccaccaccacaccaggctaatttttgtatttttagtagttcaccatattggccaggctggtctcgaactcctgaccttgtgatcctcccacctcagcctcccaaagtgctgggattataggtgtgagccaccgcacccggccaagcccccgtctttttaaccacacactgtaggtatttgtagagaaatcagtttctgtgtccccatgaacacaccaggagcccctcaaggctctgtacaggatgacccgtgaccctgttaggtaggtgttagtgtgtctctcagaagggaagcatcttatacagggtcacataaccagtaactagcacagccttttgagggtcttctggaacatttgggttgctaaaactataccatacccccaaatatattgtacattctttgcagactttgctatttgcccgaagatgttaaatttgccttttgcaggttcttggctgccttcgtggactccggtgaggctttttccttctttcttatggagcagagtcgtgcctggttaaatgattggccatgtccatgtacatgtcaagtttgagcttgggaggacagtttggaggccagcccttaacactttgtcttggggtctgtacattctggaggcgtttggctcaatttgttagtcacaccgttttcctaaggctactttttttttttttttttgtctattttttctgatccttctctctggtctaaattcttcctttgatcaaatctaactttcttctatgtaatgggcaccgaggagatatttggagggggaagaaaagtgtgcaatggccatacctctttccttgctcacattttatacatagcccagagtgatgtgaaaattacagtttatatgcccaatctgagaagagggtaatggccacccagaggactgttcgagcaggattctgaggctccctgtagacaaactgcaggaaagagtgcagcaatgggaatgttctaagtggggaatgggaatgtacatatttttgtagcctaaaatgacgacaccaccaataatagacaagacttactgaaagcccactgtctgccacacaaagacagtgttttttacgtggatactcatttcatctcccaccggccctatgaggtaggaactcctgtgatccctggtttataaaagagagactaaggtgcaggaaagaagatgcttgcccaggctagtgagtgtggtgccaggatgtgggcccaggcagtctggtttctgagcctgtcctcttcaccacggggcagtcatgcatcaggtgttgccttcaatggcaccatcatgtagagactgcatggaccccagggccgctgcccttgcattgtcagccttacttctgcacatcccattgaggggctccccctaaatttttcatgtgggatggagactggaggttggggcaggtagccttgaccccattgttggtggtagtttctcacatccccatcctcacacagccccctccttcctgcctgctggagacagctggtgcccagcatcttgtttctgtttatcccagatagccagagtactctgcattcttcgttgctgggtgtgtttggaatctcctcctaccccatcttgcttgggaagcactttaccttttgccccatgtcaccccatgccctgctctcatccccagtactccttcatacttattactggtcagccttcagccagctggcaggcggggcctgcagtccaagggcctcagactcacctttctctcctgaggcactgtctgagcgcctatggaaagcttacactaggagatgggtcaagcgcaagtctgctcctttggaatcatcttttgcgtctttcctttcttacgtccttctagataccctattttatatccatgtctacttccttgggtttaaagcagttttcctttctctccatccccaccgtccacggcaggtctccctgtctatggtaagagaggtgatagtgaaagcagcagccatcccaggttcatggtaaaacacataccatctcctgtatcttgggtttgagggtctaagagttccacctgtgtactgttggacccttccacctggctaggttggtggcatccccagtattggtaaaggactcctggccctattattattaatagcagctcctacttactaagaatttactacgtgctcggcactttacaagcctagtcacatttcattctcaccaaaactctagcaggcaggtgctttttatttgcctatttgcccagagaagcaaacttctttctgatccaagctccatgtggacagagacctcagaatccttaatgtctagctgaatacctggcatagagtagatgcttaataaatgttcccttgactgggtgcagtagctcatgcctgtaattccagcactttgggaggattgcttgaacctagaagttcaagactagcttgggcaacatgaggagacctcatctctacaaaagtcccagctactcaagagggtatgggaggatatctggagctggggagacggaggttgcagtaagccgagaatgtgcctcccacctgggtagcagaacaagatcctatctcaaaaaattaaaaacatttacaaataaataaaatttccctggaaaaatggctgactaacactatttgtatatggtagatgtgattgtccctgttttatggatgaggaaaagggtttggtgctgagtttgaagaggagcagttcaggatgtgtagccccaccttcctcatgaatgatgggacggtgctcctgggaaccgttaaaccctgccctggcagcttgcctaggtgatgtcttcctctttaaatggtagcttgtggtgaaatttcaatcctttctgggttaaggacctgtttgaaaatttgtgacaattgtgaaccctttctcagaaagatgtatgtgcatacaagactcagtatgttgtttcgggggctgaccctgcctcaaaagacagggccacgtgctcactctccttcccacccctctctctcgctctctgttgcccaggctggagtacagtggtgccatcacagctcactgcagacttgatttccctggacttaagtgatcctcccacctcagcttcctgaggcactgagactataagcacacgccaccacatccaactaattttttttattttttgtagatatggggttttgccatgttgcccaggctggtctcgaactcctgggctcaagtgattctcccgcctcggcctccctaagtgctgggattacagatgtgagacattaagcccagccctgttcttgtattttaaagtgctctgtctggtaaccccacaagataatcaccattgccattgctaaatagcattgtccaggccctctggatcccagccctgaccccctgtggaagcctagcgactctatgtcctcatggaatagcccccgcttctgcatcagtgtgttccttgattaaatgtgtccccttaggtgataaaggccacagcctaagaactgccacctttctcagttgaatagtcatgaataattatttctgctgtttgcccaatggtggtgcaacacagtgttagtcattgttttagttttaaggtgtttttttgtttgtttgttttttgttttgagacagggtctcactctgttccccaggctggagtatagtggcactattacagctcactgcagcctcaatgtcccaggctcaagcgatcctcccacctcagcctcccgagtagctggcaccttgggcatgcatcaccatacctggctaatttatgtcatttttctttttctctttttttttgagacagagtctcactgtgtcgcccaggctggagtgcggtggcgcaatctcagtttactgcaacctctgcctcctgggttcaagcaattctcctgcctcagcctcccgagtagcatgccaccatactcggctaatttctgtatttttagtagagacaggtttcaccgtgttggccaggctggtctccaactcccaacctcaggtgatccgcccacttcagcctcccagagtgctgggattacaggcgtgagccactgcgccccacctattttagttttcatatagacgggatctcaccatgttgcacagactggtcttgaattcctgggctcaagtgattctcccacctcagcctcccaaagtgctgggattacaggtgtgaatgtgcctggccctggcctgttttacatttttgagatacatagtttaacccaggcaaatacatttcttaatctcatgttaggaaaataaggtaatgtttggagaggttaaataatctccccatggacacacagcttgtaagggacagagcaaggagataggacaatcaaaattgtctccagacattgccaaatagccctttgggagcaaaatcgaccccagttaagaaccactgccctagactgcttttagaatttttttttccctctattcctcttaaagcacttgagctaaaccctcttttcatttttctccccaggccctgtctcagcgggaccctcctcacaacaacttcttcttcttcgatggcatgaaggggaatgggattgtggagtgccttggccccaagtgaactcaagatttggcagccccagagatgccaactgcagcatgcccacctgtattccctgtccccttccttcatgaaggcatctccaggcaaggaaaactgaagtcattggcccgatacaaaacatttcctgcaacgaaggaggtggtgccgacgtgctgcttcccatcaccagcagctgctcgacaaggggcgcagggtggctgtctttgttccagcactgttcaggctgcctgtcatcccgggcctgccagctcccctgagtgatgagcacttccaagcacccctctgccctttctctgtccttatgctgtcccggcctcgccagccctctggggcattgtgggagatgcctgccaggaatgagcaagctctgttgctcgggagcctcttgtcaccttcttggacttattccccacctgataccttatagagaaaagtgtgaattcaggtggagagtaggcccaggccccatgaggcaccagtggaagcacagctccaagttcagacaggtgcccttagagaggaaaaccatgacaggcaaatgcatttcctctggagtttgagaccctgacaaacaacaggtggcatctggtgtgctgttcttgagttttcgtttaggattagttgagttccagctgggttttgggagaaaggagatgctaccaagtcttggatgttagggcgagaccctgcaagttgagtattagagagcttgtctttcaaggcaggttcctggggcttcagggctaggagggaggagcctgcccttttaacagaaccccagtcacatgcggctcaagtcactcagaggctgttgcatttcagggctatgttggtcctttgtttacctcctaaaccacagctgtttgtgtttcacatatgttgtgaattttccttggttctttttaaaggaatgataataaagttacttgctttaggatttgcttgtttttcttccacttcagaagcttctgagagggaatgggatgatcctaccagttgccttttcagacctgaggctctaactcaagagattcctcctctccctcaccattcctgccaccattttttctgggtgatgcagcaagagttaaattgttcacattctagaatgtgtagaagcttctggctccagttgtctaatggataattcagctaaatagtggctattttcagtggcaagaattataataataaagggaagtcaaaagtgatgcttcatatgccccaagtgccacagccgctacgggtcagagcttttattggaagaccaggtttgccttgatgcagccaaagtgcgttccagttcaccccactcttgcttgtgtttcttctttatgtaaattgtgtgatgtttcaataaatcagtctctttcctattctgatcctgcagcagttagtcggggagaaaagtggtcttcactacagaagggcctctgttcctcaaccctgcatcacctgctcccgccggaggtgagacaggggctgcatttcggaaaggatccgtgtctcgccacctttagtgcaagtcagtggcgtcagggtcagcagttacattgctgcatgaatttcacgtggtctttaaattctgagctaattatactcttgactgtaatgtgcagccttggtcacaagggggagcaggtgggtctggattgataaaaacaaaattgtagaatcgtcccggaagcttcaaacttttccaccctgtacctctaacggcagagattaagtcacccagaggacccctcaggaatcgaggggaaagctgccagccccaggcaagaaatgtctagtttctacaaatttcataaactgccacatgatgtttgtattaatcataaaaatgaagaaaaaaaggccaggcgtggtggctcacgcctgtaatcccaacattttgggaggctgaggcggacgaatcacgaggtcaggagtttgagagcagccaggccaacgtggtgaaaccctgtctactaaaattacaaaaattagccgggcatggtggcgggtgcctgtaatctcagctactgggggaggctgagacaggagaatcacttgaacctgggaggcggaggtcgcaatgagctgaggtcgcaccactgcactccagcccgggtaacagtgtgacactccatctcaaaatctgcagtcagtcaggcatggtgggaggctgtggcgggagaagcacttcagcccaagagttcgtgaccaacttgggaaacaaagcaagaccccatctccacaaaaaaagaaatagctgagcatagtggcttgtgcctgtggtcacagctgcttgggagactggggcaggaggatcacttgagcccaggagtttgaggctgaaatgacctggatttcaccactgcactgaagcctgggtgaaagagtgagacactgtctcgaaaaaaaaatcccagcactttgggaggccgaggcgggcggatcgcgaggtcaggagttcaacaccagcctgaccaacatagtgaaaccccgtctctactaaaaaaaaaaaatacaaaaactagctgggcatggtggcgcgtggctgtaatccagctactcaggaggctgaggcaggagaatcgcttgcacctgggaggcggaggttgcagtgagccgagatcgtgccactgcagtccagcctgggcaacagagcgagactccatctcaaaaaaaaaaaaaaagttatcttgacgtatgttctattagctcattacaggtgtggaagagatggcttaggttgcaggtggtaagtttaatgataacaaccaatggtcattatacccatgcaacctgcctggtacttttcagaatccttgttctttgagttggaatccccacagcaaccccatggggatagatgctgttctcctacccatactggagataaggaaacaggctcacctcacaagcaagggagagatggaaatggcgctgactgggaaagctgcggtgcggggcactcagtagagattcatgtagtggcacggcttgttcgctcagtgagaacaagattttgggcttcccttcacaagtccctgagacccagtagtcactggaaaacatcatgtcggccttcataaaagagggccttcaactaggtccaaaagggtgggtggatttggttcctaagcttgtacgatattcaagcaatatacaagcataaagagaagattcctctccgctgcagggcacagcctgtcagcacaatgttggccacataataagagcagctgacttcacagctaaactgcattttggagagaaatatgagatgctttttggacatgttagctgtatccactttctttttttctttttcttttttttttttttttttttaatagacggagtcttgctctgtcacccaggctagagtgcagtggtgtgatctcggctcactgcaacctccacctcctggtttcaagcaattctcctgcctcagcctcccaagtagctgggattacaggccccggccaccatgcccagctaatttttgtacttttagtagacagggtttcaccatgttggcctggctgctctcgaactcctgacctgaagtaatccacctgcctcagcacccaaaatgctgggattataggtgtaagccacagcgcccagcctagctttatccactttcatatccactccccggaggtcacccctgttaactgttgagagtgaatccttccagactgccatgttcaaacctagactctaccactcagccatgtgaccctcgctacactactttctgttaccccatccctaaaatgggtagaatagtggcacattcctcagatatgtggggattaaaaaatcagtctttgaatcaaaattgctcaatgttagctgctattttacatattcataaataactttttctccaatgtgcttttttctcaatatgtcttggagatccttgtcagtatttcatgcatcaaattccataaccaaaacaggtgaaccattaactattgaatcagtctgctgctgtgtgacattgtgcacacttaggaaagacttcccaaagccaagttccagggttagcaagtataaaaatgcattttaggagttggttcttgttttttattttgttttgttttttgagacagagtcatgctctgttgcacaggctggagtgcagtggcgtgatctcggctcactgcaacctctgcctcccggattcaagcaactcctctgcctcagcctcctgagcagctgggaccacaggcgcccaccaccacgcctggctaatttttctatttttagtagagacggggtttcaccatattggccagtctggtctcgaactcccaacctgatgatctgcccacctcagcctcccaaagtgctgggattacaggcatgagccaccgtgcccagcctgttttgtttttttagtgatagggtcttactctgccacccaggctggagtgcagtggtgtgcaatcatggctcactgaaatcttgattttgagggctcaaagtgagtctcccacctcagtctcttgagtagctgggaccacaggcaggcaccaccatacctggctaattttttcccccggctaattttttttttcttttctttttcttttttttttttgagttggagtgttgctcatttgcctaggctggagtgtagtggcatgctctcagctcactgcaagctccacctcccgggttcacgccattctcttgccgcagcctcccgagtagctgggactacaggcgcccgccaccacgcccggctaattctttgtatttttagtagagacagggtttcagcatgttagccaggatggtctcgatctcctgacctcgtgatccacccgcctcggcctctcaaagtgctgggattacaggcgtgagctaccacgcccggcctttttttttttttgtatttttagtagagacggagtttcaccatgttccccctggctaatgtttttaaaattattggctgggtgcggtggctcatgcctgtaatcccaacattttgggaggtcgaggtggctggatcacctgaggtcaggagtcaccagaccagcctgaccaacatggtgaaaccccgtctctactgaaaatacaaaaattagctaggtgttgtccacatgcctgtaatcccagctactctgaaggccgaggcaggaaaatcgcttgaacccaggaggtggaggttgcagtgagccgagatcgagcagttgcactccagcctaggcaacaagagcgaaactccatctcaaaaaatatatatacatatttttagtagccatgaggtctcactatgttgcccaggcttaaactctggcctcaagtgatcctcttacctcagcctcctaaagtactgtgattacagatgtaagctactacgtctggctggtacttttctttcttttctttctttttttttttttttgagatgaagtctcactctatcgcccaggctgtagtgcagtggcacaatctcggctgactgcaacctccgcctcccgggatcaagcaattctccaacctcagcctcccaagtagctgggattataggtgcacgccgcccagctaattttttaatttgtaatttttttactttttatttatttattttgagacagagtttcactcttgtcacccaggctggagtgcgatgatgtgatcttggctcactacaacttccacctcctgggttcaagcaattctcctgcctcagcctcctgagtagctgggattacaggtgcccaccaccacacccaactaatttttgtatttttagtagagacagggtttcaccatgttgaccaggctggtcacaaactcctgacctcaagtgatccacccgcctcagcttcccaaagtgctgggattacaggtgtgagccaacactaccggccagaaatttacagatgttaaaggctcagtgaatcccaaacgggataaacatgaagaatatcatgtttagaaaaaacatctaggtggccgggtgcagtggctcatgtctgtaatcccagctgctcaagaggctgaggcaggagaactgcttgaacccaggaggcagaagttgcagtgagaatcatgtcactgcactccagcctgggcgacacagcgagactcagtctcaaaaaaaaaaaaaaaaaaaaaggaggccgggtgtggtggctcacgcctgtaatcccagcattttgggaggccaaggcctgaagttgggagtttgagactagcctgactaacatggagaagccccatcttgactaacatggagaagccctgtctctactaaaaatacaaaattagccgggcaaggtggcacatgcctgtaatcccagctacttgggaggttgaggcaggagaatcacttgaacccaggaggcggaggttgtggtgagccaagatcgtgccactgcactccatcctgggcaaaaagagcgaaattctgtctcaaaaaaaaaaaaaagaacctccatctccatgcttaaatacttgtgagcagggcaaaggccatgcagagagtgttcacacccagaccaacgccctgcttcgccttcactgcagtgcatgccatccctttggtagaggatgagacaccttcccataactggctcccctttctcataatatgtcttagaattattaacatggttgaatttaggtctaccatttgctttccatttgtcccacttttgttcccctgtttctcctttcctgccttctcttgaagtatttgattaattttttttttttttttttttgagacagagtctcactctgtcacccaggctagagtgcagtagcgcgatctcggctcactgcaacctccacctcccagcaagtagctgaggttataggctcccaccaccatgccagcgaatttttatatttttggtagagacaaagtttcaccatgttgatcaggctggtcttgaactcctgaccttaagtgatccacccacctcagcctcccaaagtgctgggattacaggcgggagccacctcactcagctaaatgttctaataaatacccatgtacccactattttgccacttgcagtttttattcatcattatctgtcatttttcttcatgttggtaaagctctagttcattcccgctaatggatgtatactattctgttgtgtgattacatcggacaaaaaaagttttttgttttttttttgagacagagtcttgctctgttgcccaagctggagtgcagtggcgtggtcttggctcactgcaacctccacctcccgggttcaagcaattctcctgctttaccctcccaagtagctggggttacaggtgcccactaccacaccggccaattgttgtatttatttattatttatttattttttattctttttgcgtctcactctgtcgcccaggctggagcgcagtggcacaatctcagctcactgtaagctccacctcccgggttcacaccattctcttgcctcagcctcccaagtagctgggactacaggtgcccgccaccacccccaggtaattttttgtatttttaatggagatggggtttcaccatgttagccaggacggtctcaatctcctgacctcgtgatccgcccgcctcggcctcccaaagtgctggaattacaggcgggagccaccacacctggccctatttatttttaagacggaattttgctcttgttgcccaggctggagtgcaatggcatgatctcggctcactgcagactctgcctcctgggttcaagcgattctcctgcctcagcctcccgagtagctaggattacaggtgcttgccaccactcctgggtaatttttgtatttttaatagagatggggtttcaccatgttggccaggctggtcttgaactcctgacctcaagtgttccacgtgcctcggtctcccaaagtgctggtattataggcgtgagccactgcgcccggccgatctttcttcttttttttttttttttttttgagatggagtctcgctctgtcacccaggctggagtgctatggcacggtctcggctcactgcaacctccacctcctgggttccagcgattctcctccctaagcctcccaagtagctgggattacaggtgcctgccactatgcctggttaatttttgtatttttagtagagctggggtttcaccgtgttggtcaggctggtctcgaactgctgacctcatgatccgcctgccttggcctcccaaagtactgggattacaggcatgagccactgcgcctggctgcccggccgtatttttattgttttttttgtttttgtttttttgttttttttgagacggagtctcactctgtagcccaggctggagtgcagtagcacaatctctgctcactacaacctccacctgccgggttcaagcgattctcctgcctcagcctcctgagtagctgggactacaggcgcatgccaccacgcctggctaatttttgtatttttagtagagatggggtttcactatgttggccaggctggtctcaaactcctgacctcgggctcccaaaattttgggattacaggtgtgagccacctggcctggccaccacatgggactatttaccctaccaactgctgttggatacttagatggttttgtgcattgccagtacttggatacttgtatgcacccgtgttcctctaagggggacgcccacaaaagctattgctgccacaaggtatgtgcattctcatcttgacaccatgtcttagtctgttttgtcttgctgtaacggaattgcacagactaggaaacgtgtaatgaacagaaatctgtctgggcgcgctggctcacacctgtaatcccagccttttgagaggccaaggcaggtggatcacttgagatcagtagttcaagaccagcctggccaacatggtgaaaccccatttctacaaaaaattagcccggcatgttggggcatgcttgtaatcccagctactagagaagctgaggcaggagaatcgcttgaacccaggatgcagaggatgcagtgaactgagattgtgccactgcactccagcttgcgagacagagtgagattctgtgggagacagagcgagactccctctcaaaaaaaaaaaaaaaaaaaaaaagagaaatctatgggctcacaaatctgaaggttgaaaagtcccagatggtggggctggtatttggtgagggccttccggcttccttgtaacatagcggaaggcatctcatctgagacagaggggtgaactcattctttataaggaatccattcccgtgaaaactcactcacttccatggtcatggcattagtgcatttctgagagcagagccctggtgacgtaattatctcttaaatgtctcacttctaaaatctgtagcactgcaggttaaatttccaacccaagaactttgggggacacattcgtatcccaacacacggttttatcaaatgcttctccaaagtgattgttgccagttaccacaccctggccatccagatgggccatttcccctagtgtccctttagcagcaaggacagttgggaaagggtggagctgggactgaccctgtgtctgtaaatattatataattatataccctgcttcagagtccccctctgttgccctggagtgcagtggcatgatcatagttcactgtagcttccaactcctgggctcaagctatgatccccctgcctcatcctcctgagtagtgggtactataggcatgtgccaccatgcccagcgaattaaaaaaattatttttgtgtgtgtggagatggagtcttgctatgtttctaggctgttctttttttttttttttgagacggagtctcgctctgtcgcccaggccggactgcggactgcagtggcgcaatctcggctcactgcaagctccgcttcccaggttcacgccattctcctgcctcagcctcccgagtagctgggactacaggcgcccgccaccgcgcccggctaattttttgtatttttagtagagacggggtttcaccttgttagccatgatggtctcgatctcctgacctcatgatccacccgcctcggcctcccaaagtgctgggattacaggtgtgagccaccacacctggcctataccttgcttctttctctttctttccttttttttttttttctggagacagtctccctctgtcgcccaggctggcgtacagtggtgcaatctcggctcacttgcaacctctgcctcccgggttcaagggattctcctgtctcagcctctcgagtagttgggactacaggcttgcatcgccacacctggctaatttttgtatttttagtagagacagggtttcaccatgttggccaagctggtctcgaactcctgatctcaggtgattcgcccaccttggcctcccaaagtgttgggattatgcccttccttccttccttccagacagggtcttgctctgtcacctaggctagaatgcaatggcaggatcttggctcgctgtaacctttatctcctaggttcaagcaattctcctgcttcagcctcttcagtagctgggattacagacactcgctaccacgctcagctaatttttgtatttttagtagagacggggtttcgccatgttggtcaggctcgtctcgatctcctgacctcaggtgatctgcctacctccctgcttctcattgaggtctctgccagtcaggtatcagcacagggaaagggctcaagggcagtgtgtggccatggccctgtttgcagaagatggcagtaggagcaaccctttctacatttactcaacacagccgcttatgaccagcctggttaggcctcagggcagtgtgcggagactcactgtgatcttagctccaggtgctcctccagctggagaggcagcctacggctgatcacagtgcaaggccagatgtccctttctgtctctgtgacggcagaaacgaggtctgtctcatgactctatcccaagcacttgtcacagtggtgcctctgaatatgttacgggtcattcactcatccattaaatatcaagcgcccctacaacacctcatggggacttcactttttattttgtttttgagacagggtctcaccctgtcacccaagcttgagtgcagtggcttgatcatcgctcactgcagcctccaattcctgggctcaagtgatcctcctgcctcagcctcctgagtagctgggactacagacacacaccaccatgcctggctaattttttttatttttttatttttgtagagacggagtttcatcgtgttgcccaggatggtcttgaactcctgggttcaagagatctacccacctcggcctctcaaagtgctgggattacaggcatgagccatggcaccaggccaagcttcacttttaccgggaatgggg

SEQ ID NO: 920 - DNA, 2527 bp, Homo sapiens
agaagcactccgggcgtgctgccggcggcggtaggtggcgcgcgggtccggcgggcggttggcttgagcgggaccggagctgaggcaggaagagccggcgccatggtggagaaggaggaggctggcggcggcattagcgaggaggaggcggcacagtatgaccggcagatccgcctgtggggactggaggcccagaaacggctgcgggcctctcgggtgcttcttgtcggcttgaaaggacttggggctgaaattgccaagaatctcatcttggcaggagtgaaaggactgaccatgctggatcacgaacaggtaactccagaagatcccggagctcagttcttgattcgtactgggtctgttggccgaaatagggctgaagcctctttggagcgagctcagaatctcaaccccatggtggatgtgaaggtggacactgaggatatagagaagaaaccagagtcatttttcactcaattcgatgctgtgtgtctgacttgctgctccagggatgtcatagttaaagttgaccagatctgtcacaaaaatagcatcaagttctttacaggagatgtttttggctaccatggatacacatttgccaatctaggagagcatgagtttgtagaggagaaaactaaagttgccaaagttagccaaggagtagaagatgggcccgacaccaagagagcaaaacttgattcttctgagacaacgatggtcaaaaagaaggtggtcttctgccctgttaaagaagccctggaggtggactggagcagtgagaaagcaaaggctgctctgaagcgcacgacctccgactactttctccttcaagtgctcttaaagttccgtacagataaaggaagagatcccagttctgatacatatgaggaagattctgagttgttgctccagatacgaaatgatgtgcttgactcactgggtattagtcctgacctgcttcctgaggactttgtcaggtactgcttctccgagatggccccagtgtgtgcggtggttggagggattttggcacaggaaattgtgaaggccctgtctcagcgggaccctcctcacaacaacttcttcttcttcgatggcatgaaggggaatgggattgtggagtgccttggccccaagtgaactcaagatttggcagccccagagatgccaactgcagcatgcccacctgtattccctgtccccttccttcatgaaggcatctccaggcaaggaaaactgaagtcattggcccgatacaaaacatttcctgcaacgaaggaggtggtgccgacgtgctgcttcccatcaccagcagctgctcgacaaggggcgcagggtggctgtctttgttccagcactgttcaggctgcctgtcatcccgggcctgccagctcccctgagtgatgagcacttccaagcacccctctgccctttctctgtccttatgctgtcccggcctcgccagccctctggggcattgtgggagatgcctgccaggaatgagcaagctctgttgctcgggagcctcttgtcaccttcttggacttattccccacctgataccttatagagaaaagtgtgaattcaggtggagagtaggcccaggccccatgaggcaccagtggaagcacagctccaagttcagacaggtgcccttagagaggaaaaccatgacaggcaaatgcatttcctctggagtttgagaccctgacaaacaacaggtggcatctggtgtgctgttcttgagttttcgtttaggattagttgagttccagctgggttttgggagaaaggagatgctaccaagtcttggatgttagggcgagaccctgcaagttgagtattagagagcttgtctttcaaggcaggttcctggggcttcagggctaggagggaggagcctgcccttttaacagaaccccagtcacatgcggctcaagtcactcagaggctgttgcatttcagggctatgttggtcctttgtttacctcctaaaccacagctgtttgtgtttcacatatgttgtgaattttccttggttctttttaaaggaatgataataaagttacttgctttaggatttgcttgtttttcttccacttcagaagcttctgagagggaatgggatgatcctaccagttgccttttcagacctgaggctctaactcaagagattcctcctctccctcaccattcctgccaccattttttctgggtgatgcagcaagagttaaattgttcacattctagaatgtgtagaagcttctggctccagttgtctaatggataattcagctaaatagtggctattttcagtggcaagaattataataataaagggaagtcaaaagtgatgcttcatatgccccaagtgccacagccgctacgggtcagagcttttattggaagaccaggtttgccttgatgcagccaaagtgcgttccagttcaccccactcttgcttgtgtttcttctttatgtaaattgtgtgatgtttcaataaatcagtctctttcctattctg

SEQ ID NO: 921 - protein, 346 aa, Homo sapiens
MVEKEEAGGGISEEEAAQYDRQIRLWGLEAQKRLRASRVLLVGLKGLGAEIAKNLILAGVKGLTMLDHEQVTPEDPGAQFLIRTGSVGRNRAEASLERAQNLNPMVDVKVDTEDIEKKPESFFTQFDAVCLTCCSRDVIVKVDQICHKNSIKFFTGDVFGYHGYTFANLGEHEFVEEKTKVAKVSQGVEDGPDTKRAKLDSSETTMVKKKVVFCPVKEALEVDWSSEKAKAALKRTTSDYFLLQVLLKFRTDKGRDPSSDTYEEDSELLLQIRNDVLDSLGISPDLLPEDFVRYCFSEMAPVCAVVGGILAQEIVKALSQRDPPHNNFFFFDGMKGNGIVECLGPK

SEQ ID NO: 922 - DNA, 2427 bp, Homo sapiens
agaagcactccgggcgtgctgccggcggcggtaggtggcgcgcgggtccggcgggcggttggcttgagcgggaccggagctgaggcaggaagagccggcgccatggtggagaaggaggaggctggcggcggcattagcgaggaggaggcggcacagtatgaccggcagatccgcctgtggggactggaggcccagaaacggctgcgggcctctcgggtgcttcttgtcggcttgaaaggacttggggctgaaattgccaagaatctcatcttggcaggagtgaaaggactgaccatgctggatcacgaacaggtaactccagaagatcccggagctcagttcttgattcgtactgggtctgttggccgaaatagggctgaagcctctttggagcgagctcagaatctcaaccccatggtggatgtgaaggtggacactgaggatatagagaagaaaccagagtcatttttcactcaattcgatgctgtgtgtctgacttgctgctccagggatgtcatagttaaagttgaccagatctgtcacaaaaatagcatcaagttctttacaggagatgtttttggctaccatggatacacatttgccaatctaggagagcatgagtttgtagaggagaaaactaaagttgccaaagttagccaaggagtagaagatgggcccgacaccaagagagcaaaacttgattcttctgagacaacgatggtcaaaaagaaggtggtcttctgccctgttaaagaagccctggaggtggactggagcagtgagaaagcaaaggctgctctgaagcgcacgacctccgactactttctccttcaagtgctcttaaagttccgtacagataaaggaagagatcccagttctgatacatatgaggaagattctgagttgttgctccagatacgaaatgatgtgcttgactcactgggtattagtcctgacctgcttcctgaggactttgtcaggtactgcttctccgagatggccccagtgtgtgcggtggttggagggattttggcacaggaaattgtgaaggccctgtctcagcgggaccctcctcacaacaacttcttcttcttcgatggcatgaaggggaatgggattgtggagtgccttggccccaagtgaactcaagatttggcagccccagagatgccaactgcagcatgcccacctgtattccctgtccccttccttcatgaaggcatctccaggcaaggaaaactgaagtcattggcccgatacaaaacatttcctgcaacgaaggaggtggtgccgacgtgctgcttcccatcaccagcagctgctcgacaaggggcgcagggtggctgtctttgttccagcactgttcaggctgcctgtcatcccgggcctgccagctcccctgagtgatgagcacttccaagcacccctctgccctttctctgtccttatgctgtcccggcctcgccagccctctggggcattgtgggagatgcctgccaggaatgagcaagctctgttgctcgggagcctcttgtcaccttcttggacttattccccacctgataccttatagagaaaagtgtgaattcaggtggagagtaggcccaggccccatgaggcaccagtggaagcacagctccaagttcagacaggtgcccttagagaggaaaaccatgacaggcaaatgcatttcctctggagtttgagaccctgacaaacaacaggtggcatctggtgtgctgttcttgagttttcgtttaggattagttgagttcctggggcttcagggctaggagggaggagcctgcccttttaacagaaccccagtcacatgcggctcaagtcactcagaggctgttgcatttcagggctatgttggtcctttgtttacctcctaaaccacagctgtttgtgtttcacatatgttgtgaattttccttggttctttttaaaggaatgataataaagttacttgctttaggatttgcttgtttttcttccacttcagaagcttctgagagggaatgggatgatcctaccagttgccttttcagacctgaggctctaactcaagagattcctcctctccctcaccattcctgccaccattttttctgggtgatgcagcaagagttaaattgttcacattctagaatgtgtagaagcttctggctccagttgtctaatggataattcagctaaatagtggctattttcagtggcaagaattataataataaagggaagtcaaaagtgatgcttcatatgccccaagtgccacagccgctacgggtcagagcttttattggaagaccaggtttgccttgatgcagccaaagtgcgttccagttcaccccactcttgcttgtgtttcttctttatgtaaattgtgtgatgtttcaataaatcagtctctttcctattctg

SEQ ID NO: 923 - protein, 346 aa, Homo sapiens; identical to SEQ ID NO: 921

SEQ ID NO: 924 - DNA, 30669 bp, Mus musculus
accactgttgggggggattgggaggggcagaggcatggagggcgtggcacagtgaagacctatgattggctttgggggaatgagaggggcggagcctaggaggaacggggcggaatttgggtttctgctccagagtgggaaggggtggggccagggacttgatgggatgggtagggtctggggtctgtattggggtgcgttaaagccttgaaggagcctatggtagaagggtaatggttgcgccctgatgggagaggcggggcaaagttaggatctcccatgataagagcacagttggtgctcacagaagaggaatagagttgttgggctctctgaggtcatgattcgtagagaggtggaaggagcagtgggccgggttgggcatgttaaagtgtgtgatgtttattaggaactagggctgggagtgggggctcaatatagaagttaaaaacactgaggtgtggcacagtcttgtaatggcagcacttgagaggccgaggcaggagtgcggaagatcccaggacagcctagagtagtgtgttccaagattttggaggtggttcaagctgttcagccacatagttcgggtagcctgagctgtatgagatcatgtctcaagagtccgtgagcactggaagaagagacacccctattatgccctgtaattggctggctcccctatgttcagcaggctgcttcgtgacccactatgtcttcccccacaagttctctggacactcccgtgcctggtgagtgacgggctttccctagccagccccttccacagtgttggagaagctcactgtcctgtcttccttttcctagggaatggttctcctcagcccagtacctccgccacgtcacccactattaaggaagaggggcaggagactgatcctcctccaggctctgaagggtccagctctgcctacatcgtgggtgagatggggagacaggaacaggggtgtggggctttgtgaaggaagggcggggagatggtggcccctgtcttttggtccgctttcccttccttttctccctgacaccgccgactcgtcctccggagcccgccgacctgcagatctttcccttggcgttgcagccccgtcctctcaccctcgcttcgggacctcccatggcccgttccccggctgctgtttctctttgtcgctatctctcatggcatctgctcaccccaagtcatcttagagccagaggatgagcctgagcgcaagcggaagaaggggccggccccgaagatgctgggccatgagctgtgccgcgtgtgcggagacaaggcctcgggcttccactacaacgtgctcagctgtgaaggctgcaaaggcttcttccggcgcagtgtggtccacggtggggccgggcgctatgcctgtcggggcagcggaacctgccagatggatgccttcatgcggcgcaagtgccagctctgccggctgcgcaagtgcaaggaggctggcatgcgggagcagtgtaagcaaggggtggggctagagggagagcgggtcacctgcaaggggaggtgtaagtgaggctgaggcccgcctctgaggccggctttcccgcaggcgtgctctctgaggagcagattcggaagaaaaggattcagaagcagcaacagcagcagccaccacccccatctgagccagcagccagcagctcaggccggccagcggcctcccctggcacttcggaagcaagcagccagggctccggggaaggagagggcatccagctgaccgcggctcaggagctgatgatccagcagttagttgccgcgcagctgcagtgcaacaaacgatctttctccgaccagcccaaagtcacggtatcgccctgcccggccctgtggacagagcccacccaggctagggaggggtttcctagggcgtgcgagtcccccacgtgaccgtggtcttttgtgtcccagccctggcccctgggtgcagaccctcagtcccgagatgcccgtcagcaacgctttgcccacttcaccgagctagccatcatctcggtccaggagattgtggactttgccaagcaggtgccagggttcttgcagttgggccgggaggaccagatcgccctcctgaaggcgtccaccattgaggtaataactaggctctaggacgagaccagagctgaacatggtacaggcatgtcctgacccttgtggggtgtagtcagctgcagggtcccatccaacaaggtatctggagcctccagagagccagccagggagaaaagggaaatgggctgaggtagagaataacggaggatatcagatgggctgttaaacaggaaaatgacccaaagactccaaaggaatggatattggagccaaatcaaggataatgaagtattgagagttaactgtgtgcagagttctgaatgctaagaattaaacctctagcctgggcctcacggtaatgtggggttagtggccttggatggggcagtgggtgatagagttgaaggaaggaaagttaagaatgtcttacctggcagaagggtggcagcctgctggtcttggcacatttgactctggggcagctgaagagccctgtaccttgtcacctccagatcatgttgctagaaacagccagacgctacaaccacgagacagaatgcatcacgttcctgaaggacttcacctacagcaaggacgacttccaccgtgcaggtctgtggaaggcactgacttggtcctggggtttctgccccgttggccctccaggccaggcaggcactggcaaggaaagatcatgtttagcgaggccagatgcatcgtgtaagaggcactcacagggtctgtgtggggcggaagccggagtaactgtcacaggctgtccttccttcccctttgagtgccctgggaccagggtccggtgtgaagctgggctggggctgctcttgcaggcttgcaggtggaattcatcaatcccatcttcgagttctcgcgggccatgcggcggctgggcctggacgatgcagagtatgccttgcttatcgccatcaacatcttctcagccgatcggcctaatgtgcaggagcccagccgtgtggaggccctgcagcagccctacgtggaggcgctcctctcctacacgaggatcaagcgcccacaggtacgggagctgcctgttgtatatgagcagtctcagtattggggtccagtggcacatgttgggcacactgagcctggggcctgaccactcagggtgctggctttccagacaaagctggctttgcaggacagggccccagcaggaccgacttgcctcctctccctgcaggaccagctccgcttcccacgcatgctcatgaagctggtgagcctgcgcaccctcagctccgtgcactcggagcaggtctttgcattgcgactccaggacaagaagctgccgcccttgctgtccgagatctgggatgtgcacgagtaggggcagccacaagtgccccagccttggtggtgtcttcttgaagatggactcttcacctctcctcctggggtgggaggacattgtcacggcccagtccctcgggctcagcctcaaactcagcggcagttggcactagaaggccccaccccacccattgagtcttccaagagtggtgagggtcacaggtcctagcctctgaccgttcccagctgccctcccacccacgcttacacctcagcctaccacaccatgcaccttgagtggagagaggttagggcaggtggccccccacagttgggagaccacaggccctctcttctgccccttttatttaataaaaaaacaaaaataaagtttgagtacaagccattcctgagcccagtgtggagagggtgggccatctctctgcccaggtgactgcgcttggtctaggttcaggccacaggggtaggggtcgctccgccgaagacaggttatcttcatacagcatagtttgagacactaaggcggatggaggccagtggaaaaggagaggaactttaagaggagggtctcaaaagaacacttctttttttttttttttttttttttaattttatttattttattattatatgtaagtacactgtagctgtcttcagacacaccagaagagggcatcagatctcattatgggtggttgtgagccaccatgtggttgctgggatttgaactccggacctttggaagagcagtcgggtgctcttacccactgagccatctcaccagcccaaaagaacacttcttagggccaggttttcaaaagctgaggactgcatctggccatgagtgtcataagtcaggaaatgatttgtggggcaacagaagttatacaagaacctgggcgtgtagggactctgaggaaaacagaaaagaagcttgcttctagcaaagcatcagggtagcatccactgtggcagtcttctaacgctcctgcagtgggcgctcggggaccgcaggccaaacccctaagagccaggatgctgggggcgtgtccttgttccgttagcgtcatggggcggggccacttgcgagaggcgtggttgtgggtcctccagagtgggacgtggtttgatcgcccaagcgggctaggggcgggacccagcgggcgcgccgcagctctgggcctgcgcgcagagggttcaggggtcacggcggcgtatcttgtggcgggaaaagctgtttgaggcggtaagtaaggaagaagagtatggggcgctcggtcgcgcagctgacgcctcgagcagagtgctcgcagaatgtctgcagctgggggcaggatagagcaatgcaaaggacagatcccctggagcttaggacctggggtgcgctggactgtccgggtgtgggctcagcggcgtgcacgctagccaggagggaggggccggaggtgcagggcgttggtgcctgttccgctgttcgagagacaaggcgacggtatcagaaagtccagcaagaagtaggaatgagcggggaatagtggcgcacttttatcccccgcactcgtgaggcagagacaagcggatctccgagtttgaggctagtttagtttacagagtgagatccaggataaccagggatacacaagagaaaccctgcctcaaaaccccaaattttttttaaaaagtaggaatgggaggaaaagtaatgccttagagccttttctttttttcttagtgcgtgcgctatggtgcgcacgtggagatctgaggacaactttgtggcgttgtctctttccgctatgtggattccctaagatctaactcaggctgttcagcttggccaacaagctcaaatatccattccgctgtcacatcgggccccatgtgatgctttatatactaaatagaacaagcaaattgatactagatgggacagtctgcttacccagtttggtgtttggtgggggaggtgagacatatcccacagtcccagagcaactgtcactgcagggtcccaggggaggagccaggtgtgaagctggcagtgtgtgaggtaccctggggaaaatgaatggttactgttttagtgtgccaccatcaccacagcgggagtgggagtgaagacagctgtcctgcaggatgctgcagcttcagagagcatccctctagcgagtggggcttgcacctgggtctgactgtcctgaggggaatgggaacgttgtgcctccaagaacatccctgtccgggaaaaggggagactgaggtgacagaagcagtttgtgggagtggaggagcttaaggggccacccctccaggagaggtacaggaatccttggatctggcagccctgggagaggtgacatgaaacaattgttcagcctttggaggcaggaggatggcatgttctaagcctgctagggcagcttggtgagatgatgtctcaaaatgaataagagagccaggatgtagttagtggtacagcctagaatccctcagtgaggggttggggtgggactcagtattgagccctgctgagttaaacccccagacctctactggcttttgagactcaggctttctagctcagacttggctttgaatttgcctttgaggcatacagcttggattatgggtaatggcagatccagtatggattggcttatatctgggaggtatgttgtgagtgacttactggcgaagctactgtttgtcatagcaccgccttcccactctggtctgtgggagccagctccactgcttcccccgcctccttccggagctgtgtgtgtgtgtgtgtgtgtgtgtgtgtgtgtgtgcgcgcgcgcgcgcgcatgcttcctgacctggtgatggagggatgctcattttctgtgcagtgcaaagccatgtccccatgtcagtggtcctcagtggtgtcctgcagctttattagtgcagcgcgtgaacttgtgtgtttggttgaactgtttggaagttgtagctggcatgatatttcaccaccagcaccctacccagggtcccctaaaagcagcatctgcttgcatcagcacagggacctgatctgccagctcgacatggggcagtgcaggtcctgcctgcctttccttgactggcttctcctatacttaggagactggcagggcacctgcagtccctactccaaacacagagccttaccccccagctttttaaaatctgatcttgcaatacagtgtggggctaagcttgaactcacgatcctcccatctaggcttcccaggtaactagccgcaggataatcctttctttagatgtctttgtcttttttaaaatataaaacaaaagtagaagcaggccattccacgccttgatttacctactagagacaaagcctctttgagacctttcacattatcgtatggcttcctcatttctttatacagctgcatagtactccattgaatagtactaagggactcttgaaactgtccccctggggaggacatttaggtggtttccagtccttagagattttaaacaatggtaccggaaataaccttgtaaaatcaggttcttcatgtgccctgacctattagggtcaacccttgcataaggaattgcttgcagcttttaacacctgtggtttttgactgaggtgtgatttctatttagtcaactgcacaagtgtgtgggaggcaaactccatccagaacattcctccatacatcctcagataccaacagtctcctcactctctagaagctagcaggtttctggtccaagagctttttaagattgatttatttatactttggagtgtttgcctgtgtgttcatacgagcacaatgtgcatgcagtgcctgtagtaacccttgctgtcagatcctctggaattggagttactgatgagctggtgctgggaaccgaacccaggtcctctgcaagagcagccagtgctctgaaccacctcaccagcccccaagaattttcttttttttttttttttttttttgtttatttattatatgtaagtacactgtagctgtcctcagacactccagaagagggagtcagatcttgttaaggatggttgtgagccaccatgtggttgctgggatttgaactcctgaccttcggaagagcagtcgggtgctcttacccactgagccatctcaccagccccaagaattttctttttagttgcgtgtgtgtgtgtgtgtgtgtgtgtgtgtgtgtgtgtgcgcgcgcacacacgcatgcacagattcccctgaggccagaagagggcggcagagccatggagctggccttacagacagttgtttgctggtgctgggaacaaaaggaaccttgtgttttctttacaagatcttacttttaattacttaaaaaagtatataagccgggcatgatggcacacgcctttaatcccagcacttgggaggcagaggcagacggatctcttgacttccaggacagctggggttacataaagaaacccactctcaaacagcaacaacaaaaagttttatgttctttttttctgactgcgcatgtgccttcgacacaatgtcggtgactgtccctccataaggaaagcatgctgaccctgtcacagacacagcacacatgggacccttgcaggctctgctgttgtgtgttttgttttattcagtctcataagaacttcaggtcttaacacaaacgctgtgaagtcggcctgggtgcataccacatgccagttcggatgttttcccaatttccttggagcataggtacacaagcccatcactagggattcggtccaacctcattttattatgtgctgtattgtaggaacaacagcatggtgtagcaggtgctggaccatggttacctctaagcaaacaaacaccccttaccctcacccccacccccccagacaggtttttctaaccttggctgtcgtggaactcactctagatcaggctggcctccaggtgtgtaccactaccacaactcagcacaggtcgtgtgcccccactccaccccctcttttaagccagtgagtttagtcaggctgcttatagagcaggtatgagggactgttcacagcaacatggatggctgccctgctaacagtcatcttttataacattctaacgtactacaaaccagagcgtgctgaggggcagcaggaaaacacggtccttctctgtttctggtaattgatccattatatttcttttttttttttttaagatttatttattattatttgtaagtacactgtagctgtcttcagacacaccagaagagggagtcagatcttgttacggatggttgtgagccaccatgtggttgctgggatttgaactctggaccttcggaagagcagtcaggtgctcttacccactgagccatctcaccagccccattatatttctataagagcagaggctacagtaaaaacattgactcagtacataagatggtggcatcacagtgggaaagcgggctgcttgtgtgtttacagccaaggcagccactgccagaaaccctgggtttattacctttgtgttctaagttggctttggggtgtcggctgttgccaagcttctcatagcggtcctgggtccacttagggttgtggtccacagtgtgagcagcttggtaggcaaatgtgagcacactatagctgtagagacggttgtgggccttcatgtggttgttgggaattgaatttttaggacttctgctcactctggtcagggcccgcttgctcagtccctgctcgctccggcccaaagatccatttattatacataagtacactgtggctgacttctgagccaccatgtggttgctgggatttgaactcaggacctttggaagagcagtcagtgttcttgcctgctgagccctctcccctgccagctcctgagtgttttaagcatccaggtctacttgcttcctggtgatagtggtcccccgctggtgacactgtggggagacaagcagccacgcaagtaactccattgtccgacacatgatggagtcatgatttgtgctcatccatgggtgtgtgtggattccagaagtagagcctggatatcacgcctcgggcactgcctgccttggttttggagaaaaggtttctctcagaccttggagacttctcgttgtctcctcagagacctgagagaaacagccaggtctggtttggctcagagcttcggtttgtgtcactgggttcagctagttctgaggggttggggaggctggggcctagccatctgtcaaaggcaagttcctagagacccgcttcctcttgtgtctcccgtcacctagtcagctgtcagtttatgagtacagggattggggaggcgactgagtgggtaaagtgtccgctgtgcaggcatgaagacctgagttcagttcccagcacacaggcaagagacctctgggagtgcattatgtccagcactgaggactcagaaacaggccgatccctgggctatgtggccatctccaggtcagagggagggaactgggaatgaggtcccacttagatcttactgagcaccaccttgcccacagatggattgtaagcggcgacaaggaccaggccctggggtgcccccaaagcgggctcgagggcacctctgggatgaggacgagccttcgccgtcgcagtttgaggcgaacctggcactgctggaggaaatagaggctgagaaccggctgcaggaggcagaggaggagctgcagctgcccccagagggcaccgtgggtggtaggccccacctcccaacccatcccacccatacagagatcctgagagatggctcgcatctaccaagggtttcctttgactctgtgtcagtggggtccctcctggctgacagcttgtatttcaggggtgttcttgctgttgccagttgatttcaaacccttaaacttgagtaattctcccagctcattgtctgcagtgtcgaggctgcacttcctggtttctcagctttagtccgtgacccctggctttcctaccacctaacccagaccaccaccaccaccacccaacttccctctgtgatcaagcgggagttgctcctgtggaagacctctcatctcatggagcctctcatttcaatccagggcagttttccactgcagacattgaccctcggtggcggcggcccaccctacgtgccctggaccccagcacggagcccctcatcttccagcagctggagattgaccactatgtgggtgagttggcaggggaggcaggtgcaccggcacccgcagagcacgcaggcgggatgtggttcacctcattcctctcagcgtgggagccaggctcagaggactgtaaactggccttagcaggtaaaggcacatgataccaagcctggttccaaccctgggaacccacacaaaggtgaaaggagagaaccaactctcaaaggtgtcttttgacctccgcactcatcagcaaataaacgttattagaagatcccactaggggagttggggtagacacagctcagtgggagagctcctgcctggaattcctcagtgaccactgggatgtagctctacacagccactgttttattctcagcgccccaagggaaaaactggatttcactgtaatgctggctctgcctctgggtggagaagggcatcaggaaggactgtgaagggcgaggccccgaggcatcagtgacatccttcagtgtggcctccggtcctgaggggtgttctcggacccctcccctaggctcagcaccacccctgccagaagggcccctgccatcccggaactcagtgcccatactgagggcctttggggtcaccgatgaaggcttctccgtctgctgccacatacagggctttgccccctacttctacacccccgcgcctcctggtgagtgttccctgacctgagggccttgttcctggactccagaatttcctttgctcttctgactggcctcctacaccaggttttggggccgagcacctgagtgagctgcagcaggagctgaacgcagccatcagccgggaccagcgcggtgggaaggagctctcagggccggcagtgctggcaatagagctatgctcccgtgagagtgagtgtggcctgggggggtggggggtgggggtagggtgccctggtaggtgtgtgccaacctcctttctccgcaggcatgtttgggtaccacggtcatggcccttctccatttctccgcatcaccctggcactaccccgccttatggcaccagcccgccgccttctggaacagggtgtccgagtgccaggcctgggcaccccgagcttcgcaccctacgaagccaacgtggactttgagatccggtgctgtcctgtctcccctttgccctactcccgcctcagtcccctcaggcggcccttgccaactgacacgccactcttccaggttcatggtggatgctgacattgtgggatgcaactggttggagctgccagctggaaagtacgttcggagggcggagaagaaggtaagagcaccccggggcggggtggggagccaggacctggtgccgatgtcgctcctaccttgtgcaacccgctacctttccccaggccaccctgtgtcagctggaggtggacgtgctgtggtcagatgtgatcagtcacccaccggaggggcagtggcagcgcattgcacccctgcgtgtgcttagcttcgacatcgagtgtgctggccgaaaaggtttgtcccgggagcctgggctccttctctctgtctgggcattggtgatgtgccaggcccctgtggaggggtgagtgggtggaaggagtgctccctacagagagagccctgagcacaaaggcaccagggcctggggctgtcccacccatgtggctggaacaggggctggagctgagaggctgtggatgagcaggtgtggggaccgtggatggaccgggacaggggacgagcaggaatgaggtccctgtgtcttcccctctgcaggcatcttccctgagcctgagcgtgaccccgtgatccagatctgttctctggggctgcgctggggggagccggagccattcttgcgtctggcactcacgctgcggccctgtgcccccatcctgggtgccaaagtgcagagctatgagcgggaagaagacctgctccaggtgggtcctccctcctcaggtgccacctgccctgtgtccccagccatgccagtgacccttctctaggacgacaccgtgtcctcggggttgggctgtgtgttttcctgagttccacggcgtttttgcaagtgcggaggttgtcttggatattctgaagagaaggtagctgaggtaaagacagcctggttggcctttgtgtccgtcccctccacaggcctgggccgacttcatccttgccatggaccctgacgtgatcaccggctacaacattcagaactttgacctcccatacctcatctctcgggcacaggccctaaaggtgagggaagctggatcttttcccatccctcgaggccatccttgccccgggccagccggctgctctggagtccaggtgtgcgttacctcactttagctggagccggaaattcgtcgctgtggacaggaggcgggcgccttgagagtccggccctccacaccatcaccgtcactgcgtcactgtctctgcctccatagccaggcctcctttagaattcactggcaagggggaaggggaaacgggggcatggaagaggaaaggggtacatgctttggagcgcggcaaaggctgggtgctatggaaagggaagagtgagccttttcacacttccactgtagccagctgcacacttacccggtgcaggaggctgcagaggtgaccctctgggtgttagtgagcctgagggcaggcaggccctcccctcctgggcctggttctaatggccttcctgggctgcatctgcttgggcctttcttctgtgcctcagtcaagtctccctgcgtcctttttctagggcaagctctgttacaagaggggtcctgggcgatgcacagaggggaatctgcccgaacaggatacactgtatcactttcctgctttctgcagctgtagcccatttggtgatgagtaggcagagccgacttcactgcctggctgcagggagaccctaccattgtgtcctgggcacctcaccctcagcccctctcctctaagactccctctctctgccagactgtaccccagcgccgcccctgttgtcttctctgccctcccccaatagtccatgtctctacctatagcccatcaggcccccagtctctcagtctccccggggctatagctctcaactctgtccctgatcaatacctcgtcccacccaagcagtctccgcctgcagctcatcttctccagacccaggagtgccatggctggtctctgtccctgttctgagggcctaaggctagattcagagttgagctgacaggtctgcaccacagcaaggctctccccatgctcctcaggtggaccgcttccctttcctgggccgcgtgactggtctccgctccaacatccgtgactcctccttccaatcaaggcaggtcggccggcgggacagtaaggtgatcagcatggtgggtcgcgttcagatggatatgctgcaggtatgtaggaaccccactcgccctccccagcccccaacacgctgccttaaacagaagctccacccacctgaggcggcaccctgacccacccacctaagtaccacagaccctctagaccccatcccacgactcttgaggttgcgtggagatacccttccccacacctctgaggccccgccccaccccaacctgcgcaggtgctgcttcgggaacacaagctccgctcctacacgctcaacgctgtgagtttccacttcctgggcgagcagaaggaggacgttcagcacagcatcatcaccgacctgcaggtgccgccactccaccaagtccctccccgcctccctcctggctgagcccctgactgactgagcccctgaccccacatgcccatccccagaatgggaacgaacagacgcgccgccgcctggccgtgtactgcctgaaggacgcctttctgccactccgactactagagcgccttatggtgctggtgaacaatgtggagatggcgcgtgtcacgggtgtaccccttgggtacctgctcacccggggccagcaggtcaaggtcgtgtctcagctgctgcgccaggtgagggactgcacctggttggccacacacgtgtgcacaccctacccggtacccggatactcactccgccctttctccaggccatgcgccaggggctgctgatgcctgtggtgaagaccgagggcggtgaggactacacgggagccacagtcattgagcccctcaaagggtaaggactgtgctgggcacagtggggcacttgtcatcccagcactgggaggagttcaagggcagcctggacgacttgagaccctgtatgtaagaatgttaaaaaggaaaggccctggggtggggggctgtgtggggctgactcccccattctccctcaggtactatgacgtccccattgccaccctggacttctcctccttgtacccatccatcatgatggcccataatctgtgctacaccacgctgctccgacctggggctgcccagaagctggggtatgctgcctttatctaggctgcccccccccccaagcctccctgagccctggtttccggacttgaaagatcaggtccagggaaatgagagtcagggatttgatgggctgtggatgcggcagatggggaggctgcagcaggtcctgggggagctggggaaaggcaggctactggggagctgggtagttcggaagcccagcctcctgtgtctccttccccagccttaaaccagatgagttcatcaagacacccactggggatgagtttgtgaagtcatctgtacggaagggcctcctgccccagatcctggagaatctgctgagtgcccgcaagaggtgggctgtgggctctgccccgccttagtgcccagctcccccgtgctgacttagccctggtattctgcagctgtggctgccttagatgaggtgcctttccaggtgttaccccgtgcctggtgggcctacgttctgagcagtgcacagcacatccagctatatttggcaccgctttccagtcaggcctgggtgccacctggacacccttcaatagccttcatcctgcctccacctagggccaaggctgagctggctcaggagacggaccccctgcggcgacaggtcttggacggccggcaactggcactaaaagtgagtgccaactccgtatatggcttcactggtgcccaggtgggcaagctgccatgtttggagatctcccaggtaagccctcaggaccccgatgggcggctggattactggccgcctgcattgaggggtcggtttagtcagggggtatgccagtatggcaggagccacagatgtcagatcatgctctggaccctgtgtacagtcctgagagacctgactacctttccttggtgctcgttgctcgcagtctagtaggacagggactctggtcaggtaatggttatggtacagtagcttacagggctctgtcagtgagggatgtgttccggatgctgggtcacccttaccctagcagctgcccctctgctcacctctcccacgtccctgtggcgggtgggggtggggggcgtggccagactggatccagtggctcacttgatgttggcctctgtcccaagtgtgaggaccctagtgaggaccgtagccagtaccagctggaacaggaataggaaagaactgcccccacctccctcaccaacttggcagctctgggctcagacagaaacagattagcagtgagagaatgtgaggcctaaggtgcagccgtgcgtggtctggggctgatcctattgtaagggagcctgaggtgccactaccctgtctggtcacagacctggtacttggctgtctccacagtgaggggtaacatgtcagggcatttagctagggaatgtccctaagaaggtggcaggattttcacaggatgggttacagggtttagaggctgagcgtctaacagaagaagctgctgctgcctcagctccggctcccagaatcccacagtccctgttacctcacctcctgagcagagatctctgctgtgactcaagggctcagggaagccgattgcctggaaggatgcccaggcactcaggtgtctcccaggagctgggcccctagccagactcgcctctgctgcagtcacccgcctgcctgcctgcctgcctgccctcactcctagcagcccacagagatggggtgggtgttgggaccttaggccaaaggagccactgacaaccctgtctgtcgcctcttatggcgagataacaagctacagagtcatcccagaataaaatttggaaaaaggaacgcagagcagatgcacacaagacaagtcagatgtggcttcctcagctgtcccatgacctcatgaaacccaggcaggcagagagcattctgctgtcacgccccagtacccagccagcctcatccccacctgtaaaatggcacagacatcagggtgtagtgatgtcatcctgcacttccacccgtttgtgaagctgtgcggctggggcgagaggcctgtaagaagactggggacctggtctagctcaatggcacagccgcttcttacaagcttccagtgaggggctgggtgtgacccagtgacagagcctctgcttgctctgtatgagaccctggctgcattcctggggggtggggtggggtggctctttgtcctctgagaacgtacactttggggctgcagtcctgtctgataggccgatgcttgaaagtagcaggagtgggtcctccccgacccagcggatccagcttctgtgtcctcatcctccctggttttgcccctaacagagtgtcactgggttcgggcggcagatgattgagaaaaccaagcagcttgtggagtccaagtacaccgtggaaaatggctacgatgccaacgccaaggtcagggcctgcccgctctccagggtccccgggcttcctaccatggcagctcctgggttgagaagaggcatccctcacgcatgtaccctggcaggtagtctacggtgacacggactctgtgatgtgccggtttggcgtctcctctgtggctgaagcaatgtctctggggcgggaggctgcaaactgggtatccagtcacttcccatcacccatccggctggagttcgagaaggtgcgtgcatcctctgtactcagctcagtggagacattaggggtcttatcaattagtgatggtctcctatgacagtacagtagtgtgggggtccccaggctgggagtcttgcagtgttctgggttgtagctgaggcccctgttgtgcaaaccagtggtacattttggatctgtctgcatgtacgtggctccagttctcgccagaagctcaaacatgacacccctggcttctcatccagggttatctcagctcagggctcacttggtcctgtctcttcccatggctgcaagactttacagtgtcacctgtctggatttcataatttcggggccagccttaggcctatggcattatgtcaagtgggtttctggggtgctggagagtgctgggccttcttgggattcattccttgcctgttgtgtttcctggtctcgggattcggggcggaggaatgtgcacaggccatggaggaatgtgcacaggctccgcccatgggtcctttgcaggtttacttcccatacctgctcatcagcaagaagcgctatgctggcctgctcttctcctcccgctctgatgcccatgacaaaatggactgcaagggcctggaggctgtgcgcagggacaactgtcccctggtggccaacctcgttacatcctctctgcgccggatcctcgtggaccggtgtgtgtgtgtgtgtgtgtgtgtgtgtgtgtgtctgtgtctgtcccacctaggccaagaagtcagcctcctgcagacccaggggcctctcataccttgggaacccaggtggctcaggggtggggcggtggtaaatcaggctggcagctgtgactgcctgtggcctttcccgcctctgcacttaaccccaaccccagtgtcagcccagagtgcaagatgcctagatcctagctggtaaaagttgcatccccatcccgtagtgcctgtggacatcctccctcccccctctctctctcagggaccctgatggggcagtagcccatgccaaggacgtcatctcggacctgctgtgcaaccgcatagacatctcccagctggtcatcaccaaagagttgacccgcgcagcagcagactatgctggcaagcaggctcacgtggagctggctgagaggtgggcagccacacagcttcctgcagctggctccactccaccctccccaaacctcatccaacccccttatccgcaggatgaggaagcgcgaccccggcagtgcgcccagcctgggtgaccgagtcccctatgtgatcattggtgctgctaagggtgtggccgcctacatgaagtcggaggtcaggcccacctgggctgggcccctcccagaatttcacttctgctttcctggggcggccatgcccctgggccatacttagtgtagtgcctccctgggcagagttggctgctgcgccctccccacctgggttgccaactctatttgtctttgtcatctccaagcctggatgcttctgacccctgcaccctatccatggcccttctcccatggggaaactaactcttggcgatctgagggtccccacccagacccgagtcacagttccaggcccacccctttatcagagcctgcagatacagtgtgtagctctctagcccctagcccatgcccctctgcagccattggtgaccctggcctgcccacaggaccccctgtttgtgctggagcacagcctgcccatcgacactcagtactacctggagcagcagctggccaagccgctcttgcgcatctttgagcccatcctgggtgagggccgtgcagagtctgtgctgctgcgtaagtggaccgcccaggagggagtgtgagcggggaaaggggccgaggcggaggcagggacaaggccattcagcttccctcctctaggcggtgaccacacacgatgcaagactgtgctcaccagcaaggtgggcggcctcttggccttcaccaagcgccgcaactgttgcattggctgccgctccgtaatcgaccatcaaggtgagaccgagttacagcccttatacccactggtcgggccctgccacaggactccattctgcctgcactccagcggagggtcctcgcctgccccggggttccccaggggagttttccccacacacttgggcccttgttctcttgcctctggggactttcagaagccgggatgggcagcgggtggagaagagatgcagggatggagactagaacctggcttggtcccaatacctctgtgctcacccaccccacccccaggagccgtgtgtaagttctgtcagccacgggagtcggagctctatcagaaggaggtgagtgaggcagggagggagctggagcacgcctgatccgaacagccctgctcaagccactgtgtccccaggtgtcacacctgaatgccttggaagaacggttctctcgcctctggacacagtgtcaacgctgccagggcagcttgcatgaggacgtcatctgtaccaggtgtgccctcccccctcctgccatcagactcctgacccagctgtgggacctcactgcagaatgggcagggtctgcctgggcttggtctctgcctagcctcccccggggtggggccgggctttccccagggaacaggcgggcggggcgggttcccacgccaggtgacagctgatatacagctgtctacctctaggggtactgctgttatcggcttccctatgcccgataagcaaacagccccctcccctgggtgggcagcaggaaggggtcaaagtcctgggaacagcccctgaccaccatcctccgcagccgtgactgtcccatcttctacatgcgcaagaaggtgcgcaaggacctggaagaccaggaacggctgctgcagcgctttggaccgcccggccctgaggcctggtgacctgacacgggacaaggaataaagttcagatcttttgctactggctgtgtgttgtggtctttgggaacaggttgggtttcatggtgtagactctgtacaaccctctggagccccagtgtgcctgcctgtgtccacacaggactgacatctctgttttccctctgaaacccagcatgggaccctactactctgttttgcccctccccaggggactggtggccacccagctggcattaggtgctgtccaggcctggggcagcccctagcacacctcagggcaacatgggaccctccctgtcacggcacagccatggagtagctcccaccagagggtcctggtggtctgtctccccgggcttcccctcagctcttgggagattccctgtcctcatactgtgtctgggcttcatgttccctgccatcctgtcctggtcaccattggtccctctgacatcctgtccccagggcctgcaaatcttttgtctcactcccctttctcagcaattctctccatgtcagccttccatccccaatggtggggatccccaaatccagatggctcctaggcccaccctctctgccatgtgactagagggttgtgcaatccagacccctcccagaggggatttttgaggagggcccccatggcccgcccctgggggtaggtaggcggaggctgggccaaatatatataggagtggtggccagagccagcctagcctgctctgaaccaccatgcttgctctggaggctgcacagtaagtgggtaacccccaatcctgttcttgggacccccaccccactcagcacagcatcctcagcttctgtggcacccagaggcaggtgataagggggtgaatctccatcagctctgtcttcctagacaaggttccagagatggtgtgttctggagacacccccactccacaacccgccctgaccccatcctgcctaggtgttcccaggtgtgccgtctgtccttgacagtattgcatggctcattttctggccctctgcaccttgagttctgtctgtttctagtttcttctgtccagcgtttcctttggttcttggttctgccctggctgcccatcctggggcaccagaaatgaactgcttagctcaccccccccaccccccttactgtattccttgctagcctggctctttagttcattgctgctcctagtctcagccagacttactaagacactcaaacccagttctctggccagcctgtccccagctgtctggggactttctcccctactttccctgcctcccccagcgtctgtgcatgcaaatcccagggagagtgggggacatttgcctggcacccgccccctacttcctgtcccgatagggttgtgggggggcctggaggagaaggctgggcgcacacagggacagcccacagactgcagagctgtggtgggtgatcacagctgccaccatctcccctctgggccccacaaccactttgagactcaggtggctgagggcggccctgacatgcccctgtgtctctctcctgccaggctggatggcccacacttaagctgtttggtgagttggacacccccccccccaccagagtatgtggcggcccggtatagcccatgggaactaaccttacttagatcatctacttctggcctcagtttccagtctctgtctcccccgacccccatccccaccacacctttctgttattttcctcaaactccgggctacttctgagaccttgtgtacctgtctagccctgtatggcctcttctttggagttatggatcttacaccttttaactgtagtattttggacactatttttcccaacatttttgaactcataacccaacaatgactttttctatggtggtggagaagcccttctgccttgagttttgttggtttggtttggtttggtttggtttggtttggtttggtttggtatggtttggtttgaactgagacaggatttctcctgtctggctttcaaactccctaggcacccctcagtactggggatatccaggagaggcacctgactcgtaggttatttagaattgacgtcttgggtgtgcatcagtgagtgccttcatggtgtatacctctgtagccattaccagacccagatctagaaaattttccattgttctggagtcccttcctaggccgactcaccccatattttatactggttcatttgaatgtttaaagtgacttatatttaggtctgtgggacacctggcctctttccttccatggtatgttaggtacctgttctttccctttgctgcatggtctaccgcccaccaaagcggccatagtttgtttatcccacttgctgagatgcttgtgatctggggtctgagcagagctgcctgaggatgctctgcgcacacaggtttccatccccgctgcacgaacagcaggggttgttcgagagtcgatctgctctaagtctagtctccactgcttctacaatggctgtggctgaagcagcatgcagttgttgaggtgaactggtgtcctggttaaagaaggtggtgaatgcatgtcaccccatactcattggatgaggctaaacagctgctctaagctctgggccagcctgagctacagagtgagtttcttgggtaccagttgcatactggacactaccaggtttccttgagggtcagagccttagcagatgctagcttctgtgtatgtcttattcatggattcagtctctgtgtctctatctgtttctgtccccatcagcccttcccttctctcacctgtctgtcagtcttccccaaggtaggggagggagtgtctccaaggcctgagatgaccctgtcctcactccgccagtacccagaaggagtcttctacgacctggacagctgcaagcccttcagttacccagattcagatgggggccttggtgagtgaccccagcttcatgccaccttgggcccagttcacagagggtgacttaaggctcatgggagctttcccccagcagggcagcccctccccaagccacctcctcccccacctcctgcccatctgctcccccatgcaaattctggggtcagagatttgcacagcttacaaaggcccctctgtgtgggaccttgaggtacgggtcttctgacctccttcagctactaactctgacctttctcccagactctacatggggctggacagaggccccgcctgctcctgccatcgctccctatgaagccttcgatcctgctactgctgcctttagccactcccaaactgttcagctctgttatagccatggtcctaacccctccacctatagccccatggggaccctcgacccagcccccagcttggaggccccagggcctggcctccaggtgtaccccccagaggacttcaccagccaggtgaggagccgggacagcttagagggagagctcccaccttacatctcttgcacaacccctgagatgaacttctggattgggggaagggggagcacaagaacacccttccaaggtagctcaagtgtcccctgggctccgcactgtatacatcagttcagaaggcaggtcctacccatgccatctactggctgtatagcttggggcaactgcctcaacctctctgtgtattgggacaagaaccaaggctagtgtccacactgtacaggaagatgtacatccaagtagtgagagccacagaggtggggaggacagagggagtgctgtgcatgtgaccctgggcagaggtggggaggaccaagagtgatgtgcaggtgaccctggtctcccacagaccctgggctccttggcttatgctccgtaccccagccctgtgctatcagaggaagaagacattatgctggacagccccgccctggaggtctcggacagtgagtcagacgaggccctcttggctggctccgaggggaggggatctgaggcaggtatgtggggtggagatttagtggggatgctgactgggagtgggggagaggatgcaagaaccagagcaccctaaacactaatacttcccaaggaagttcccagatccatgctgcttgttgcctgtgtgaccttggtcaagggcatcgacctttctgtgcctgggtttccgttgtgcacaaagacacagtaacagccaaaggaaacccaatatatacctacaatcctcctccccttaggcctctgtgtctgacaacctttcaaaccaattattctctgttggacctcaattttccgtatgtcaaaccagtcatcttatttatactcccgcgctcactggagggattctaggcacggggctctatcactgagccaagcctcaccctcttacttttaaaagacagtctccctaagttacctaggctgatcttgaacttggtgatctttcctcagcctctggagtagttgcagccaaccaggcccaactccattgtgaaaactaagggtggcgaggggccgtagctctgggggttcctttaacggacttccccctcttaacgctggtatccaacaccctgcaggtgcacgcaagaagctgcgcctgtaccagttcttgctggggttgctcctacgcggggacatgcgcgagtgcgtgtggtgggtggagccaggtgccggcgtcttccagttctcctccaagcacaaggagttgttggctcgccgctggggccagcagaagggcaaccgcaagcgcatgacgtatcagaagctggcccgagcgctgcgcaactatgccaagacaggcgaaatccgcaaggtcaaacgcaaactcacctaccagtttgacagcgcgctgctgccagcctcccggcatgtctgagcactccgctaaggacccctttctggcccctaagtcccatggagccccatatgagggcagtcagggttctcagctctccctagagcctccccagagtttcctgtgccgtgtataggattccaatctaggatggtcgtgtttgagggagcactggccattctacacggtttcagaatggcaggtttctcgggggggggggggatgggggagccctgatgtcgtctacggttccagaaaccgcagttcttgcgagtcctgtgagctcacatgacatctcaccagcaggtggcgctgtctacagcccccccaaacccttgttttgttggccagataggtcggtccctctgtactccccctgaagcccttgttagatctgaggtctagttatgtttggagctctctgagaaccctgtgccacctgtgtgtgacttttctctgcgtccgtttatgacttttgtttgtttgagacagggtctcattatgtagctcaggctggccccccaacttttaacaatcgtcctgcctcggcctcctgagtgctgggatgacaagggtgcaccatcacaccaggttttttccttttttgagagattttactatgtaacccgggctgggctattctcaagctagtggcagtcctcttgcctcaggctcctcttgcctcaggcaccccttgggaccctctgggacctatgtccgagatgaatggctgggtaaggtagggtgggaggttcagtgaaccttataggttgggcccttccttctgggatcccttgatcatatgggaagttctctaggctctcagcagccctgcattcacacactgactgaggcgcgacctgtatgttgtgtttgagggggatgtgtggcagaggtatggctgtggcaaggccggtgccttttattcttgagattgagtcttatgtagctcaggctggtcttgaactcactctcactgtgtagctagggaagaccttgagcccttgcctcagccagaatgctcagatgtcaggcagcgcaccacgtgactgtttctttccattgtcttgtctttttgttgttgttgttttcgagacagggtttctctgtgtagccctggccgttctggaactcactctgtagaccaggctggccttgaactcagaaatccacctgcctctgcctctcaaatgctgggattaaaggcgtgcaccaccacgccctttttcctttttcttaagtcaaggtctatttgtgtagcccaggctggcttcaagctcatgacactcttcctgcctctgcgtctggaactatgaacataccttactactctgtgcttacccacgccatgggtagacagacttctagacttggtcaacccccacccacaaggcaggcaaattaagtccctgcaggtgctttctttggaggaaagcccgctttcatagtgatctgtcaagctagaaagcactcccaccacccagatatctaagtgtgaatctttggacaactggtgacttctggccagcttttctggggccggcctctgtccaggtgtctgcccaggaccctgctcagtgcctgtctgtctcacaccagtgacttcctcacacccgcctgttcaggcccagtcttttccgttcaagtgctacaggccaagtaggctcaaactgtgggtttgtcttgggcatccacagcagaatcagaacccagagctttgaagcctgagtgaggggaggggggcactcaggcttccgtctctctgagaaacagacgatgaagaggcccttaaaactctttgcaaccccatgagcctccccaatgagcctgtgacacaccggaactcacctctgtgggtggccgggagggggaacagggtcatggaagatccagatgtccatgtggtcaaggctaaactgtactaaataaaattatttctcatcaccactatacatgcataataaataaagtgtacatcaaaattaagccgtcttgggaccctttattaggaactgtcccctgcacctccacatgaactcttctgagactgtggcagtcatagggagggagggggagggagggggagggagaaaggaaggtggtgggccaggctagggcttgaatgaggaaaccattgtttcccaccttgcttttctgctcacccctccattccagacatctgactgttcggtttttgtttttttgtcttgaagataggctcttccttacgttgtagttcaggctggtcttgaagtcactccaatggccctgtctcagctcagtctctggaattccgggttacaggggtgtgttactacaatgggttgctgtgcaacttgcctgctccctagggagcgaggtggaagtttttgcactgcaaccaatggtgtgacaggactttgtgcccccagaagccaggaagcttccggctgttaggggatcttttttttgaaagtagaaaggagggagggacacaaagagtaaaaggggggggggaggacagcttgtcttcgataccctggttccttcctctgacacccttctgggccagccacacctgtggttccccaagtgtccctctcctcctccttacccgctcctcccctctggtgctgggaaggagccgggcctgggcagctctccagggccttcccggcctctctgcacttggccggtgacgggcagccggccaggccgctcccattgggacccggatcagaatagggcgggagggacaccgagaactcttccctgaggccggcacccgtcctgcctacgcgggggaaatcggactatccttcccgtctctggtttctagaaaactcctgactggggctaagaaaggcttccagaacccgccccgcttgccccgtgcacctgagactcccagccccccacgcccgttcccaagacccaggatttccctcccttttttccttttctcttttcctcctcgttctttgcccccacacaagtgccctctctgcttcccccctctccccatcttgtgctctggccacttctcgttcctccttctcccccccacttcatccaggacctaagaatctggacccctgtgcccccagactctggggttccagttcccctctttctgcggtcacgcagtcttcacctttgcacctccacagactcaggtgtctaagcaccacatcccatccccactagggccttggcatccctccactcctgcctgctcgctatttctcgccctttagagcatgcaagaggaatgcggggcggccctgcgctgcctcctgggagtctcgagactccataaagggctcctcctggagacccacctgtccctgctagggcctggttagagccactgcggtcccaagtcctgggagcaggagaaggtcgccgacatgcctgaggctaaaccaggtggctggcccgaaaccttcttgggggtgggggtggggatggggtggagggtagggtgcacacaaggggatttctactatgggaggagggggtcctttgcctgttcctacatctaggtagagtgtaggttcctttcctgcttggggaagagggaccctttctgtgtgcacagatgggtcccttcctaatgcaggaccatgaggtctattgtctgtgtagggtcaggagtccccttcctcttcggggactgggagacccatcttgggtagaaatctcagttgtgcaattataaattggcctcggttttctttctctctccccttctctctttgctctctcaccccacccctgcccccaagccctccaggctgtcctcaaagtttgcagcctaggctggccccaaactcactccggagctaaggctggctgggaagtcctaaaatcatactgcctcagtctaccaagactggacggcaggcatgggctactacaccctgctgggggtgtgtgtgtgtgtgtgtgtgtgtgtctccttttcttctttcctttcctttcttttttctccccatcccctttttctttttggtttttcaagacagggtttctctggtgtatccctggctttggctgtcctagaactagcactgtagaccagcttggtctcaaactcacaagagatccacctgcctctgcctcccatgtgctgggattaaaggcgtgcaccaccatggcctggcaatataattttttttttctatgtgggtgtctctttttcttgaggctgacaggatcttgcttgtgcattgctggggctcagcttggggacagggtcctctccaggtgggcgagcaccctcgaggtagttgagtctcctcactgagtgaagattaggatcatagggtgcttctatggacacaacaggactccatgtgcatggaacgatactcttctgtgtaaatatgagaacccctttggtgtgcgcattggacttctgtgaaggaatcgtgtgtctctcttccatgggtggggccctctttttcctgctgtgctggggaaggaatccagagcctcctacctgcttggcaaatactggccatgtcccagcacccccgtctctcttcatgtgcagttaggcacgggaggcattaggtccttagggggcagggatagtctatatgctggttagggctttctccttttgtggaagtgggcactgcacacaagccctggtgtcacctacccctaggtggctgttcccctggggtcagcccagtctggctgaggtagagaccagctcccttgcacagactgacccatggatcagtgacccgcaccacaagggagactgctgtggtcagcaccagtgtctagtttccagcccaagggaagggctaattataccccaaacctgaaaggtcaggctgatggccagagcctggggtgaggctacaaggggagggggaacctgactccatactcagggttgggatcaacttatgcctggaatgggggatctgtaccccaccatacctacctccatctgagggaagagggtctggggaagaagatttgaggcctggacccctggttctgagaatgaaggtttgggtctggcctctggattctggggagagaaccattttctcaatgtctatgttacagcggccaaaaaggcctccaaaggcaaagatgccccaaaggaagcccctgcaaagcagactcctgaagagccccccaaaggtgaggtgcccccagggctctgccagctctcccgccccccccccccccgcccttctccacactgct

SEQ ID NO: 925 - DNA, 3341 bp, Mus musculus
atggattgtaagcggcgacaaggaccaggccctggggtgcccccaaagcgggctcgagggcacctctgggatgaggacgagccttcgccgtcgcagtttgaggcgaacctggcactgctggaggaaatagaggctgagaaccggctgcaggaggcagaggaggagctgcagctgcccccagagggcaccgtgggtgggcagttttccactgcagacattgaccctcggtggcggcggcccaccctacgtgccctggaccccagcacggagcccctcatcttccagcagctggagattgaccactatgtgggctcagcaccacccctgccagaagggcccctgccatcccggaactcagtgcccatactgagggcctttggggtcaccgatgaaggcttctccgtctgctgccacatacagggctttgccccctacttctacacccccgcgcctcctggttttggggccgagcacctgagtgagctgcagcaggagctgaacgcagccatcagccgggaccagcgcggtgggaaggagctctcagggccggcagtgctggcaatagagctatgctcccgtgagagcatgtttgggtaccacggtcatggcccttctccatttctccgcatcaccctggcactaccccgccttatggcaccagcccgccgccttctggaacagggtgtccgagtgccaggcctgggcaccccgagcttcgcaccctacgaagccaacgtggactttgagatccggttcatggtggatgctgacattgtgggatgcaactggttggagctgccagctggaaagtacgttcggagggcggagaagaaggccaccctgtgtcagctggaggtggacgtgctgtggtcagatgtgatcagtcacccaccggaggggcagtggcagcgcattgcacccctgcgtgtgcttagcttcgacatcgagtgtgctggccgaaaaggcatcttccctgagcctgagcgtgaccccgtgatccagatctgttctctggggctgcgctggggggagccggagccattcttgcgtctggcactcacgctgcggccctgtgcccccatcctgggtgccaaagtgcagagctatgagcgggaagaagacctgctccaggcctgggccgacttcatccttgccatggaccctgacgtgatcaccggctacaacattcagaactttgacctcccatacctcatctctcgggcacaggccctaaaggtggaccgcttccctttcctgggccgcgtgactggtctccgctccaacatccgtgactcctccttccaatcaaggcaggtcggccggcgggacagtaaggtgatcagcatggtgggtcgcgttcagatggatatgctgcaggtgctgcttcgggaacacaagctccgctcctacacgctcaacgctgtgagtttccacttcctgggcgagcagaaggaggacgttcagcacagcatcatcaccgacctgcagaatgggaacgaacagacgcgccgccgcctggccgtgtactgcctgaaggacgcctttctgccactccgactactagagcgccttatggtgctggtgaacaatgtggagatggcgcgtgtcacgggtgtaccccttgggtacctgctcacccggggccagcaggtcaaggtcgtgtctcagctgctgcgccaggccatgcgccaggggctgctgatgcctgtggtgaagaccgagggcggtgaggactacacgggagccacagtcattgagcccctcaaagggtactatgacgtccccattgccaccctggacttctcctccttgtacccatccatcatgatggcccataatctgtgctacaccacgctgctccgacctggggctgcccagaagctgggccttaaaccagatgagttcatcaagacacccactggggatgagtttgtgaagtcatctgtacggaagggcctcctgccccagatcctggagaatctgctgagtgcccgcaagagggccaaggctgagctggctcaggagacggaccccctgcggcgacaggtcttggacggccggcaactggcactaaaagtgagtgccaactccgtatatggcttcactggtgcccaggtgggcaagctgccatgtttggagatctcccagagtgtcactgggttcgggcggcagatgattgagaaaaccaagcagcttgtggagtccaagtacaccgtggaaaatggctacgatgccaacgccaaggtagtctacggtgacacggactctgtgatgtgccggtttggcgtctcctctgtggctgaagcaatgtctctggggcgggaggctgcaaactgggtatccagtcacttcccatcacccatccggctggagttcgagaaggtttacttcccatacctgctcatcagcaagaagcgctatgctggcctgctcttctcctcccgctctgatgcccatgacaaaatggactgcaagggcctggaggctgtgcgcagggacaactgtcccctggtggccaacctcgttacatcctctctgcgccggatcctcgtggaccgggaccctgatggggcagtagcccatgccaaggacgtcatctcggacctgctgtgcaaccgcatagacatctcccagctggtcatcaccaaagagttgacccgcgcagcagcagactatgctggcaagcaggctcacgtggagctggctgagaggatgaggaagcgcgaccccggcagtgcgcccagcctgggtgaccgagtcccctatgtgatcattggtgctgctaagggtgtggccgcctacatgaagtcggaggaccccctgtttgtgctggagcacagcctgcccatcgacactcagtactacctggagcagcagctggccaagccgctcttgcgcatctttgagcccatcctgggtgagggccgtgcagagtctgtgctgctgcgcggtgaccacacacgatgcaagactgtgctcaccagcaaggtgggcggcctcttggccttcaccaagcgccgcaactgttgcattggctgccgctccgtaatcgaccatcaaggagccgtgtgtaagttctgtcagccacgggagtcggagctctatcagaaggaggtgtcacacctgaatgccttggaagaacggttctctcgcctctggacacagtgtcaacgctgccagggcagcttgcatgaggacgtcatctgtaccagccgtgactgtcccatcttctacatgcgcaagaaggtgcgcaaggacctggaagaccaggaacggctgctgcagcgctttggaccgcccggccctgaggcctggtgacctgacacgggacaaggaataaa

SEQ ID NO: 926 - protein, 1101 aa, Mus musculus
MDCKRRQGPGPGVPPKRRHLWDEDEPSPSQFEANLALLEEIEAENRLQEAEEELQLPPEGTVGGQFSTADIDPRWRRPTLRALDPSTEPLIFQQLEIDHYVGSAPPLPEGPLPSRNSVPILRAFGVTDEGFSVCCHIQGFAPYFYTPAPPGFGAEHLSELQQELNAAISRDQRGGKELSGPAVLAIELCSRESMFGYHGHGPSPFLRITLALPRLMAPARRLLEQGVRVPGLGTPSFAPYEANVDFEIRFMVDADIVGCNWLELPAGKYVRRAEKKATLCQLEVDVLWSDVISHPPEGQWQRIAPLRVLSFDIECAGRKGIFPEPERDPVIQICSLGLRWGEPEPFLRLALTLRPCAPILGAKVQSYEREEDLLQAWADFILAMDPDVITGYNIQNFDLPYLISRAQALKVDRFPFLGRVTGLRSNIRDSSFQSRQVGRRDSKVISMVGRVQMDMLQVLLREHKLRSYTLNAVSFHFLGEQKEDVQHSIITDLQNGNEQTRRRLAVYCLKDAFLPLRLLERLMVLVNNVEMARVTGVPLGYLLTRGQQVKVVSQLLRQAMRQGLLMPVVKTEGGEDYTGATVIEPLKGYYDVPIATLDFSSLYPSIMMAHNLCYTTLLRPGAAQKLGLKPDEFIKTPTGDEFVKSSVRKGLLPQINLLSARKRAKAELAQETDPLRRQVLDGRQLALKVSANSVYGFTGAQVGKLPCLEISQSVTGFGRQMIEKTKQLVESKYTVENGYDANAKVVYGDTDSVMCRFGVSSVAEAMSLGREAANWVSSHFPSPIRLEFEKVYFPYLLISKKRYAGLLFSSRSDAHDKMDCKGLEAVRRDNCPLVANLVTSSLRRILVDRDPDGAVAHAKDVISDLLCNRIDISQLVITKELTRAAADYAGKQAHVELAERMRKRDPGSAPSLGDRVPYVIIGAAKGVAAYMKSEDPLFVLEHSLPIDTQYYLEQQLAKPLLRIFEPILGEGRAESVLLRGDHTRCKTVLTSKVGGLLAFTKRRNCCIGCRSVIDHQGAVCKFCQPRESELYQKEVSHLNALEERFSRLWTQCQRCQGSLHEDVICTSRDCPIFYMRKKVRKDLEDQERLLQRFGPPGPEAW

SEQ ID NO: 927 - DNA, 53687 bp, Homo sapiens
ggcacggggaggttaaggaactgggctcagtgttacacaggaaggaagtgacagagacaccaggttctgccatttccaacgctcatgttaatcacttgtttcgcttctaacatccctaggtggaaaattccacaatctcaaacgatgggcctgagtagacataataagttacagaagagcatggatcacatagtcccatttcttttttataaaggcatacacatatgtcagaggcattccaaccacagcgattctgtcttgaataggagcttggtaaaataaggctgagacctactgggctgcgttcccaggaggttaaggcattcttagtcacaggatgagataggataggaggttggcacaagatacgggtcacaaagagcttgctgataaaacagcatatgcagtaaagaagtcagccagatcccagcaaaaccaagatggcgatgagagtgacctctagccgtcctcatggctcattatacactaattataacgcattagcatgctaaaagtcacacccaccagcacgatgacagcttacaaatgccatggcaacgtcaggaagttcccctatatggtctaaacgggggaggaaccctcaattctgagaattgcctacccttttcctggaaaactcatgaataatccacccgttgtttagtatataatcaagaaataactataagtataatcacagtgaacagcccaagccgctgctctacctggagtagccattcttttattcctttatttttattgcattttatttttgagacggagtttcgctcttgttacccagactggagtgcaatggcgcaatctcggctcaccgcaacctcggctcaccgcaacctccgcctcctgggttcaagcgattctcctgcctcagcctctcccgagtagctgggattacaggcgcccgccaccatgcctggctaattttgtatttttagtagagacggagtttctccatgttggtcaggctgatctcaaactcccgacctcaggtgatctgcccacctcggcctcccaaagtgctgggattacaggcgtgagccaccgcgcccggtccgagactgagcttttttaattcttccaatcaccaagttattgaaaccatttttgcaaaattttaacaatgagaaaattctgacatctcaaatctggccaggcacagcggctcacgcctgtaatcccaacactctggaaggccgaggtaggtggattgcctgaggtcaggagttcgataccagcctggcaaacatggtgaaaccccatctctactaaaaatagaaaaattagccggccgtggtggtgggcacctgtaatcccagctacaagggaggctgaggcaggagaatcgcttgaacccaggaggcggaagttgcagttagctgagatcgcggcactgcactccagcctgggcaacagagtgagactccatctcaaaaaaaaaaaagtaaaaataagcccggtgccgcagctcacgcctgtaatcccagcactttgggaggccgaggcaggcggatcatttgaagtcaggagttcgagaccagcctcgccaacatggcgaaaccctgtctctactaaaaatacaaaaaaatgagccgggcgtggtggcacatgcctgtaatcccagttacttgggagggtgaggcaagagaatctcttgaacccaggacgcagaggctggagtgagctgagatcacaccactgcactccagtctggggtgacagagtgagacctctccaaataaataaataaaaataaataaaactaacaagcagcacgactccaaaatcagaaaacttgtaacgaccaaaaaagtgcaaacgtgccttaaatcagtcatgtgcgacaagcagctatagctagggtttggccgcaggctcagagaagcgcatgaatgagctaaagccacaaagcgcggggctggaggtttggctcccaagaagcgaggaaatgggttcggaactcttctgccaagtcccagtagatctacccggtaaacttccggtgagtttccaacttccgtgcggggcagcagcttcggctggtcctaagcggaccggaagttcgtcaagtttcacgctccgcccctcttccggacgtgacgcaagggcggggttgccggaagaagtggcgaagttacttttgagggtatttgagtagcggcggtgtgtcaggggctaaagaggaggacgaagaaaagcagagcaagggaacccaggtaggtgcacccgagagtggggagacgcaggaggagccccgaacccggggcttctcggcgctccccgcgtactccgctctgcccccttctctccttccatttcctcccctcggtaattcgcgcctcccgcggctgtttccagggcaacaggagtagttcactccgcgagaggccgtccacgagacccccgcgcgcagccatgagccccgccccccgctgttgcttggagaggggcgggacctggagagaggtgcgagggcggagcatgaatggaggaggcggggcggggcatgatgggaggtgatggggcgggacctgcagcgcggtgcgggggcggggcatgaagggaggaggcggggctgggggcggggcatgatgggaggagatgtggcggggcctggagcgaggttgtgggggtgcagtaggaagggaggaggcggggcgggggcggggcatgatgggaggggatggggacctggagcgaggttgtgggggtgaggcttggagggagggatgcatatggggcggggcaaggtgttgggaggcccatgatgggggctttaggggctgaacctggaaggttgagggcggagcatagtaggaggaggtggggtcagaatgagaaatagggatgcttggggcagaagtgaggtagagtcttaagaagaggaggtggggggaaactacatggcatggaggccgtgaaggcagagcatgattaaaggagaatgggccctacctagaaaaagcaggtggattggacctgagggggcggggcctacagcaggggcggggcttaagaccaagctgaaggctggcgtggaacagaagggggcaggtcttgttagaaggatggggagggtttgtaggctggcaggaaccagggttgtggctgagagtagggtctctggagagatggaaaaaaaagggaaagccctgtcaggacctgtaactgacctaacctaacccttcttagccccacaaggctctcaatcccctgtattctacaggctgctccgtgaccccaccatgtcctctcctaccacgagttccctggatacccccctgcctggtgagtgactctcttccccacccagcccttatcacacacgagcagaagctcactgtacctctcccggattccaccctcttccaggaaatggcccccctcagcctggcgccccttcttcttcacccactgtaaaggaggagggtccggagccgtggcccgggggtccggaccctgatgtcccaggcactgatgaggccagctcagcctgcagcacagactggggtgagacagggccctggagttgatgtgggggcttggggaggggtttaggaagggagaaagaaatagaaatgggaatgggaggccctgatctttgctttttgttcttgctttctccttaacatatacatctttctaaattgcaatttccctgaatgtgagcagcaactcctctctccctccatcctctggctctttgcctggggatctcctgtgggcccatctctctggttcctgtttctccttgtggctttctcatggcctctacctacccaccccagtcatcccagatcccgaagaggaaccagagcgcaagcgaaagaagggcccagccccgaagatgctgggccacgagctttgccgtgtctgtggggacaaggcctccggcttccactacaacgtgctcagctgcgaaggctgcaagggcttcttccggcgcagtgtggtccgtggtggggccaggcgctatgcctgccggggtggcggaacctgccagatggacgctttcatgcggcgcaagtgccagcagtgccggctgcgcaagtgcaaggaggcagggatgagggagcagtgtgagtgcagcgggagggggcggtgccggcctggccccccgcctagccctggggttctgctgaggcctgcatccccctacaggcgtcctttctgaagaacagatccggaagaagaagattcggaaacaacagcagcaggagtcacagtcacagtcgcagtcacctgtggggccgcagggcagcagcagctcagcctctgggcctggggcttcccctggtggatctgaggcaggcagccagggctccggggaaggcgagggtgtccagctaacagcggctcaagaactaatgatccagcagttggtggcggcccaactgcagtgcaacaaacgctccttctccgaccagcccaaagtcacggtactgccccctccacaaccttgagtgtgacggtcccaatggggtagagccagctgggccatcacccagggtgtgggagaatgaggctccagagggcaggggctttgggaagagggtcccccagggtgcaggcttggcctcaaggtggccacccagacttaggctcacaaagacctgggagtgaccctggtctcctgtgtcccagccctggcccctgggcgcagacccccagtcccgagatgcccgccagcaacgctttgcccacttcacggagctggccatcatctcagtccaggagatcgtggacttcgctaagcaagtgcctggtttcctgcagctgggccgggaggaccagatcgccctcctgaaggcatccactatcgaggtaatggtccatctgcccacaaggaaccccagagatagctccaggacagatgctgggagcagagttaaggaagaccagtgcttgccgttgtaggatgacattccacggcgaatagagtcttctatgagccaaggagagaaaggaaaaagggtctgaggctgagaaaattgaggatcaggctagaggcgctattgcagagaaaagttgccaaaaaggcttttcagaggagttagcatttgaatcaaagtagggataacatataagtattgagcacgtgctgtatgccaggctctattccaagtgttggcatatggggcaaagaacaaagcagatcaaaccccgtgccccaaaccttgtgctcacctggggaaagagtatcctaaggagatggggatgcagcatgtgcggaagcctgaagtggagaaagagctcgggctgtctcacgtgatggctgcacgctggtgtggctgagagaacaggggggaaggggacaagggataatcctggtgagattagacccccatttgggccaggaggggagggactagcagctgaagggtcacagggctcaagctccccctcccgctgccgcccttagatcatgctgctagagacagccaggcgctacaaccacgagacagagtgtatcaccttcttgaaggacttcacctacagcaaggacgacttccaccgtgcaggtagggcccaggggaggcttcggggaggcttggcgcccctgctggctggaagacctggggccaactcatccctgttggagtctctgtttctttatctccaaagttggggtgagggttgagccaaggtgagagtgaggtaagagtgcatgtgccacgtgtggtggtgcacgccaatagtcccagccactcgaggctgaggagggcagattgcttgaggctatagtgagccgtgattgtgcgacggcattccagcctggtgacagagaagaccgtgtctctattttttaaaaaaagcatgtattgagtgccgactctgtacattgggttgcagtggaagttgagatgggaggagccctgttaccacatcaggcatcttggtgggcattaggaaaagcattccccgcccccgccaaaacgtggtctcacccaagggaggcgggctggagctcggtccattgtgaagcgggcagccttctttactgtctaggggagcactgcttcctgccctctgagagcgctaacctgcgtgggtgggcttctggaagaaggcctgggcagtgagaggcactgcctaggaaaagggtgggaggagcattgctagtgctgcagagcatgcaccagggcctcgctccctcattgtcccacaatctctgggggacctctctgtatttcccgacatctgtccaaaccccaccctctccccttcctcttactccggccctttcaccacccgagacggtcccagtaacccttttagtatgagcttagcagggcagggctgcagggaagcgtttctggcagaggagattggcgattgcagaggccctgaggttggggagagctggtggtttggaggaactacagggaggcccaggcagctggagcacaaggagatggggtggagaggaggtcgggaatcccaccctaccccttcccagccgctcctctgccaccaccctggaacactgccagggtccccttgaggggccgcctgcctccacccctgcctgatggggctgctcacagcacaggcagaagggtcctgtcagcacttaaggctgcccacttccctcctccgctcagaaccctccgcggctcccgtctcactgggagaagagctagagtcctctctgtggcccacaaagccctttaggacctggcctcgctcactctctgccctcagctctcaccctctccccctgttccagccactctggcctcttactggcacccatccagcatgctgcagccaagggcctgtgtacttggagtttcctctgcccagaactagggggaccaactggtcctagtttgcccaggaccttcccagttttaacactgaaagtctcatggcctgggtagcccccgtcccaagtcatgggaacagcagacgttggtcaccctcacaatccctcatctccttcggattggtcactgctccagcgtcacccagagcgcagccttccctgcccgccttgtgtaaaatagaaccatggctcagcagggcccttcacacttctctgcactgcctggttccattgaactcacagccctctgacaggctgggcctcttcctaatgtgtttgtctatgaccggtcccctaggctctcaaatgtaagtgctggagcctggcacgtggcaggtactcagtgacatttgatgactgaatgaacaagtcagttttgggaatgagtttgggctttaccttgagcagtggaagccagcgctgggaccagcacgatgtgacctaggttttaaaagcttccctttgcctttgtgaaggggacaagaatagggactcgggaagctgcagccaccgcccaggtgggaagggagggtggtgataggatagtagaaaatactgaagaaacatgcaccctcattcattccttcactgggcagcatgtgtggcacacctactacatgccagcactcatgggcacggggcacaggtggacagaaatgacaagaacgctgtaattactgctgtgttcccagccccagagactgtgggcagcgccagggtccaggatgtggggcacggtttcgggctgagggagtcacgggctgcctcccgccccgcaggcctgcaggtggagttcatcaaccccatcttcgagttctcgcgggccatgcggcggctgggcctggacgacgctgagtacgccctgctcatcgccatcaacatcttctcggccgaccggcccaacgtgcaggagccgggccgcgtggaggcgttgcagcagccctacgtggaggcgctgctgtcctacacgcgcatcaagaggccgcaggtagggccccgcagagcctctgcgcagagccaactacgtcccgcggcccacgtggtccgttcaggctgggttctgccagccacactgccctcccctccgcagagtctttcctcaggccccaccctgctcgactgggagccaggtctagtccaagcacagaggcgggccccacgctggctcccacgcctggtcggggaggggccctcctttctgttggggtgggcctcccaaagcctggcagggcaggggctcagccagcgcccacctgcctcctccctcaggaccagctgcgcttcccgcgcatgctcatgaagctggtgagcctgcgcacgctgagctctgtgcactcggagcaggtcttcgccttgcggctccaggacaagaagctgccgcctctgctgtcggagatctgggacgtccacgagtgaggggctggccacccagccccacagccttgcctgaccaccctccagcagatagacgccggcaccccttcctcttcctagggtggaaggggccctgggccgagcctgtagacctatcggctctcatcccttgggataagccccagtccaggtccaggaggctccctccctgcccagcgagtcttccagaaggggtgaaagggttgcaggtcccgaccactgacccttcccggctgccctccctccccagcttacacctcaagcccagcacgcagtgcaccttgaacagagggaggggaggacccatggctctcccccctagcccgggagaccaggggccttcctcttcctctgcttttatttaataaaaactaaaaacagaaacaggaaaataaaatatgaatacaatccagcccggagctggagtgcaagatggagagggcgcgggcttctagggacctcagtgacactgggtgcccgaacctgattgagcaggtgggactgggtgtccccaggctgttgggaaaagggtggcacatagggtcccagtgttgggtggtgtgtcgcctgctgtgaaagttcaggacagaggcctcagcctcagggtcacctccctggacaaggtgaatcagaactcacccttgaaggataaacaggatttaagtgaatgaggggacctggacttctgtccgaacaacaagtgtttgctgaggcctcctgtgggccaggcactgggttggccattctagagatggagacattcacccaataaatgtttccagagcattaactacagttaggcacaattctaggcactggaaacatctgtgaacaagataaccatcctcctaccaagactcgggggatagggactttaatgagcgtggcactgtggtggggctagaggaaatcagggaaggtatcacaacagaggcaatcgctgggacctaaaacaagagcctgggggctgggcctccaagttgagggaacagcacgtgcaaagtttgaaaggagagacgccaggagttcggagcgaagcgacgaagttcctccaatccttcctgcccctgtgccagccctgaaggagctgaatgagcaattccaatcgagggcgaaaggggggttggatggagggatgcaacttaaaggtgtatttatttggggcggggaacagcggaagtgagagtagttaccaatgatcaccttatcctaagagtagtgtaccgggcgccccacaagtgtccctatcatgcgttgttgagtctaatttacgtatagggaaactgaagctaggatgaaggagaacagatcaagccaggactctaccgcttatcggccagcctctgcggggatcttgggcgtcaggtcaccagctggctgctgggcagcgacggggcagcgctccctacacggccccgggcgagaggcgggcggggggacgcggaggatgcgcgcgcaacacccgagggtgggaggagagagaacagaaccgcggcgcgcccagaccgcacgaggtcgtgaaggtagccgcgcggaggggcgtggcttcgggcagacaggtcatggggaggcggagttaagggaatttttcagcaagggggcgaggccacttcggaagctgagagagggggcggggcctgccctgcagtcgaacaagcggggcgtggccttgcccgcacttgggcaggcgggggcgtggcccgtctctgagcgccgcggctctgggcttgcgcgcgcgggagtcaggggtcacggcggcgtaggctgtggcgggaaacgctgtttgaagcgggtgagtagaggggaaaaagggagttcggggcagtgggcctggtagggaacggggcttgagcagccaggcacatagatctgagagacggttgcgagggcaccctttggcccgggggcgcgcaggagagggcaggggccaggggtttcctgggcgagggcgcggggacgagcaggaaaaggccggggtgggggtggaattcctcggcgggcagggggcgcatgcgccgggcaccgtggggcgggacgtggcccgggaggagctggggggactgggtggtgcacgtgcgggcttggtgtcatcctggattcgctgggtgtttgagtactctgtgccaggcacttttctggaagcaggaacaagtcagagaagtccctgtctcgggaagacagacggtagacaagtgatgagttttaatagatcagtaaagcagtgctctggggctgtgagatgctctcagaaggaaactaacgcagggtaacgtgataatgagcgaagagcctgttgctttagctggagtggtccagaatcgaccgctctgggaccctcaagtgcaaagccctgaggtggaaggagcttggcgtatttgtagcaggagccgaggggacgagagaaacacagatgaggtcggagtcatgatggggaactagatcctatagggccttgtaaaacttggtatggaatttctcctttattctaggttcagcggggagccgtgggagggtttgagcgtggaaacaacacgattcgccccatgttttgaaaaactcaccactgagtggaaattggattgtagcaggaataagaatggaaggagggagatctgttaggagggagagcgtcctgcaggcagagaatcaggctccggttacctttgcgggcggagacagggggactggctgatggactgggcgtaggagcaaggggaagagtccaggatgactcctgggtttgtggtttgagcagcaggctggatggggaaggctaagggagaagcaggttggggttgccgctctgaaggcaaagattagtgggggagtgagtgggcagggtttagagcggagccaggagtgggcagggcgatgtcagtgcctcgcctcagcccttccactgaaggaacttgttgccactgtcttctcttttttttttttttttttttgagacagagtcttgctctgtcacccaggctggaatgcagtggtgcaaactcagctcattgcaacctccgcctcccgagttcaggcgagtctcgtgcctcagcctcctgagtagctgggattacggcacccactgccatgcccagctcattttttgtatttttagtagagatggggtttcgccgtgttggccaggctggtctcgaactcctgacctcaggtgatccacttgcctcggcctcccaaagtgctgggattacaggcgtgagccaccacgcacggccgcttctcctccttcctgcacttcccccccacaggtctctcttccccctagagaggttccttccctccccctgaaatgctcttccctctcttatgtgtttctgacagctgctgtttggacaggccctctgctgagcactggggagccaatgatcattcagtttggttggggaaggacaggagatttcagtccagagtgcgctgagctatggcggagcagtgatagtctttgggagccaagagaagaacctgtgcgctcagggaagactcaccagagtggttgatattcacagggagtttcaactcacatgtctttttttttttggtttttgagacagggtcttgctctgtcgcccaggctggagtgcagtggcgcgatctcggctcactaacctccacctcccgggttcaagcgattctcatgcctcaggcttccgagtagctgggattacaggtgtgtgccaccacgcccagctaatttttgtatttttagtagagacagggttttgtcatgttgcccagactggtctcgaatccctgacctcaagtaatcctcccacctcggcctcccaaagtgctgggattacaggtgtgagccaccacacccggcctaaactcatgtcttgaagtaaccggacactgtgcagagtgatgctggagaccccaacttgggcaagatgctgactccttttctcaaggagctcacaggctgaaaggatcccagctctgcattgtgcaataacgaaagtggcacaaggcgttgtgggaaccctgaagggcagctggtcagcttggaggagctaagcctgagctgagtctctggatgcagtggagtttcatgcagcgaacactgcctaaggcctcctgggggcccaccctgtgctgggtgatgctaaggtcccagaggagagtcagtccttgctctgccatccagaggtccctggctggtaagggaggaagacacacacccaggcagtccagagacagcagtcacagaggcctaggggaaggacaaggccgaaagcatgcaggtgagcctgggcaacatagcaagaccctgtctctacaaaaaatacaaaagctaggccgggcgcggtggctaaggcctgtaatcccagcactttgggaggccgaggcgggcagatcatgaggtcaggagaccaagaccatcctggctaacacggtgaaaccccgtctctactaaaaatacaaaaaattagccgggcgtggtggtgggcgcctgcaatcccagcactttgggaggccgaggtggacggatcacttgaggtgaggagtttgagaccagtctggcagacatggtgaaactctactaaaaatacacaactagctggacatggtgggcgcctgtaatcccagctacctgcgaggctgaggcaggagaatcacttgagtccaggaggcggaggttgcagtgagcaagatcctttcccaaaaaaatatataaataaaaataaagctgtgagattgggcaagattggatgaggtcattgaggaaatgagtgtctcactcatcgagaaaactggtgtctggcctgcagcgagcacgtggtgtcattttgttgctgaatctctgttaagtgcttgctaccgaagggtcgtgagaggggcagaggacagtgtttgccaagctctcatcctgtgccagggccaatgagaggggacacacaggggcctttccttcctaatgctgctgtgcctccactaacaagagcccaggttttgcccctggtgacaccgtccctcccaccgcacccccgcagccacagccaactgaccaagggcagccagtcagctccttccttcctcctccagcttcagcactgactctgggctcccacaagcccctgcgcttcctctgtcccacccgggtctctcctcgcagatcatcactccctgtccctctctggctacttgcacaacccgaagccagagccgctaacgacgcttgcttcttcctgtaagtcacacatgtacgcggttgtcacccaaagagcacaaacgcagtcaaagtcttcctcacacaaaaccccctgcacacgctcacggctgcaccactcacaaaaggtggaagcaaccctaatgtccatccactgatgaagggatacgtcagacgtgttctagccatacagcggaaaagtactcagcaaaaaagggacacagcactgacgaaaggccgccacacacatgagcgatgaacacattcagagaaagcagccagacacaagaggctgcatattccaagatcccatttataggaaatgcccagaataggcagatccatggagacagaaagttagatgagtggctgccaggggtgggggcagatgggctgaatgcagggagagagctaaaggatttaggctttttggggtgatgagagagttctaaaattgactgtggtgatggttgcctaactctgaacatactaaataccattgaactatatatactttaaatgggtgaattgtatagtatgtgaattatagctcaataaagcagttagcaaatgaagtcttctaccctgtcccccaggaaaccagtttcttagctctccttatagaatgatgcattaaaagcaaatagatttatacatatgccctgcattacaataaaaaagacgtctacatactccctgcattacaataaaaaagacgtctacatactccctgcattaaaagcaaaaagatttctacatactcttctgcccaccttgtaaatttgttactattttcattttatatatttcccccttaatattttgaaaagtttcaaacctgcagagaaggtacaaattgagtacagtgaacagccatggccctttgcctagattcactggctgttggcatgacacctcatttgctttatgctttatccaagcacatgcatatacctgtaccttttgtcctttttttggctgaactatttgaaagttgtggtcatcatgatacttcacctctgaaaactccagcagttaactcttttttttttttttttttttttttttgagacggagtcttgctctgtcacccaggctggagtacagtggtgcgaccttggctcactgcaacctctgcctcccaggttcaagcgattctcctattgcagcttcctgagtagctgggactataggcgcgcaccaccacatctggctaatttttgtatttttagtaaagatggggtttcaccatctttgccaggctgctcttgaactcctgaccttatgatctacgtgcctctgcctcccagagtgctgggattacaggcatgagccaccgcacctggcctctttttttttttttggtacagtattttactctgtcatgcaggttgtagtgcagtggggtggtcacagctcactgcagcctcgacctccccaggctcagctgatcctcagcctctcgagtagctgggactaaaggtgtgtgccaccacaccctgctaatttttatattgtttatagagacagggtgtcaccatgttgcctaggctgatctcaaactcctgggttcaagcaatccccctgcctcggcctccaaatgtcctgggattacagccgtgagccaccgtacctggcctccagcagtcagctcttaagaacagggatgtccgcctgcagaactacagtgtcattgtcatcatcatgcagtttaacatgagacagtgacgttattgaatagacgattcttatttagatctgccacgtgtccctgtaatattcttcaaggctataaataatttcttattttttttttttttccaagactgagtcttgctctatcgcccaggctggagtgcagtggcactatctcggctcactgcaacctctgcctcctgggttcaagccattctcttgcctcagcctcccgaatagctggaattacaggcatgcaccaccacgcccggctaatttttttgtattttttgtagagacggggtttcattttggccaggctggtctcgaacccctgacctcaggtgatccgcccgccttgggctcccaaagtgctaggattacaggcgtgagccaccatgtccagcctgtttttttttttgttttttgttttgttttttttttcttttttgaaacagagcctcattgtcacccaggctggagtgcagtggtgcgatcttggctcactgcaacctccacctcccaggttcaatcaattctcctgcctcagcctcccgagtagctaggattacaggcgcctggcaccacgcccagctaatttttatatttttagtagagacagggtttcaccatgttggccaggctggtctcaaactcttgacctcaggtaatccacccacctcagcctctcatagtgttgggattacaggtgtgagccactgcgcctggccaataatttctttttttcttttcttttcttttttttttttcaagttacatgaagtaaatttattatttacagctaggcaacaagggaaaaccgaagcataggattcattgtgagccaatctcccgagactcaggaaggttgccccgggaggatggagtctcatttgtgtgtaccccatttgtacctggaaagcagaccatcttgggttttatattctggaggcaacatgacatgttgggctaaaatgatgaaggacatcctgtttctaggagggactggaacagagcctgggctgtttcagccagtccctccttatctcaggatattgcattcctagcacattctacagttattcttgagaactattttttttttttttttagtatttattgatcattcttgggtgtttcttggagagggggatttggcagggtcataggacaatagtggagggaaggtcagcagataaacaagtgaacaaaagtctctggttttcctaggcagagggccctgcggccttccgcagtgtttgtgtccctgggtacttgagattagggagtggtgatgactcttaaggagcatgctgccttcaagcatctgtttaacaaagcacatcttgcaccgcccttaatccatttaaccctgagtggacacagcacatgtttcagagagcacggggttgggggtaaggccgtagattaacagcatcccaaggcagaatttttcttagtacagaacaaaatggagtctcctatgtctacttctttctacacagacacagcaacaatctgatctctctttcctttcccatttcccccttttctattcgacaaaaccgccatcgtcatcatggcccgttctcaatgagctgctgggtacacctcccagacggggtggcggccaggcagaggcgctcctcacatcccagacggggcgtcggggcagaggcgctccccacatctcagacgatgagcagccgggcagagacgctcctcacttcctagacgggatggcggctgggaagaggcgctcctcacttcccagactgggcggccaggcagagatgctcctcacttcccagacggggtggcggccgggcagaggctgcaatctcggcactttgggaggccaaggcaggcggctgggaggtggaggttgtagcgagccgagatcacgccactgcactccagcctgggcaccattgagcactgagtgagcgagactccgtctgcaatcccggcacctcgggaggcccaggcgggcagatcactcgcggtcaggagctggagaccagcccggccaacacggcgaaaccccgtctccaccaaaaaatacaaaaaccagtcaggcatggcggtgcgtgcctgcaatcccaggcactcagcaggctgaggcaggagaatcaggcagggaggttgccgtgagccgagatggcggcagcacagtccagcctcagctcggcatcagagggagactgagaggggggagggggagggggagggagagggagaggtctttttttttcccactcccccgctcttgttgcccgggctggagtgcaatggcgcaatcttggctcactgcaacctccgcctcccaggttcaagcgattctcctgcctcagcctcccaagtagctgggattataggcgcccgccaccatgacaagctaatttttgtattttttttagtatagacggggttttcaccacgttggccaggctggtcttaatctcctgacctcaggtgatcggcctgcctcagcctcccaaagtgctaggattacaggcgtgagccactgcacctggcccatcattttacttttttaatccaagttctaacctaggataacacacattgtcatggcaactttttcattttttaagacatgtcttgctctcttgcccagactgtattgcagtggtgcagtcatggctcactgcagccttcacctcccaggttcaagtgatcctcccacctcagtctcccaagtagctgggactgtaggtatgcaccaccatgcttaagtaatttttaattttttgtagagattgactaatttttaattttttgtagaaatggagtctcaccatgttgcctaggctagtttctaactcctggcctcaagtgatcatcccacctcagcctcccaaagtgttgggattacagacgtgagcctcctagcccaggcaacttactttttcatgacatcgacagttttaaagattacagaccagtgttgtcacccctcaccttggattcgtttgtttctttttcttgttttgttttgagacagagtcttgctctgtcacccaggctggagtgcagtggcgtgatcgcagctcactgcaacctctgcctcccaggttcaagtgattctcctgcctcagcctcccaagtagctggtattacaggcacccaccaccacgcctggctaatttttgtattttagtagagatggggtttcaccatgttggtcaggctggtctggaactcttgacctcaagtgatccaccctccttggcctcccaaaatgctgggattacaggcgtgagccactgcacccaggctgtttgtttcttaatgactagaatcagggtaaacgttttcttagacattgtttttcaacacaaaagataaaattgtgagtgcaccactgtgcatcttgctttatctactgaacaatgcctctttgagaaccttccctatcagtacacaaagagcttcctcattcctttacacagttgcatagtattccattgaacggacttaacatatttaaatagccccctgggggaggacagttaggtggtttccagtccttggggatttcaaacgatgcttccggaaataaccttataaatgcagtttttcttatgtgataatatatctacagcgtacgtccctagatgtggaattgagcctccaaacttttatgtttataattgaggtggcatttacatggcgtgccatgcccaggtctccagtgtacagtcagctgtatagtgtgttttatcaccccagaaaccccctcatacccttcccagtctctcctaccctaggagcagccactagtctgatttctagcgctgtagatcactttagtgtattctacaactttgtctaaatggtattgtacaatttttatggaggtaaaattagccattttaaagcaaacaatggctgggcgtggtggttcatacctgtaatcccagcactttggggaggccaaggcaggcagatcacttgagcccaggggtttcagaccagcctcagcaacatggcaaaacccgtctttaccaaaaaacaattggctaggcatggtggcacgcatctgtcttcataactactcaggaggccaaggtgggaggatcacctgagcccgggaggtcaaggctgcagtgagctgagatcatgccactgcactctagcctgggcaacagagtgagatcctgtctcaataaagagagaaagtaataataaagcaaagaattcagttggtacgttcacagtgttgtacaaccattacctctgtctagtttcaaaacatttcatcacccctacagaaaaccccatactccgtaagcagtcactcctcattcccccagtgtgcactttgccttctgcacagcctgctttcaagattcatccgtgttgcatgtctgtcaggagctggcccctctctaatgctgagtgtctgttatgaacctccctgaacatttctaacatatactccatcagttcagaatttttccatgcttatttcaggtctaagctgttgtaccaaggagcccccaaaacacagtggcccaagaaagatacaaattgatttctccacataacgctttggaagataggcaagtgtgcagggttggcagacagctttgctctggaaggttgttggggagcccagtgttgtccctgtccttgtggttggctctcccactacatccatgttccagccactgtgacggggaagagggtgggaggatgtcccagtagctgcacacctcatgatcactctcattcctggagggagaacttagtcacgtggccctcctggcagcgcacactgggaaatgtagcctttggctgggcagcctgtggccactccggacacgcagggttggaggggtgtgttctattgcaaaaaagcaaagcaaagccgggcgcggtggctcacacccataatcccagcactttgggaggccgaggcgggcggatcatctgaggtcaggagttccacaccagcctggccaacatggtgaaaccccatctctactaaaaatacaaaaaaaaattagcgggtatgatggtggacgcctgtaatcccagctactcgggaggctgaggcaggagaatcgcttgaagccaggaggcgaaggttgcagtgagccgagatcagccactgcattccagcctgtgtgaccgagtgagactccgtctaaaaaaaaaataagtaaaataaaaaggcaaaatgaggactggatatggggcaaccgttatgagatccagggatagacagctgacctgctcccctgcctcttcccagccgcatctaggatctgccctaggttccagtaatcccctctgtctcagcctggaccctgggggacaagtactttgtttttgtttgtttgttttttgagacagaatttcacccttgttgcccaggctggagtgcaatggcgcagtcttggctcactgcaacctctacctcccaggttcaagggattctcctgcctcagcctcccaagtagctggggttccaggtgtgcgccaccatgcccagctaattttttttttttttttttttagtagagacagggtttcaccatgttgataaggctggtctcaaacaactgacctcaagtgatccacccgcctcggcctctcaaagtgctgggattataggtgcgagccacggtgcccagctgggtacaggtactttttaaaaacttctttctctgacaatttcaaattaacaggaaggttgaaagaataaatagtgtaggccgggcgcggtggctgggtacaggtactttttaaaaacttctttctctgacaatttcaaattaacaggaaggttgaaagaataaatagtgtaggccgggcgcggtggctcacacctataatcccagcacttcgggaggccgaggcgggcggatcacgaggtcaggagattgagaccacagtgaaaccccgtctctactaaaaatacaaaaaaattaggcgggcgcagtggcggacgcctgtagtcccagctactcaggaggctgaggcgggagaatggcgtgaacccgggaggcggagcttgcagtgagccgagatcgcgccaccgcactccagcctgggagacagagcgagactccgtctccaaaaaaaaaaaaaaatagtgtaaagaacacctgcacgccctttgcccagatcacctgtttcaacattctgtcctatttatgatttgcatggatgtttcttatctcccttctctctgtatacgtacactcactttttacaaagaattcccaataccttgcagacattatggccgtttactcctaaatacttgagtgtgtatctccttagaatattcttattgaaccacaataaagtcacccacttaagtttaacctgcatataaccttgtctaatcaaccagaggatatatacttttttttttttttttttttttttttgagacagggtattgccatcttgtccagtccagtcttaaactcctgggctcaagcgatcctcccaccttggcctcccaaagtgctgagattacaggcataagccactatgcccagtgaacttttttgttgtggttgtttttttgtttgtttgtttgggttttaattgttgttgttggtggtggtttttttttgtttttttttttgagacagaatattgctgtgttgcccaggctaaagtgcagtggcgcgatctcggctcactgcaacctccacctctcgggttcaagtgattctcctgcctcggcctcccgagtagccataattacaggtgtgtaccgccacacccagctaatttttttgtatttttattaaagatagggtttcaccatgttgaccaggctggtctcgaactcctgacctcaagtgatccacccgcctcagcttcccaaagtgctgggattacagcgtgggccaccgtgcctaactctagtcaacttttatattgtatatcttgtacattgtatatcttgtcaaggatattgtatatcttgtcaaaatacacccccaaaataataatatatatatatattttttgagatggagtctcgctctgttgcccaggctggagtgcagtggtgcaatctcagctcactgcatgctctgcctcctgggttcacaccattctcctgcctcagcctcatgagtagctgggactacaggcgcccaccaccatgcccggctaatttttttgtatttttttagtagagacggggtttcaccatgttagccaggatggtctcgatctcctgacctcatgattcacctgcctcctaaagtgctgggattacaggtgtgagccactgctcccagcctccaaaataatcttttataggttgtaattaagaaaacacaggccaggcttggtggcttacgcctgtaatcccagcactttgggaggccgaggcaggtggatcacctgaggtcaggagttcaagaccaggatggccaacatggcgaaaccctgtctctactaaaatacaaaaattagccaggcatggtggtgggcacctgtgatcccagctactcaggaggctgaggcaggagaatctcttgaacctgggaggcggaggttgcagccaagatcgcaccactgcactccagcctgggtgacagagcgagactccatctcaaaaaaaaaaaaaaaaagaaaacacaggccaggcttggtggctcacgcctgaaatctcagcactttgggaggccaaggcaggtggatcacttgaggtcaggagttcaagaccagcctggccaacatggtgaaaccccgtctctactaaaaatacaaaaattagctgggcatggtggcgcgtgcttgtaatcccagctacttgggaggctgaggcagaagaattgcttgaactgggtcccgggaagcggaagttgcagtgaatcgagattgtgccactgtactccagcctgggcaacaagagtgagattctgtctttttttttttttttttctgagacggagtcttgctctgtggcccaggatggagtacaatggcacgatctcggctcactgcaacctccgcctcccaggttcaagcaattctcctgtctcagcctcctgagtagctgggattacaggcgcctgctacctcacctggctaatttttgtatttttagtggagatggggtttcaccatgttggtcaggctggtctcgaactcctgacctcgtgatccgcccaccttggcctcccaaagtgctgggattacaggcgtgagccatcacacccggccctgattatgtctttaaaagaaagaaaaagaaaacacaaatatatataagtagcagtctgtatgtgttttgtgttgtgttttgtttgctactgtgggtcctggactcggggagaaagcaggttactataaacggcattttggagacagttggagaaattgggaaaggtgccctttattttatatcaaccttgagtcagtgttaaatgtcctagattgtatcgtactgtgctcggtgaaaggaattccttattgttaggcactacgtgctaacatgtggaggggtatgggatctgcaaggaactctcaaattactcaggaaaagaagtaacaatatgatgtgcataccgcacatgtgggagggcagagagaggcggtgagagagcacacacacgacacgctgaccaccggggagcctggggaagggcatacaggagttctaggcatttgagattatttcaaagtatttaggttggtgcaaaagtaattgcagtttttgtcatttcaatggcagatggcctgggcagatgggtggttggtaggcgaggtatcggagacagaggtttatggaaaataaagagatgtgccaaggccgggcgcggagactcagtcctgtaatctcagcactttgggaggctgaggcgagtggatcacctgaggtcaggagttcgagaccagcctggccaacatggcaaaaccccgtctctactcaaaacacaaaaattagctgggtgtggtggtgggcgcctgtaatcccagctactcgggaggctgaggggagaatcgcttgaacctgggaggtagagcttgcagtgagccgagatcatgccattgcactccagcctgggtgacaagagcacaattccatctcaaaaaaaaaaaaaaaaaaaaaaagcaagagatgtgctaaggacctagtgtgatgggagagagggtcggggagtcgacggggctgctgctgcagtagctaacaattgagcgtctggaatgtgctcccaccccactgcctgcagggtgcagagagctatgttagtacagccagtccagagtaggaaaaggctcgtggtcatggtgggtgcatgggatgccatggagacagggtaagaggtgtctccggtcagaacctccaccaagctccaacttgcccagcaggatggatggcaagcggcggccaggcccagggcccggggtgcccccaaagcgggcccgtgggggcctctgggatgatgatgatgcacctcggccatcccaattcgaggaggacctggcactgatggaggagatggaggcagaacacaggctgcaggagcaggaggaggaggagctgcagtcagtcctggagggggttgcagacggtaaggcttggagttggaggttcctgctgcccaacccattgcccctggtcttgcctttggtccaagagtcagctgcaaagctgacctgtgaccccactctggccaattttgaatcctacaaaggactgcccttccaccccgtgcagcctgtgtggcctacagtgattctggccctgacccttgaccctcattctcttccaagtttcctgcctgacccagaccaccacctctgcctggctcctttcagaaccacatgccatcctggccggggaagaccatgactccatgtactccacttccttcccttcccccaccagggcaggtcccaccatcagccatagatcctcgctggcttcggcccacaccaccagcgctggacccccagacagagcccctcatcttccaacagttggagattgaccattatgtgggtgagtttaggggttatgggtgagtgctggggccctgcgctcctggggcagaggccgggccaggtcagcccctctggccctgtgctcctggggcagaggccgggccaggtcagcccctctggctctgcccctctggttgccatagagctgtagtgacagaacagaccagtgggtgccaggggttgtggagtgcgaagcgaaggtgacacagggtcagcttgagggaggtgcttggagcgttgatctgttttgcatacgtagtagctgcagcctgtgcaaggacctctgtgccttaaaattcataacaccagacacataaaccaaaagtcaatttgacttcttttttttgagatggagtcttgccctgttgcccaggctggagtgcagtggtgtgatctcggctcactgcaacctctgcctcccgggttcaagtgattctcctgcctcagcctcccaagtagctgggattacaggtgcacaccaccatgcctggctaatttttgtatttttagtagagatgggcttttgccaagttggctaggctggtcttgaactcctgacctcaagtgatccacccgccttggcctcccaaagtgcttagattacaggtgtgagccattgtgccagcccaatttgactttttaaaagattttttttttttttttttttttttttttgagacaagattttcctctgttgcccaggctggagtgcacctggccaataattttttttttttttttttttttttttaagatggagtcttgctcctgtcgcccaggctggagtgcagtggcacactcttggctcactataacctccgcctcctgggttcaagtgatccttcttcctcagcctcccaagtagctgggattacaggcgcccgccatcacgcccggctaatttttatatttttagtagagacagggtttcgccatgttggccaggctggtttcaaactcctaacctcaggtgatctgccgaccttggcctcccaaagtgctgggattacaggagtgagtaactgtgccccgcctattttttttttttttttttttttttttttgagacagagtctccctctgtcacccaggctggagagcagtggcacaatcatggttcactgtaacctcaacctccagggctcaagtgatcctcccacctcagcctcggagtagctaggactacaggtgtgcaccacaatgtctggctaactttttttttttttttgagacggagtcttgctctgtcacctaggctggagtgcagtggcgcgatctcggctcactgcaagctctgcctcccaggttcacgccattctcctgcctcagcctcccgagttgctgggactacaggcacccgccccaactcctggctaattttttgtatttttagtagagatggggtttcaccgttttagccaggatggtcttgatctcctgacctcgtgatccgcccgcctcagcctcccaaagtgctgagattacaggcttgagccaccgcgcccggcctggctaacttttaaaaatatacttttgggcccggcatggtggctcacttttggaggctgaggcaggctgatcacttgaggacaggagttcaagaccagcctggccaacatggtgaaaccccgtctctactaaaaattcaaaaaattagccaggtgtggtggcatgggcctgtaatctcagctgttcaggtggctgaggcacaagaatcctttcaacctgggaggtggttgaaatataaatataagatatatatatatgatatattctttatgtattaatttatgtataacatatattatatattaatatattttgtagagacaaatatatttatttgtacatataatatgtgtgtgtatttgtgtatatgtgtatatatatatatatatatatatatatattttttttttttttttttttcttttttttgagactgggtctcgctcttttgcccaggctggtctcaaagtcctgggctctagcgatcctcccgccttggcctcacaaagcactggaatcacaggtgtgagtcactgtgcacggccagttgtttttatcttgtaataaaaaagaagggcctccctgtagttgtgctgtggagaatggatcctgggggatgaggctggagatgggaaccaggggggaggctgaaatggacacagggaacggtacaggggcaggagtgccccaggctgcaggccccaaggtatttcgaggctgtggagacacaccttggaggaccctgagaggcatggccgctgtcttaccctgtgaccccacaggcccagcgcagcctgtgcctggggggcccccaccatcccgcggctccgtgcctgtgctccgcgccttcggggtcaccgatgaggggttctctgtctgctgccacatccacggcttcgctccctacttctacaccccagcgccccctggtgagtggcccctacccagcccctccctgagccactggagccccctgcacctctgatcatccctcccacaccaggtttcgggcccgagcacatgggtgacctgcaacgggagctgaacttggccatcagccgggacagtcgcggggggagggagctgactgggccggccgtgctggctgtggaactgtgctcccgagagagtgagtgctcccccaggatcagcgggttggagggtcccctcgggaggccattggctggtcccagcttcttccatccacaggcatgtttgggtaccacgggcacggcccctccccgttcctgcgcatcaccgtggcgctgccgcgcctcgtggccccggcccgccgtctcctggaacagggcatccgtgtggcaggcctgggcacgcccagcttcgcgccctacgaggccaacgtcgactttgagatccggtacggcctctgcctcacttctccggcctctatccccaccctcgggcagcccctgtccactgacccccagccccctccaggttcatggtggacacggacatcgtcggctgcaactggctggagctcccagctgggaaatacgccctgaggctgaaggagaaggtgcagggcttcccagggcagggctgggtggggagctggtaccctgctgccaccgctgacccacccatgcccacaggctacgcagtgccagctggaggcggacgtgctgtggtctgacgtggtcagtcacccaccggaagggccatggcagcgcattgcgcccttgcgcgtgctcagcttcgatatcgagtgcgccggccgcaaaggtctgtccccgggcccgggctcctgcccgcctcattgatgtgccaagtcgggggtcggaaaggcaggtccggtggagggaatggcaagcatgaaggtgccggggcaggagcaccccagcccatgtggccagatggagtgagcacagagggtgtggagatggcctggaggtgagagcagagcaggagccagggtgagccacgtagggccggcaggcagcggggacagccccggggagatggcaggtgcagcctccctgctgtgttgggagtgaggggcaggagtcaggcccctgcatcctcctgcctcgcaggcatcttccctgagcctgagcgggaccctgtcatccagatctgctcgctgggcctgcgctggggggagccggagcccttcctacgcctggcgctcaccctgcggccctgtgcccccatcctgggtgccaaggtgcagagctacgagaaggaggaggacctgctgcaggtagctctcgctccacgccccacaccatttcccggggtccccgccagcctccgcgtcctgagccatcagctcctgggtgctgcgacgcccatgtctgtgggtctgggtgggtgtctgtgggtctgggtgggcccctgtgcaattaggcttgagcacttcccctctgggttctgcaggattttcaggggtggctggggttctagaacattctggaagtaggggaatccgaggcagggcaaccaccagggtgacccaatgtgctcccacccccaggcctggtccaccttcatccgtatcatggaccccgacgtgatcaccggttacaacatccagaacttcgaccttccgtacctcatctctcgggcccagaccctcaaggtgagggctgggcaggtgggaggcttctctcagatgccccaggtgtggcctccgggccctgggcctccttcccactccctctccacatggcttggtgcatcttgctctgtgtgcctcagccgattgcctgcaggggcagcctaggcctggtcctgccctgctccaagtcgaaaaagttactgtggcttttatcagaggcaaggagggcgttacggtggagtaagagaaggctgtgcattcaaggtcggcctgaagcttgcaggggttcaacaagccatgaagcagccactgaatcccagtcttcctttaggttatatcagcataaggaaaagaatcataatggaggaggaggggggagtgtgttgactgatggggcaaattccggatgcttcttgagtctgcatgtgtgtaagggtggattcctctgcccgagttgctgtaacaaagagccacagaccaggtggctgaaaacagcaaaaagtcattgtctcaccgtcctgaaggctggaaagtccatgaccaaagtgtcagcgggcctgcttccttcgggggctgcaagggaggactggttcacggcctctctccttggcttgcagacggccatcatccccctgtgcctcttcacaccgtcttctctctgtgcgtgtctgtttccacatgtcctcccttttttttttttttccaagacaaagtctcgctctgtcgcccaggctggagtgcagtggcgcaatcttggctcactgcaaactccgcctcccaggttcatgccattctcctgcctcagcctcccaagtagctgggactacaggcgcccgccaccacgcctggctaattttttgtgtttttagtagagacggggtttcactgtgttagcgaggatggtcttgatctcctgaccttgtgatccgtctgcctcggcctcccaaagtgttgggattataggcgtgagctactgcacccaaccccttttctctttcttttttttttttttttttttttgagacagagtctcgctgtgtcgcccaggctggagtgcgatggcacgatcgaggctcactgcaacctccacctcccaggttcaagcgattctcctgcctcagcctcccaagtagctgggattacaggcgtgagccaccacgccccgcaaatttttgcttttttgttattgtttcttgagatggaatttcgctcttgttgcccaggctggagtgcaatggcacgatcttggctcaccacaacctccgcctcccagggggcgctggggtgtagaagtgattctcctgcctcagcctcccaagtagctgggattataggcacccgcttccatgcccgactaattttgtatttttagtagacagggtttctccatgttggccaggctggtctcgaactcccaatctcaggtgatctgcccacttcggcctcccaaagtgctgggattacaggcgtgagccaccgcgcctggcctatttttgtttttgtttttgttttttttagcagagactaggtttcatcatgttggccaggctggtctccatcctcacctcaggtgatctgcccacctcagcctctcaaagtgctgggattacaggtgtgagccagtgcacctagcccacatgtcctctttgtgtagtgacaccgtcgtgaggtgagggcccaccccagtgacctcatcttcacttgaccccctgcgaagacatatttccaaatgaggttacattctgaggtgccgggggttagggcttcaacatcttttgggagaacatggttcagcccttaatgagatatattgccttattttcctgcttttctctatgtctggccagcttggtaatggaaaaacaaaacaggctgggtgtggtggctcacgcctctaatcccagcactttgggaggatgaggcgagaggatcgatggagcccaggagttcaagaccagccagggcaacatagcaagaccctgcctctattaaagagaaaacaagaaaaaatccattctaaaatacagaacaaactcttaggacccccagtgtatattccacagcgtggcgctgatgcccgggccatggtactcctcctccccttccctgggtgtccctcaccctctgccctgtccccagctcaggcttcttctggcctcagtctcccccaggctgggccccagcaccctgcaaggcctcctgcagccaggcgccctccagcgccctcagcatccatctcagcccagctccacgccgcctcctgcctctgcccccacctggccgcctgctcacagtgtccccaaatctcttcctgtttcctgcctaggtacagcccgcagacactgggctccatccttggcccccagtccatcagggcccctgactctcgctatcccagccttggctgcagcttagtccttactccggactccctccccagtctccagccacccacacccagccccagaccgtctttctgcccccagggttgctctcgaccccctagggttgttataaggatgttgtggttggtctcaatctccgttcttcaggcttatgtgacggggacccgcagcctgctgcacaccctgcctctcctcctcaggtacaaacattccctttcctgggccgtgtggccggcctttgctccaacatccgggactcttcattccagtccaagcagacgggccggcgggacaccaaggttgtcagcatggtgggccgcgtgcagatggacatgctgcaggtatgggcgggaggtggggtgtgtccctgtccttggaaggccactgcccaggcccgcagcccaccagcccacccacccacctaggtgctgctgcgggagtacaagctccgctcctacacgctcaatgccgtgagcttccacttcctgggcgagcagaaggaggacgtgcagcacagcatcatcaccgacctgcaggtgcctgctgcctccctgacctctcaccccaacctctgacctccacctcacccttccccggcctctgacctcaacttcacgcccccacgtctgacctcactctttgacctgctgttatgacctgtgaccttacctgacgcccactttttcctgacctctgaccccagatttctctccactcctgtgacctctgtcactatgaccttgtctctgctttcctggcctgaccacaggtccacggtggccttcaggctgctccctcctcctccctctggccctgtggactccctggcccccaaccctacctccatccccacccagaccctgacgacttggagggccctcctgcccgcctcacctcccaggccctccccaggctacctcaccctgacccccacttccttctcctgctccacctcccacccccaacccctggtccctgaccccatccgtgcccatccccagaatgggaacgaccagacccgccgccgcctggctgtgtactgcctgaaggatgcctacctgccactgcggctgctggagcggctcatggtgctggtgaacgccgtggagatggcgagggtcactggcgtgcccctcagctacctgctcagtcgtggccagcaggtcaaggtcgtatcccagctgttgcggcaggtcagtagccgagacttgtcctcgccaccccccaccaggcacgtctgtggccccctccaggcaatggcatcctggatgcactttttctccccactcccaatccgcacggccccacctatacccactccatttcccaccttctcccctcccaggccatgcacgaggggctgctgatgcccgtggtgaagtcagagggcggcgaggactacacgggagccactgtcatcgagcccctcaaagggtgaggccccaggctgggtgcagtttttacctgtaatctctgggaggctgaggtgggaggatcacttgagctcaggagtttgagaccagccagggcaacatagcgaggcccctgctccacaaaatttttttatttttatttatttttatttttatttttttgagacagagtctcgctctgtcacccaggctggagtgcagtggcgcaatctcagctcactgcaagctttgcctcccgggttcacgccattctcctacctcagtctccacagcagctgggactacaggcgcccaccaccacgcctggctaatttttttttttttttttttttttgcatttttagtagggacggggtttcaccgtgttagccaggatggtctcgatctgacctcgtgatccacctgcctcggcctcccagagtgctgggattataggcgtgagccaccgtgcccggccgaaaaaatttttaaaaattagccaggcgtggtggtgcatgcctgtaatcccagctacttgggaggctgagctgggaggatgatgagcccaggaggtggaggctgcagtgagcgatgattgcgccactgccctccagcctgggcgacagagcaacaccccggccctaaaataaattaataggccaggcacggtggctcacccctgtaatcaatcccagcactttgggaggtcaaggcaggcggatcacaagttcaggagattgggaccatcctggctaacacggtgaaacccccgtctctactaaaaatacagaaattagctgggcatggtggcgggcgcctgcagtgccagctactcgggaggctgaggcagaagaatcgcttgaacccgggaggtggaggttgcagtgagctgagattgcgccactgcactccagcctgggtgacaaagcgagactccgtctcaaaaaaaataaaataaaataaaatagtagattaattatatatattatttttctttttctttttctttttttgacacagggtctcactctgtcacccagggtggagtgcggtggcatgatcttggcttactccacctcctaggctcaagcaatcctcctgcctcaggcccctgagtagctgggaccacaggcgtgcaccaccacacctggctaatttttaaaatttttttgtagagatagggttttgccatgttgcccaggctgatctgaaactcctgagttcaagcgatcctcctgcctcagcctcccaatgtgctgggattgcaggagcgagcactgctcccagccaatgaatgattttttttttttaaagggtgaggccacaagacagggcgggggcggcatgggaactcctagccctgactcccggccgcggctgctcccctcccaggtactacgacgtccccatcgccaccctggacttctcctcgctgtacccgtccatcatgatggcccacaacctgtgttacaccacgctccttcggcccgggactgcacagaaactggggtatagtgcccaattcagcatgtgtcccccgaggcccatctgggccttcccttggggggctcagtctggtggggggcataggcacaggcccagagatagtagggagtggaggggtgcttgaggggcctgcgtgtgctcatggccaaggccaggaccgtagggcagaggtgggctggagcaggagggtggccggcagtcaccccaacatcttccaacccagcctgactgaggatcagttcatcaggacccccaccggggacgagtttgtgaagacctcagtgcggaaggggctgctgccccagatcctggagaacctgctcagtgcccggaagaggtgagccctggagatcgcctgcttggagctcagacctgttggggcctctgggcaatccctgtccctcactgggacaccccagggctgcccagccaccctgccctcagctgtgcgtgaattagcacaaggcatcccctcctggcagcttccttttgcccccttggccagaagcttctgtgcagtgcacagtacgcccaaccgtacatggcactcacttccagaaaggagccctgaccaatgcccaggtgccgcctgagtgtgctttccccgtgttccctcgcagggccaaggccgagctggccaaggagacagaccccctccggcgccaggtcctggatggacggcagctggcgctgaaggtgagcgccaactccgtatacggcttcactggcgcccaggtgggcaagttgccgtgcctggagatctcacaggtgggcactcgggcccctggaaggcaactgggggcaggtgggccccctgtgtaggagaccagggctccatgtgggggacctgtatccagaggactgggcaccccaactcactggccttctagagagaggatgccaatgtggcttgagcaattggtccattccttcactcagcaaatgcctactgagcacacactgtggtcagggctcactctgtgccctggggatacagaggggaacaaaatggatgagagctcctgtccctgtcatcttgcagcccagtggggacactgacaggtctgtgtaaacgtgtttaggacacaagtggcgctacgagctttgcagccggataaagcaggaggtgcggactgtcggggagtgatggggctgggcgggactcacccctctcaataggcgacgctcacacagaggccaagggacgtggggagggaagccattcaccgtccccacggcagcgtcccggtctgcctacccacggcagctctgctgcttgaacagaaaaacagattctttgaaaccacagagggcctgagtttccgagattgccaagctggggtcagtgccccagctcctggcatatgagggcctcggaagggtcttcctgtccagccttctcccctgggacttgagtcttggcccattccaggccagtagttgtgctgctctgcttggttacctctagccacggggagctccctctctggctgggcactgcgccacttttcacagggctctgggtggaaggcttggatgaattctcagtgggtggggcctttgcacacacccacccacccgcagttctgggggtcccaaagaccacttaggttcagtgattcactagaagtactcagagagcagaaaagctggttctcatggttatgatttaatacagcaaaaggacacagattaaactcagcaaaagaaagaggtgcacagggcagggtataggagggaccaggcgtgtcttccagttgtgctctcccagtagagttgccaggctggccctccttcctcccagttttgatgcgtgcctgcacacatgcagcattgccaaccagaggctctcacccaagctttggggtccagggtttttcttgggtgtcagtcctataggcatggagcaccctgtgactggccttagtgactccatcatccccaggcccctcagcaacccccagaggtcaaactgatactgcatggcccagggccctaccataaaccatgttagtgtcaactacctggtgtggttcaaagtcccaggtacacaaacaccttttttttttttttttttgagacagagtctcactctctcacccaggctggagcgcagtggcacaatcgtggctcactgcagcctcaacctccgggactcaggtgagcctcccacgttagcctcccaagtggctgggactgcgggcacgtgccacctatttttgttattttttgtagagatagggtctcgccatgttgcccaggctggaacagagacactgttatcaggcgggatattctaggggcttagactaccaggagccaggcaagagccagacctttctttgcacaaagtgaatcgctcactgcatgctcccaactcccctctgcctttcacagtccccggctgcctccccagcctccttggtggaaaggggtggctgtgtggacatcaggctctagccctgaagcagaggccaggccaagagagcacagcttggccctcccctggggctgcctcttaccaatcctgtgtctctgtcttttctctctcagccgcttccctctgtcactgttctgtttctgtctcttgacctctttccttatttctgtctctcaagcttatgggagcaagaggtggaataataaaaatgcaatgaattggctgggcgcggtggctcacgcctgtaaccccagcactttaggaggccgaggcgggcggatcacgaggtcaggagttcaagaccagcctggccaacatggtgaaaccctgtctctattaaaaatacaaaacattagccaggagtggtggcaggtgcctctaatcccagctactcgggaggctgaggcaggagaatcgcttgaacccaggaggcagaggttgcagtgagccgagattgcgccagtgcgctccagcctgggcaacagagcaaaactccgtctcaaaaaaaaaaaaaagtaatgaattacagtgttcacgcctgtaatcccaacactttgtgacactgaggagggaggatcacttgaggccaggggtttaagaccagcctgggcaacatagtgaaaccccatctctacaaaaaatacaaccaaacaaaactagccaggcattgtggtagctcatgcctgtagttgcagctactcaggaggctgagacgggaagatggcttgaacccagcagtttgagttacagtaagctgtgatggcatcactgcactccattctgggtgacagagttgagaccctgtctcttttagtttttgtttgtttgttttgagatggagtcttgctctgtcacccaggctggagtgcaatgccacaatcttggctcactgcgacctctccctcccgggttcaagtgattctcctgcctcagcctcctgagtagctgggattacaggcacccgccaccatgcctggctaatttttgcatttttagtagagacggggtttcaccatgttggccaggctggtcttgaactcctgacctcaggtgatccacctgcctcggcctcccaaagtgctgggattactggtgtgagtcaccacgcttggcctcctgtctcttaaaaaaaaaaaaaaattgaatcatttcaggaaaagattacaaaggaaagaaaaaggaacataggacaggtggaacaagtaaaagctagacagtaaagtggtagacgtaagcccagctatatcagtaattacactaaatgtaaatggacaaaatgctctagttagacagatttcctgactggatccacacaaacaaaaacagaagaatcacacccatctctccttggtgtccccacccccagcctcaggtttggtggtggtggtggtggtggtggtgttgttgtttaagtattttttagttttgtgtgtgtgtgtgtgtgtatttttagtagagatggtgtttcaccatgttgtccaggctgatctcgaactcctgacctcaagtgatccagccacttcagcctcccaaagtgctgggtgtacaggcataagccaccacgccagctagttttcttaactctaaaataagacagtgggtttctcaatggtttcttagtcagggtggtgccaccccctgctctggggggcatttgtcaatgtgtaggtagggccagttctggtggtacagggatgggggtggcactgctggcttccagggatggggctggctatgtcggtggtcctgtaccatagagagctgcccagaatgtcagtgtgagggaaacactgggccagtggcctcttcaggccgcagtctttccagcatgcatttgatgtagtcacttccttgtgcatgtccagaactctgagccagggaacccacttctttccacctgaccattgaggagccgccttatagtcccattttgcagatttgggaactgaggcccaggaggggcagagtggcttgtacataagcctatgccactgggaaatggcagaggcgggacccctcccccgccggcccacgttcactgcacatggcccccagggcttcactccgcatgattctctccccgacagagcgtcacggggttcggacgtcagatgatcgagaaaaccaagcagctggtggagtctaagtacacagtggagaatggctacagcaccagtgccaaggtcgggggctgcccaccgctgccctgagatgggcccagggcaggtggggggatggaagccgggccggacccccatgtccccgtgcctcctggtcacaccctgcccactctcctgttgcatccttgggtcccgttggcattagccacctgccaccccccgacaccagtagttgacagaagggaccctgcttctcacatacacacatccccaccgcccgcaggtggtgtatggtgacactgactccgtcatgtgccgattcggcgtgtcctcggtggctgaggcgatggccctggggcgggaggccgcggactgggtgtcaggtcacttcccgtcgcccatccggctggagtttgagaaggtgcgtggctgggtcaggggctctgcatttaggtgccctcatcagggtactcagggtgtcccgttctttgggttcacaaaagccacagtgtgaagggatgttgctgcttagattctcctgaggctggggccttggtttgggaagcctccaaggccttgggctttgttaccctggatggcatctgttctttgaaaaccctgtcgctgtccctggttttgaggtgtcacagtgtccctggttttgaggtttcccagtacctgtcagatgtggagctgccctccacgcagggaccctgatgggggtgcaccttagatctgtgcaccattgcccctggccctctgagtgcggcacacttggtcccaggaaaccttgcaccatattttcttttgaagagtctgggtctcgctctgtcgcccaggctggagtgcagtggcgagttcacagctcactgcagcctccaactcctgggctccggcgatcctcccgccttggcctcctgagccgccacgcccagttctcacactgtactgtttccccgtggcttaacgctctctcgtgccaggccttggacttggagcctcgcagagtggggaggtctctgcctcagggctcacccagccgtagtttctcctctctttcatgggatgcttcatcgactcgcctgtctggatctcatgttttagggactatctggatttatcccagtctctgtttcagattggggtctctggtgtgggggctctggcattgccgaggggcctcaggagccacttccagccatacagtgtctcggtccatcccaccaggctcagggcacggctcccatgtcctcaaactgcgtctgggaccctgtctaccttcagtttctggggggcgtctccagattggggcttggcctcctcaggctcagggtcttggccatggctccctcccaggtctacttcccatacctgcttatcagcaagaagcgctacgcgggcctgctcttctcctcccggcccgacgcccacgaccgcatggactgcaagggcctggaggccgtgcgcagggacaactgccccctcgtggccaacctggtcactgcctcactgcgccgcctgctcatcgaccggtgtgtggggcctcctccctcagactcagggggctgggccccaaacccctcctccctcagacccaggagtctaggccccagcccctcctccctcagacccacgggtccaggcccccagccccctcctcctcagatcccggggtcagggcccccagccccttcctctcttagatacaagagtccagacccccagcccctcctcctctgggaacacaggtgtcaggcccagctcttcctcggtggtgaagcagtggaaagagtcggcttgggcagctgtgggttcaggccctgcctctgccactctgcagcctatggtaggaagggcccctctctgccctgagcctcagccctaagagctcatcctggtctccagccctgagacccgtggaggcaccagcctggccctcagtgccttttggtgacgctgtgcggcccgctctcctacagagaccctgagggcgcggtggctcacgcacaggacgtcatctcggacctgctgtgcaaccgcatcgatatctcccagctggtcatcaccaaggagctgacccgcgcggcctccgactatgccggcaagcaggcccacgtggagctggccgagaggtcctgcgcggggcgggtggcctggccagaaataaccccctccttcctgccagctgggcccacttcctacaccctcgcccccacccccgccacccacctgccctcacccacccgccaccccgtctccacgcaggatgaggaagcgggaccccgggagtgcgcccagcctgggcgaccgcgtcccctacgtgatcatcagtgccgccaagggtgtggccgcctacatgaagtcggaggtcaggcccacctggctgcctgctcccgcccagccccctcgctctcacttctgctttccgagatgggcgggcctgcgggaagggtggggcctccgcgtgcctgtgggccctgcagaaccgccccccatggcagcctgggtgtggcctcggcccctctggaggtcccccctctattctgacccctcccttgcttccctatggaaggatccgagtctctaccctgtgcatacaagcctcccagctcgggtgttcccttggattcataatcctgcagctctaccaccacccccagtacccacatcttagccccatgacctctgacctcctgaccccttcctcatccttgcttccccttgtgaactctgacccttccgtggtgacctgagagccctacagactctgtggcccagagactccgtgacctccgaccccatcccagacccaggccccccccatgtcacagcccgcaggcaggcctaggccctaagccccaggccccatgaccaccccgtgtccaccccggtgccctttccctggctgcccgggtgtgactgccatgtggccgcaggacccgctgttcgtgctggagcacagcctgcccattgacacgcagtactacctggagcagcagctggccaagcccctcctgcgcatcttcgagcccatcctgggcgagggccgtgccgaggctgtgctactgcgtacgggggcaccaggggactgggggcaccctgggggggcagaggagatcaccggcccaccacctgcctcctctcctgcagggggggaccacacgcgctgcaagacggtgctcacgggcaaggtgggcggcctcctggccttcgccaaacgccgcaactgctgcattggctgccgcacagtgctcagccaccagggtgagcggccctggccactgggcccccactggccctcaacctgctctgccgtcaccccagatcctagacacccaccccatcggctggcactgccacccagtgggcccagggcccctgggtgggtggcccctgtctccaccccccacagagggtcctcggcccccaccccgggagttccccaggggagttttcccagcacacttgctccgttgttctccagcctctggggactttcagaagctgggattggcagtgggcagggatggggtggcccagttcctggctgggccccagcacttgggctgacccgcctccccacaggagccgtgtgtgagttctgccagccccgggagtctgagctgtatcagaaggaggtgagagggccgggaggtgaggaggggccaggtggggaggcgggggcgccctgctcagccgctgccgtccccaggtatcccatctgaatgccctggaggagcgcttctcgcgcctctggacgcagtgccagcgctgccagggcagcctgcacgaggacgtcatctgcaccaggtgtgtgccatgtcccgaccctgggctgccccgccccttcccagctcccaggcctgtgggttgtggacccaacctctgactccaaggcctctcctgagcatcctccccgcccatccccttccagctgtgagctgtcctgagcctcagtgtccttgtctgaaaaatgggcccatcccagccccccagagggggtgggtgcttagggaggcagcgcccggcacccagtgttgcccgggaaacggctgtcctcccgacacacccagccagcctggccccctccccagggcggggccgggctttccccagggaacgggtaggcggggtgggttcccacgccaggtgacaggtgatatacggccagccatggccctgcacctcgccaggcacccgctgttatcggctccccccccccaccccccccgtgcctgctgagcaaacagcccgctgcgggagggggcgggtgggctgggcagcaggcggggaccaaagtcctgggaacagcccccacccctctcccaggctgggcactgggccttggctggtcctgaccctgcccctgcccccacccgcagccgggactgccccatcttctacatgcgcaagaaggtgcggaaggacctggaagaccaggagcagctcctgcggcgcttcggaccccctggacctgaggcctggtgaccttgcaagcatcccatggggcgggggcgggaccagggagaattaataaagttctggacttttgctatatggtgctttgtggtctctgggggacactgtctggtttcataagccctggccttggctgggaccctcctgaggcccgcaccgcccctcatcctcagcaaaagcccccggactcccacctgtgctgcctggttcatgtgggccaagcctgcctcagtttcctctctggccctgaaggaacccttataccagcgcttctctgccctgcttagggcccccaggtgtctggccccggcccagccctccctggtgatgaccctggggaccctggtggctgccccgccctccaggtgctgacctgtttcctccaggccctggggcagccccaggcgcaccggggcttccactcctcagcccggccaaggggacccccccatcccccgccggaccacacacccacgatgtttccacgtcggggtcctggcaatgggctttgggtctgggtttccccccagcgactcccatctctatccccgcagcctctaactgccgtcagatgccctcggccctcccgtcacctcacacatcccccggggagagtcttgtgcttgcccctcggcccccagcccgcccctgctggaattcggctcctgggtccagatcctccgtttcctgattctcctcttcagtgaaccccagcccttcctcgatgttttcagggttcccccaaatccagctcctgtcccatctccagccctcaaggtcagccccccaaacccagccccacggggatccccaaatccagacagcccctggcccgccatccctgccatgtgacaaaggggttgtgcaatccagccccctcccctgaccccctccctgaggggatttttgaggagggccgagcttgtggccagcgggcaccctcctccccccggcaggggctgggccaagatataaatagggttggcggctgcagcgggcggcaaacagcccgcccggcaccaccatgctcgccctggaggctgcacagtaagtgaggcccccaaacctgcacccggggtccccacctgcactgcccctctgtggggcctcacccatgggcagtggtttctctgctcctcacggccggtgggtgggagtggaggggaggggtccgccctgtctcttgccccttctggttctgttccctcttcacttcggactctccatccccccagttcctatctttcctggtccccaaagatctcatttccccagaacacttgctagcgtgccctcctgcgggcgtcctccgtggctctcactctgtccatcctcctgtctccccgagttcccgtatctgttcgctctgtatctggcatctcccagctctcaacattctgcctgttgctctctgtctctctgcctgtctctgtgtctctgtctccagttctcgctctccctgccttttggtctccttctgcctcaccctcactctcagtgcctccatctggggctccaggaatcctccccgcctctgtgcgtgaatgtccctttgcacacctttctctgtgtcccacctctccttgagcctcctcatctgagtcttctccgggcttccccctctctacccagacatctctccatccttctcctctggtccaagctggactcaactgactcgccaccaaggccgcacttgacccaggccccctctccatccccacacctcctttccgggactttctctccctcactttccctgcccctccccaccagggtgtctatgcaaattctggggaggagggggacatttgcctcccccccaccccccacttcctgtcccagcagggggtagtgggggagtccggtgaatgtggtggggctggtccctcacacagggctgcggtggtcacagctgctgccgcctccccatcagcccccaaccactttgagattcaggtggctggaggcagcctcagcatgcccctgtgtctctccccctccaggctcgacgggccacacttcagctgtctggtgagttggggcccctgggggccagggaggggtggcccacagtgacctccctcagagaagtcatttgcttcctgcctcagtttcccctcccacctcttcctgtcactttgtttctgagctcccccttggtatctcctgctaccccgcatccgtatttttgatgtctctctccccctctcaggcttgaatccacttccttgtggctttgtatctctctctgcccatcccatattcagacaatgtattttcatgttcctttccttctttttgttcgtatttttaaaaattgtgttctctaacagttcagatacggaatactatacccaacacccttgaacccacaacccagtctgagtaatcaaatcttactgatgtggttgaaagaaagcccctgtttatgcccctccacattcacaccccagccatgttttttttgtttgtttttgtttgtttgttttttaattgaagtgtaactaacaagtcagtaaagtgacaaatcttgtgtttttgcattatctatacaccgtgtagccacaagccagatcaagataccgaacatttcaatctctgaaatattccttcctgtcccttctcagtcaatacctttctctgatattttccgccaccaatttgtaatttgttttgcctgctcttttttttgttttgctttttgagaaggagtctcgctctgtcgcccaggctggagtgcagtggcagcgtcttggctcactgcaagctccacctcccgggttcaagcaattctcctgcctcagcctcccaagtagctgggattacaggcatgtgccaccatgcccagctaatttttgtatttttagtagaggcagggtttcaccatgttatccgggctggtttcaaactcctgagctcaagtgatcctcccacctcagcctcccaaattgctgggattacaggcgtgagccaccgcacccagctgcctgcttttgaactttatgtaaagtgagtcatacagcatgtcccttttggggtctggcttccctcactcaacatgaagtgtgtgtcagtgtttgtcctttttccttgctgtatagtactctatctatgatcagcccacaccacagtctgtttatcccttcttctgttgatgacacttgggctgtttccagttggagactcataataaagctgctgggatgattctggaacaaggctattttgtgcacatccattttcagttctcttgattaaatgccaaggagtgagactgccaggtcctaggcatggtgtggatctagctttagtttttcctagactcgagttcttgaagcaacaacacatgattcatggggcgaatcaacatatggagatttatttatttatttatttattgagacagagttttgctctgtcgccgggctggagtacagtggtgcgatctcggctcactgcaacctcagcctcctgggttcaagcgattctcctgcctcagcctcccaagtagctgggactacaggtgcgcaccaccatgcctggctaatttttgtatttttagtagagacggggtttcaccatgttggccaggctggtatcgatctcctgacctcatgatctgcctgccttggccttccaaagtgctgggattacaggcatgagccaccatgcccggcctatttatttttcgagacagagtctcactctgtcacccaggctggagtgcagtggcgcgatctcagctcactgcaacctccacctcccaggttcaagcgattctcctgcctcggcctccagagtagctgggattacagacatctgccaccaggcccagctaatttttgtattttcagtagagatggggtttccccatgttgtgcaggctggtctcgaactcctgacctcaggtgattcactggcctcagcctcccaaagtgctaggattacaggcgtgcgccaccacgcctagctaatttttgtatttttagtagagacgggatttcaccatgttggctagactggtcttgaactcctgacctcaggtgatctgcccgcctcggccccccaaagtgttgggatgacaggcgtgagccaccacgcctggcctggaggtgtatttaaaaagcattgacccctgcctctgttaagtgaaacacttccatttccccttgcccttcacctccggagcccccaggcaggcaaggctgggggagttcttccaccccttctccaggcgccctgattcgctgactgtgtgccagtgaggggccagggttcttgggagcccaccgtcttagcaggagctggctgctgtgtgcccctattgggttgtgtctctactctctgtatctctgtctctttgtccctgtctctgatgcctagtctctgtgtttctttgttgctctaatctctccagcatcccctcttctctcccatgtctgtgttggagtctccccaagggtccagggtgggggttgggagtccccaaggcctgggatgacccctcttccctcctgcaccccgtatcagtacccagatggcgtcttctatgacctggacagctgcaagcattccagctaccctgattcagagggggctcctggtgagtgaccccagccctgtgcccttcctgccttggggcccatttcacagataggggagctgaggcccaggggaggtcatttcctagcacaacaggataaaggtggcccgggcctatagccctcctcccctttcctctcctacccatccgctcctccatgcaaatcctggggtcagagatttgcacagcctacaatggcctctctgtgctgggggcttcgactgcgaggaggcctccgtgagacatcccagcttctgactcagtgcccttcccccagactccctgtgggactggactgtggccccacctgtcccagccaccccctatgaagccttcgacccggcagcagccgcttttagccacccccaggctgcccagctctgctacgaaccccccacctacagccctgcagggaacctcgaactggcccccagcctggaggccccggggcctggcctccctgcataccccacggagaacttcgctagccaggtgagtggtaaggggacagttaaaatcaagcccaaaccaggtgtggtggtgcacgcctgtaatcccagctgcttgagaggctgaggtgggaggaggattgcttgagcccagaaggtcgaggcaatccactgcactccagtctgggcaacagagcaagaccctgtctcaaaaaaaaaaaaaaaaaagaaaaagaaaagaaaactcaagctcagtcatttggttgaggtttgctgggtgccgggcactgcattgagactgcacatagtaagccctgcagcggcctcccaggttacgttccgttgttgcccctctgaacaagtgagtcaagagaggtagtgacaggaagccagggacagggcagactcgcattacctgtgttgggccggctttgaggaggtacctcaggtgtcccctggccacagcgtggtgatctgaacaaaggccaaaatctaggctgtcaacaaagagggagaccagagccaggagggccaccgccttggcctgagaggaggaagtggagggagacaaggggtccctggacatgcaggtgaccctgaccttccgcagaccctggttcccccggcatatgccccgtaccccagccctgtgctatcagaggaggaagacttaccgttggacagccctgccctggaggtctcggacagcgagtcggatgaggccctcgtggctggccccgaggggaagggatccgaggcaggtatgcgggagtggctggggtgggggagatgccagctggagatggtgggggggctgagagcaccatggcttcctgggcctctacatatactccagcactctgggcagctcccagatccgcaccacctgctggctgtgtgaccttgggtaagtgcctctacctctctgtgcccaggtttcctgtctgtgcgatggggatggaggtgatagtgtctaccctcctgaggtcgttggggggactaaatgggatagtaagtgtaaatgggacagcagtgccaggcacagagtgagcacttcaataagtcaacctcttcaccatcattcccgacaccacagcaacagaaatgataatgctatcaacccccaacggttcaacccttgccccctgcccgtgtgcccaacatcctttatgctcaaccccaagaaagctgagatcgttccttcctttctgtgtctgggcctcggtttctcgtctgtaaagtgggcatcactgtcatcctccccatctcacggggttatgatggagattcaatgagctcataactgtaaagtgccttgcgaagcacctggcactacatgctccacggtgcattgtaaaaatcaacacacaggctgggtgtggtggctcacgcctgtaatcccagcactttgggaggctgaggcggtcagatcaactgaggtcaggagttcgagaccagcctggccaacatggcaaaaccccgtctctactaaaaacacaaaaattaggctgggcatggtggctcatgcctttaatcccagcactttgagaggctgaggaggatggatcacgaggtcaagagatcgagaccatcctggccaacatggtgaaacctcacatttactaaaaatacaaaaattagctaggcgtggtggtgtgcacctgtagtcccagctactcgggaggctgaggcagaagaatcgcttgaacccaggaggcagaggttgcagtaagccgagatcttgccactgcagtccagcctggcgacagagtaagactctgtcttaaaaaaaaagaaaaaagaaagaaaaaaaaattaatggggcatggtggtacatgcctgtaatcccagctactcaggaggctgaggcaggagagttgctggaacccaggaggcaaaggttgcagtgagctgagattgcaccactggactccagcctgggtgacagagcaagactccgtctcaaaaacaaacaaacaaaaccacagcctcatttaaaaaattttaattaattaattaatttattttttgagacagagtctcgctctgttacccaggctggagtgcagtggcacgatctcggcccactgcaacctccaccttctgggttcaagcaatcctcctgcctcagcctccgcagtagctgggatcacaggcacccacaccatacccagctattttttgtatttttagtagagatggggtttcaccatctggccaggctggtctcaaactcctgacctcaggtgatccgcccgtctcggcctcacaaagtgctgggattacaggcgtgagccactgtgcccagccacacagcctcatttgtggctgagagacttcagctcagagaggttaattaagtcacctattttaacttaggacatttaagatggagaggatctctccaatgactaggaaagacacaagatggaaataaagattttatttatttttattcatttatttgagacggtctccatctgtcacccaggctgaagcgcagtggcgcaatctcggctcactactgcctcaaactcctgggctcaatcgatcctcctgcctcagcctcctgagtagctaggaccacaggcgtacaccaccacacctgactaatttttaaaatttttgtagaggtgaggtctcgctatgttgcccaggctgaactcccaactcctgagcctatgtgctcctcccacctcagcctcccaaagtgctgaagttacaggcatgagccaccacacccagccagaaataaattattttatggcttataggtcctggggcatacatggcacgcctggaggccacacacaccaggtcagggagcgcaggcagggagggagagagagagggaccagtggactgacgcctttattgggtccaaggcgtcggccaaacaggtttcctgagggggttttaattggtgggttcaggccaggcacagtggctcatgcctataatcccagcactttgggaggctgaggctggtagatcacctaacgtcaggagttcaagaccagcctagccaacatggtgaaaccccgtctctactaaaaatacaaaaattagctgggcctggtggtgcacgcctgtaatcccagctacttgggaggctgaggcaggagaatcgcttgaatccaggaggcagagtttgcagtgagctgagatcatgccactgcactccagcctgggcaacagagcaagactccagctcaaaataaataaataaataaatacttggtgggttgaaagcaagcaggatcaagttccaggaggtcacgctgtgcctgagagggggtcactgaggcatctgcacagtccatgcagggccgtcaagtaggctgtccatggctctcccacagggaggtggtcaccaggagtcagttgcataagagagatatctgggtcagccacactgaggaactcggggagggagatgtagaactgccaaggaggacagccctgcttccagcatgagaatgtccaacttttatttagttttattttattttattttgagagggagtttcgctcttgttgcccaggctgagtgcaatgatatgatttcagctcactgcaacctctgcctcctgggctaaagtgattctcctgcctcagcctcccaagtagctgggattacaggcatgagccaagcacacccagctaatttttgtatttttagtagaaaccgggtttcatcatgttggccaggcttgtctcgaactcctgacctcaagtgatctgcccaccttggcctcccaaagtgctgggatcacaggcatggcccaccgcgcccagcctccaacttatactttcgatgaatgccgaggcagcctaaaattataagaattcaatccgggtgcagtggctcacacctgtaatcccagcattttgggaggccgaggtgggaggatcacctgaggccaggagttcaagaccagcctgggcaacatagtaagacaccatctctacaaaaaataaaacaattagctaggcatgatggtgcatacttgtagtcccagctactggggaggctggggcaggaggattgcttaggcccaggaggtcgaggctgcagtgagctgtgattgctcctctgcactccatcctgggtgacagaacgagaccctgccttgaaaaaaaagaaattaagatgtcactacgtcaccaccccaaggtcacactgctgtaaaatggcagagatgggattcttgtagccagtgccctgctttgaaactcccagttattggccgggcgcagtggctcatgcctgtaatcccagcactttgggaggtcgaggtgggcggatcacctgaggccaggagttcgagaccagcctggccaacatggcgaaaccccgtctctactaaaaatataaaaataagccgggcatggtggcagacgtctgtagtcccaggtactcgggaggctgaggcaggagaattgctcgaacccaggaggcagaggctgcagtaagccgagattgcgccattgcactccagcctgggccgcagagcaagaccccgtctcaaaaacaaactaaaccctaggagcccaggagtcaggtgccctggcctctcccgggaccctgtcccgctttgggctgagaggctgggagaccaggagctggagagatagccaggccaatgcaactgcctccagatctgttcgcctctccgttataatcctttaagcggcgctgtcaacccatttcacagattctttcatccactagctcaacaaatatggaatattacgtgctggccgcagggcggaaggcaggacagatgtaaatctcgaaaattaaagcacagaacgcggagggggcctggggctgacagcttcgggcagggggagtggcttgcccccccccccccccgtggtgaggggcgcagagccaggtgtatgtaacagccacttccctcaccccacttttcagatccaggagatggaggccggggtggaagtctcggaggagggtggatggggaaggcggggccttagggacccctcacctaacgcgtgcccc

SEQ ID NO: 928 - DNA, 3452 bp, Homo sapiens
agtcaggggtcacggcggcgtaggctgtggcgggaaacgctgtttgaagcgggatggatggcaagcggcggccaggcccagggcccggggtgcccccaaagcgggcccgtgggggcctctgggatgatgatgatgcacctcggccatcccaattcgaggaggacctggcactgatggaggagatggaggcagaacacaggctgcaggagcaggaggaggaggagctgcagtcagtcctggagggggttgcagacgggcaggtcccaccatcagccatagatcctcgctggcttcggcccacaccaccagcgctggacccccagacagagcccctcatcttccaacagttggagattgaccattatgtgggcccagcgcagcctgtgcctggggggcccccaccatcccgcggctccgtgcctgtgctccgcgccttcggggtcaccgatgaggggttctctgtctgctgccacatccacggcttcgctccctacttctacaccccagcgccccctggtttcgggcccgagcacatgggtgacctgcaacgggagctgaacttggccatcagccgggacagtcgcggggggagggagctgactgggccggccgtgctggctgtggaactgtgctcccgagagagcatgtttgggtaccacgggcacggcccctccccgttcctgcgcatcaccgtggcgctgccgcgcctcgtggccccggcccgccgtctcctggaacagggcatccgtgtggcaggcctgggcacgcccagcttcgcgccctacgaggccaacgtcgactttgagatccggttcatggtggacacggacatcgtcggctgcaactggctggagctcccagctgggaaatacgccctgaggctgaaggagaaggctacgcagtgccagctggaggcggacgtgctgtggtctgacgtggtcagtcacccaccggaagggccatggcagcgcattgcgcccttgcgcgtgctcagcttcgatatcgagtgcgccggccgcaaaggcatcttccctgagcctgagcgggaccctgtcatccagatctgctcgctgggcctgcgctggggggagccggagcccttcctacgcctggcgctcaccctgcggccctgtgcccccatcctgggtgccaaggtgcagagctacgagaaggaggaggacctgctgcaggcctggtccaccttcatccgtatcatggaccccgacgtgatcaccggttacaacatccagaacttcgaccttccgtacctcatctctcgggcccagaccctcaaggtacaaacattccctttcctgggccgtgtggccggcctttgctccaacatccgggactcttcattccagtccaagcagacgggccggcgggacaccaaggttgtcagcatggtgggccgcgtgcagatggacatgctgcaggtgctgctgcgggagtacaagctccgctcctacacgctcaatgccgtgagcttccacttcctgggcgagcagaaggaggacgtgcagcacagcatcatcaccgacctgcagaatgggaacgaccagacccgccgccgcctggctgtgtactgcctgaaggatgcctacctgccactgcggctgctggagcggctcatggtgctggtgaacgccgtggagatggcgagggtcactggcgtgcccctcagctacctgctcagtcgtggccagcaggtcaaggtcgtatcccagctgttgcggcaggccatgcacgaggggctgctgatgcccgtggtgaagtcagagggcggcgaggactacacgggagccactgtcatcgagcccctcaaagggtactacgacgtccccatcgccaccctggacttctcctcgctgtacccgtccatcatgatggcccacaacctgtgttacaccacgctccttcggcccgggactgcacagaaactgggcctgactgaggatcagttcatcaggacccccaccggggacgagtttgtgaagacctcagtgcggaaggggctgctgccccagatcctggagaacctgctcagtgcccggaagagggccaaggccgagctggccaaggagacagaccccctccggcgccaggtcctggatggacggcagctggcgctgaaggtgagcgccaactccgtatacggcttcactggcgcccaggtgggcaagttgccgtgcctggagatctcacagagcgtcacggggttcggacgtcagatgatcgagaaaaccaagcagctggtggagtctaagtacacagtggagaatggctacagcaccagtgccaaggtggtgtatggtgacactgactccgtcatgtgccgattcggcgtgtcctcggtggctgaggcgatggccctggggcgggaggccgcggactgggtgtcaggtcacttcccgtcgcccatccggctggagtttgagaaggtctacttcccatacctgcttatcagcaagaagcgctacgcgggcctgctcttctcctcccggcccgacgcccacgaccgcatggactgcaagggcctggaggccgtgcgcagggacaactgccccctcgtggccaacctggtcactgcctcactgcgccgcctgctcatcgaccgagaccctgagggcgcggtggctcacgcacaggacgtcatctcggacctgctgtgcaaccgcatcgatatctcccagctggtcatcaccaaggagctgacccgcgcggcctccgactatgccggcaagcaggcccacgtggagctggccgagaggatgaggaagcgggaccccgggagtgcgcccagcctgggcgaccgcgtcccctacgtgatcatcagtgccgccaagggtgtggccgcctacatgaagtcggaggacccgctgttcgtgctggagcacagcctgcccattgacacgcagtactacctggagcagcagctggccaagcccctcctgcgcatcttcgagcccatcctgggcgagggccgtgccgaggctgtgctactgcggggggaccacacgcgctgcaagacggtgctcacgggcaaggtgggcggcctcctggccttcgccaaacgccgcaactgctgcattggctgccgcacagtgctcagccaccagggagccgtgtgtgagttctgccagccccgggagtctgagctgtatcagaaggaggtatcccatctgaatgccctggaggagcgcttctcgcgcctctggacgcagtgccagcgctgccagggcagcctgcacgaggacgtcatctgcaccagccgggactgccccatcttctacatgcgcaagaaggtgcggaaggacctggaagaccaggagcagctcctgcggcgcttcggaccccctggacctgaggcctggtgaccttgcaagcatcccatggggcgggggcgggaccagggagaattaataaagttctggacttttgctatatggtgc

SEQ ID NO: 929 - protein, 1101 aa, Homo sapiens
MDGKRRPGPGPGVPPKRRGLWDDDDAPRPSQFEEDLALMEEMEAEHRLQEQEEEELQSVLEGVADGQVPPSAIDPRWLRPTPPALDPQTEPLIFQQLEIDHYVGPAQPVPGGPPPSRGSVPVLRAFGVTDEGFSVCCHIHGFAPYFYTPAPPGFGPEHMGDLQRELNLAISRDSRGGRELTGPAVLAVELCSRESMFGYHGHGPSPFLRITVPRLVAPARRLLEQGIRVAGLGTPSFAPYEANVDFEIRFMVDTDIVGCNWLELPAGKYALRLKEKATQCQLEADVLWSDVVSHPPEGPWQRIAPLRVLSFDIECAGRKGIFPEPERDPVIQICSLGLRWGEPEPFLRLALTLRPCAPILGAKVQSYEKEEDLLQAWSTFIRIMDPDVITGYNIQNFDLPYLISRAQTLKVQTFPFLGRVAGLCSNIRDSSFQSKQTGRRDTKVVSMVGRVQMDMLQVLLREYKLRSYTLNAVSFHFLGEQKEDVQHSIITDLQNGNDQTRRRLAVYCLKDAYLPLRLLERLMVLVNAVEMARVTGVPLSYLLSRGQQVKVVSQLLRQAMHEGLLMPVVKSEGGEDYTGATVIEPLKGYYDVPIATLDFSSLYPSIMMAHNLCYTTLLRPGTAQKLGLTEDQFIRTPTGDEFVKTSVRKGLLPQINLLSARKRAKAELAKETDPLRRQVLDGRQLALKVSANSVYGFTGAQVGKLPCLEISQSVTGFGRQMIEKTKQLVESKYTVENGYSTSAKVVYGDTDSVMCRFGVSSVAEAMALGREAADWVSGHFPSPIRLEFEKVYFPYLLISKKRYAGLLFSSRPDAHDRMDCKGLEAVRRDNCPLVANLVTASLRRLLIDRDPEGAVAHAQDVISDLLCNRIDISQLVITKELTRAASDYAGKQAHVELAERMRKRDPGSAPSLGDRVPYVIISAAKGVAAYMKSEDPLFVLEHSLPIDTQYYLEQQLAKPLLRIFEPILGEGRAEAVLLRGDHTRCKTVLTGKVGGLLAFAKRRNCCIGCRTVLSHQGAVCEFCQPRESELYQKEVSHLNALEERFSRLWTQCQRCQGSLHEDVICTSRDCPIFYMRKKVRKDLEDQEQLLRRFGPPGPEAW

SEQ ID NO: 930 - DNA, 42170 bp, Mus musculus
  misc_feature (1)...(42170): n = A,T,C or G
cctggcccatgctgagcttgggaatcacagacgctcagagtgtgagcgttaccccacaatgtggccagcctcctcctcggcgggggatgccttcctacccatgggccatagatatcagcctgatccccagattatttcagtgtccggatatgaccaatcggccactgtgacacactgagtcagctccgtagtgtcctacacggggtccagcacccttctgtttgcagacttctaactccctcacttctctcctcaggacaagtgggttctgaagcacgaggacctggtgctgggagagcagatcggaagggtaagtgcagcccacggcccagggactcgccagccttctgggctctacctgtgactttcctcaccagcttcgtccaggcccctcaccccgtcccacctcgggttccacctccagagtcctagagggtctccctgacccaatgagatcccagctcataccccctgattcctttctcggaaaatagcgactaccaacccctaggctggcatcttgctctagctccagccctgctctggggtgtcttgccaagctcctctgttaatgtaaaatgccagccactttccaatcagaatgctttcccaacccaaagaaaagtgatttctggatttcccatgtcacttcttagaggaggtggcacaggtaacttttatatctctacaagggggagtcttcatagagagccagggtgacaaatcagcatggacaattggggacaagatggcctgtcctcttgaggtgagaaagggcagcagtaccaggaagttgtggtaggaatccaggactattgcaggggaacttcggagaggtgtttagtggccgccttcgtgcagacaataccccggtggctgtgaagtcttgccgagagacactcccacctgacctcaaggccaagtttctgcaagaagcaaggtgggtcatcaaatgagtgaggctcgaggtcccttgtgtgagaggtgtcctctgtgtactgcctggcatttagttctcccagtcgtctcatacccgagtaatacccataatgcaaagaggtactagccagggcccccacctgcagtcacgtgtccaaggctgcaggcattcgcggccactcttctttcccttagctttctgtcttctctgaggctccttttcagaggggggtggagggcagatgtagaaggctgtgagcacagattgcatgtagcctaagcagcagtgctccccaggatcctgaaacagtacaaccaccccaacattgtgcgtctcatcggggtctgcacacagaaacagccgatctacatcgtcatggagctcgttcaaggtgagcagaggtgctggtctccaaggtgagggctcagcttgcctggtgtcgcccacgaggctcaaggctgctctcacctctagggggcgactttctcaccttcctgcggacagagggagcccgcctgcgggtgaagactctgctgcagatggtaggggacgcagctgctggcatggaatacttggaaagcaagtgttgtatccacaggtgagtgggaggcaggccctgatgcaggctttgggagaccccatcacggtggctccccctgggctggtttttagtgctttgtgtgtgagagtcccaccgtgtttctgtacatatgcacatacgtgtccatctgtgtggaagccagaggtcagttaggtgtctttttgttgttgtttttgtttgtttgtttgttttttgttttgttttagatttatttattttatgtacttgagtacactgtagtgtcttcagacacaccagaagagggcatcagatcctgttacagatggttgtgagccaccttgtggttgctgcgaattgaactcaggatctttggaagagcagtcagtgaaccatctctccagcccaatgttaggtgtcttgatctttatcgctttaattttggaagcagtctctcactaaaccttggtgaagctggctggccagcgaatccttcaatgccccagtgctggggtaacagatgagcattgccaattttttctgtgagagctagggatctgaacttaggtcctcatgtctgctagcagacactttacaaactgcaacacctcctaagccctaaagaacagctatattgttggttgtctagagtgcttgacccagctgggcaagcaacactggttgaagaccaacttctgccctgcttcacccagggacctggctgctcggaactgcctggtgacagagaagaatgtcctgaagatcagcgactttgggatgtcccgcgaagaagctgatgggatctatgccgcctcagcgggcctcagacaagtccctgttaagtggactgcccctgaggcccttaactacggtaccagattctcacccattctgggcggcaaagctgatgactgagcatgggtggcctctgggcccttggatgtggacagtctccctatgtatactgccttgcttcctctgcaggacgctactcctcagagagtgatgtgtggagctttggcattttgctgtgggagaccttcagcctgggggcctcaccctatcccaacctcaccaatcagcagacacgggagtttgtagaaaagggtaaggccacagatttatgatggtacctcaggaccaagctcctaagatgttcccaccaaactctttcttctcaaagcctactggggcaaaataagaaaagtctgtagctaccacaggcgacaagcctgtctacacatggtgggttagagattagagcctaggcctctgtttttttgggttcttagtagacaagagtggttcttttttttaaaagatgtatttattattatatctaagtacactgtagttgtcttcaggtgcaccagaagagggcgtcagatctcattatggatggttgtgagccaccgtgtggttgctaggatttaactcaggacctttggaagagcagtcggtgctcttaaccactgagccatctctccagcccccaagagtggttccttaagggcagtgaatcagaaggaatctgatcccttctcatacttggcacattgcacctgtcctcctagggcatcgtctgccttgcccagagctgtgccctgatgcggtcttcaggctcatggagcagtgctgggcctatgagcctgggcagagacctagtttcagcatcatctgccaggagctccacagtatccgcaagcggcatcggtgagacccggaggcaagagtgtacctcctcagcagttcccactcactgctggacagctccaagaccagggttccaaccaccagcaacagggcttcgggcagggtgcgactctccatccttcttcctgcccaaattcctctcttaggcagaaaaataaaacaagttgtgttcatcgggtgatattgacatgtgtgctcctctggaggccaaggggccagttcttaggagaaggtggacatccggtagagctgacatgatttggtttaatatggacaggagccaggaagtgcaaggtgctatacaagctttggccagatggtggcgcagttccctagaacagaatcacagcgcaaagctgctcaggtaaattgtaaagatgttgccttcccggaacctgtggagataaaaagtaggttgatgtacaggctggcaactgagatgtaaaagtcatgggtctgtgaaaaatagagaatagtcacacagtcacagaaagttcaggggatgagcacacaggtaaagtaaggcttccccacaaagaagacattcaaggtgagaactcaagataaatgtgagcaaggctgagggctaacccaggactttcgaggtcccacaagtcctgcggaaacccctgtcatctgaaacagtctttggaaacaggcaatgtcaggaacatagcagcatggcgctaacacaccaacaaacacaccacaaacactgggagtggcttataagacaaattaatgaggaccacaaaataccctgtaaccatacacacacccccacctcccccctaccccaccagactcagacaccacacacacacacacacacacacacacacacacacacacacacacacacaggctcatacacggacacatgcatgcatattcttggtcaggcaaagtggttcatgactgtgtggtttataaaagcctttacagagagaggctgggcatgcagcctggttgatgggttgcttgctgaggttctgtttcattatcaggatcacatacaaattcctagtacttgggaggtaggggtgagggagttctctgtgagttcaagtgcagcctctgctacataaagaatgtggggtcaggctgggtaacaggagactgtctcagatgatgatgatgatgatgatgatggtgatggtgatgatgatgatgataggctctaggggtcaggaaacacaggagagccactgctaagggacaaggcaatcggatgcctttaatcccagcacttagaaggcagaggcaggtagctctccgtgagttcaaggccagactgctctacaagagagttccaggacagccagggtagaccaggctggctttgaactcatagggatgagcctgcctctacttcctgagtactgggattaaaggtttgcatcactactctgggctgagacccactcttaccaagagtgagaaagacctgagtggacatgttggaagcgcgcctcactggacaggcagaggagggtgccgctctgactgaggaggaagaaaagccgctcagttgctgagcaaccggcccccatcctccaagccactcgaggctgcaaacatgacatggatataaaggagaaaactacagagaaatccagggcttgtagcagagtcctcacaaatgcgattaaacagctcaatgagatgacttcttgccatctggtcccaggagggaggctaccggttcagaccactgtgagccagcctagaatcacgatggccgcctcaggtgctcaggtgatgaaatggtcactccccccccacacacacacacacacactgcacattttatctacttcctgggctggggagggaaagggatttcttcatgccttcttagggataatttcggggaacccatttagttattaggcaatacatctcgtagggttgcacccatggcaaaagtcaagaggccttttgtaaaagtcaaaagcgtgtgtgcatatggtggcttcagaggagatccagcagaaaagccaccccaggggacccagctgttctaccaagagatcattaaagtgaaatgtgaccctacctaaaaaggcagggtttcagttctcattgggagtgaaagatagagatctgggccactgttgacagttcctttgggcagacaggtgggccacccagcagccatgccctctcagctgtggtgtgttctaagagacaaggaactgcctgacatcacactgtcaccacatccttcgctctccatagacaaggggcaaggttagaggcctaggtctctggagtgactcccggggagggggccaacctttacttcccaggcctagccaagtggctgatatcagagaaggaagaggagggcctttatgcaagagctaatagaaacgggagagctgatactatcgccttttatcagccctgagtggccagtaaaagaaatgactcatggcctatgacacacaccagtggttacgaaccacagaattcttggaacagactggtatgcaaggacatcctgagagcctttcttgggcatgtcactgcattgagacgaagaacatcagtttgcccgcatgaccgtaacaagatgtcctcaatactactgctccctgagtcccctgatattggccccaggggacagggtaacacagagaagcctgggatcctgtgatggctgatcctcactgtcactttgattggatggtgggtcacctgagagactggtgaggctcacctgaggtatatggatgagagtgttcctgggagaagtggctgagggaggacctaccctgaccgagggggaccactatcccacagactagggttccagaccctaaaacaggacaagaaaaaagccaacccaggtacagtggctcatgtctgtaattccagccactgggaggtggaggcaggaggatcaggaattcacatgacaggaaaccctgtctgagagagagagagagagagagagagagagagagagagagagagagagagagagagagagagagagagagagagagagagagagagagagagagagagagagagagagagagagaggttaagcccagcaagacactgtctcagaattaccaaaccccaaacaaaacacctctagcaaactatctgaaagaggcattggagagcatgcatctacttcacaagcttattctacggccgtggctctcaaccttcccactgctgcgaccctttagtgcagctcctcatgttgtggtgaccccaaccataaaattatctcattgctgctttataactgccattctgctactcttatgaattataatacaaatatctgatatgcaggagatctgataggcagcctcataggggccaggcccacaggctgacaactgctgccctacagttacccatctataagcagggccccaacaaaaaagtgcccctttgggccagcaaagtggatcagtgagggaaggtgtgttccacgaagcctggtgacctgagttggatccctgggacacacacggtggaaggacagctgtaagctgttcctctggcctctgctggtgctccaccctgaaacacacacaggggtgggtggatttctatgactttaaggctcgtctgatctgcatagagagtttcaggccagccaaagtctcaaaccccagaaaatttaaaagtggaaaccaaagctagagagatagctcagctttctaagggctctaagggctctgccactcttacagagggcccgcgtggccgctcatttgagatacttgggacattgaggctcctgggaacctggacctggttggaggactgatcaagcaaaccaaacagcaggcggagtgcagcaagcaactgtggctggaagccagggcttggatattttgcatagaaaagggaacttcaggcaacaggcaaagagggggctttgcggcttggcttggcaagcatcaatcggaaaagcacctgctacccttttactgacttatgaggagacgccggtaggctggcagcctggtgctggtgccacgagtctcaccttgtgtaggaagaaccccgtggcctgtaagtggagcacgggtccgacaaggctaaggaaccttcccatcaaaagcgtgcgtggaagccaatggccaacagcagctgggcagaactaatagtgctctgcaaaaaccgaagctactgtcacctgggatgtggcaggccacccgggactgacacgagaaaactcaagaccacaactgatacaaggccaaagacactcagccaatatttctggacactaactggacagccaagtggccgagagattcccaggagatatggtgtaggcacttaaacccagatagttccggtggatagaccaccttgagggtagactgattttttttctgtgtctgacacagctgtctgcatatgcacagaaaacggaagctctgttaagcatttgttttgttttgttgagatagttttgctgcagagccctaactggcctgaaactaattatgtagactaaactggctttaaacgtgcagataagagggaacatggtggcctatacttttaatcccagtgcagaggcaggcagatctctaagtagagtacaaggcctgcctagactatagagagagtgctaggctggtcagggctatgcagaaagacccctgtttcaagacaaaacataaaagcaaaacaccaccaccagtatctaggaagagtagaccatcctctgcctaaatatgggtctgaaaattgttcttagctggatccacaagaagctggattgcagggggatagcactattgaaatcagctatgacagagtacttgttattgctgtatggtgaggctggaccacaagtgtactatgattctctcccaggccagaggaggccagcagactggagaaagacccacccctcatccccattttgtaaaagactacaccttactgcctttttatatcccccttttttaaaaaaattaagtttttatttatttatatgaatacactttagctgtcttcatgcacactagaaaagggtcttggattccattacagatggttgtgagccaccgtgtggttgctgggaattgaactggggacctctggaagaacagccagtgctctaaccactgagccacctgtccagctcccccacccctttttcctgtttccgtagcatgtaggctctcttccttcttggaggccactgtagttacaaactgcttgattccttctctctctctctctctctctctctctctctctctctctctctgtgtgtgtgtgtgtgtgtgtggtgtgtgtgtgtttgcagtcactgtggcacatatgtaggagatcagaggagtctttccttccaccacgtggactctgaagatcacactcaggtcatcaggcttggtggcatctttacccactgagccacctcactggcttctgggttgctattatttttattttgagacagggtctcaccatgctgcccaggctggcctgggactcaccaagatctgccttatctctgtttcttgactgctgaggacctgggttctgggatgtttttataaggacaggataatctgctttctaagggctctgccttcatgagctaatcttaatcttatcaaagccccacctcccgatatggtcaaatctggggacagaacttcaagatgtgaacctggggttaggggtagtctacaacagagagtaatatttgttttgctacgtagtccaggctagtgtccgtttgctgggatcctctagcctcaacttcccaagagctggacttttagtgggccagctcagtttcaggcagtaattttagcaatctttttttcttttgaaacaggattgcaaatgtgtagtccaagatagcttcgaatttgtgtcaatctgagacaggaggatttataggtgtgtgccactacgatctagcaagcaatccccccccccccccccaagtagctatggctgtcccggaactcaaaatgtaaaacagactggcctcgaattcagagatctccctgcctctgccttccaggtgctgggactaagcacgggctcctacatccagccaaatattaatcttaaaaggaagaaaagtgtggaatttgtggagatgttcattgcagtatggtatcttacgctgtaaattggaaacatggatgctcaataaacctttaaccggatgatatgcatttcgcccttagtgtcaggaaacccagagccacccggaactcacaaaacctagagggaggcactattcctttgactaagaaacatcactattgagccaggcagggaggccacgaagcaccgcacggttttgccctttctgctcctgcctaaatcttactcttggaagaccaagagaaaaaacaaaaacaaaaacaaaaaaaacaaaaacacaacaagaaacagtggcgcggccttgctggggttccgccactcccgccctgccgggtcaacggctgcgcacagccgccccgcagccatagcggaccccggcaccgacccagcgggaggcgaccgagtcgggtgccagggggcgctgcggaacccggcggggggcgaggcagcggcgggacccggcactaggggacgctgcgcgcggtcccccgcgcccctcctcctgccgggcgcaccgctcggccccgtggaggcgggagcgcgggagcacaggcgcggggcgagcgcagggagcgcgcagcggccctggcccccgcgggagcgcggctgcggggccgagcaggggcggtgggtggcccgtccctcttagcctgcgcaactgcccgcgcgcgggccgcggtcccccgggatgcgagcagtggcggctcggccggccgggtcccgagcggcgcggaggccggccgcgtacggtaacgggccaggcggggcgtgggcgaggactccagcctgcaggccgcgagcgttgcggcccccgggtgccggttgagccccgagggccggaggggggctgggcgggccggaggaggggggttacatctcggcaggtaattgccccacggtgacccagctcctgctccctagctccgccctctttggcccggacccaatctccagggactaaaaatattgcccggaggctcctgagcggaatcagatcgcattaagtaggacgcaggctgaggtgactgagcttttcagcaccagggcccgaagagcagactccagagagcggtcccgcccacgcgcgttcagcagctagcgtcctccctcctccggcaggcaagtggggactcgcgggcggtggcggcaggcactgtgggtcgtctcgagttgccccgtttcggagccgctgtgcctggcttccgctaccctggggactttatcagtctcgccgctagcttcctaagagtccctttaaagcactctggaagccaggactggaagttttgcacagcaggaatcagtactgatggggacaatcctagaactgggttgcgttagaaacatgggcatttctttttctcttaaaagaaatccattctgtattctctgagataggatctgggccaggcactgtttctgctgagttccagtcagccccagaaggtcacaggggaggcagggtgtgagtgtgtgtgtgtgtggggggggggttgtctgtctctccagctggtgattgtacccctaagtcaaacaaaataaaacctcttgtatttatgtatacatctgaagggaggaaacacgtggcttgggagagccttctcagagtcctgagcaagctgtttgcaatcagtggttgtgtaatgaagtgtgggtcagagttggggctctgttatccctgtttgtttgtttgtaatgtgttacatttatttatgtgcatgtacgtcacagaaaacatgcggcaatcagaggacaatttgtggtagttggttttcaccttccaccatatgaatcaaatgaatcgctttggttgtcaggcttgcctgcaagtgcctctttacctactgcacccccacactccacatcctggtttctatagcttgggctgaggggaatcagaactcctctcctacaggaccagccccaaatatatgtgctacttgtgtgttgggagtcataaccaagatttggtacttgaaagcttacttgcttttttacccagagtcaagcaagtaggttggttctccttgggaatccacagagcgtttgttaggaacaccaacagaagggttttgcatgccagaactacaggtggtgtctctcctgccaggaacgtgcctcctgggtcagtatgaagctgaaaaagcaggtgacggtgtgtggggctgctatcttctgtgtggccgtcttttctctgtaccttatgctggaccgagtgcagcatgatcctgccagacaccagaatggtgggaacttccccagggtgagtcacaccttgttctcttcttcaaatgcaagtcacctgggctcaggagagtcttgtcagcacaggacaagagcacccccccacccccattgtcttagagattggacctagagcctcctcatgggcatgcgtgcatataacactaacgatctacaactgagttatgtagctgtagcccagggacattcctaggcagatttgtctttcttgtggagatggatgcccaaggactggcgcatgctaaacacatgctctaccacggagctatgctcctggctgtaacaggaagtgaaaagcagcaatgctgaaggaggagggagaggaggaggaggagaaggaggaagaggaggaggagaagggggaggaggggaacaagaaatttgccttgtgtaataatagcctgacttaagtttctggcagacactgctgattgaccaccgtattgcttttccattaagctgaacgcagtcctcctcagcaccgtgcttgagacaggaggaacatgtaggtcgctgagcacgggcatgtgagaggaaatgtttgccttccgtggtctgagtgatgatgcctttctgttcttgtttttttttttttttttttttttttttttttttttttttttttttttgcagagccaaatctctgtgctacagaaccggatagaacagctggaacaactgctggaggaaaaccatgacatcataagccgtatcaaggactctgtactggaactgacagccaatgcggagggcccgccagccctgctgccctaccataccgccaacggttcctgggctgtgctcccggagccccggcccagcttcttctccgtctccccccaggactgccagtttgctttggggggacggggtcagaagccagaactacaggtaagagttggagctggcagggaccctctcccactcagacaggcactgagctgcattcctccccggcagatgttaaccgtgtctgaggatttgccgtttgacaatgtggagggtggcgtgtggaggcaaggctttgacatctcctacagcccaaatgactgggacactgaagacctgcaagtgtttgtggtgcctcactcccacaacgatccaggtgaagggccagtaggcccggccgcggcagggtgtggggcgggctttcagatggcaggcatgaggagggtgtgactgaagtatgtggcatattgaggggaccttgtgttggctcccccaggctggatcaagacttttgacaagtactacacggaacagacccagcacatcctcaacagcatggtgtccaagctgcaggaagacccccggcggcgctttctctgggcagaagtctccttcttcgccaagtggtgggacaacatcagtgcccaaaagagggcagcagttcgaaggtcagtggtggttgggaaggtgtgggaaggtcggtcattatctaggactcagatgggtaggttgggcttgtctcattgtgtggctgccaagctggcagggagattgagctgtggcaggagtggggaactgaaggtctgttagtgtgcagagaaatcggaatgcttggggcatgagggagaagcgtgggacctctgcctctgagcacagaagggggtcctgaaataaccaaccaagacagggccttgcgggctgcagggaaaggaggctgagtgagcacgctgttcacgtgggtgaattggttggtggaggccactgcgtgcagtccctgccatcctctggctgccaatggaaaggtccccgtcccatcccaagtgtgcttcatccttaggctggtgggaaatgggcagctggagattgcgacaggcggatgggtgatgcccgacgaggccaactcccattactttgccttggttgaccagctcatcgaggggcaccagtggctggagagaaacctgggtaagtgcaggcacaggagctcgactctgccccagagctggtgtggggcaagatgctgtgaggtccaggggttggcagggagttagttgttcctttctaggctcatgcagcctatctggtgggtgaggcaggagctggcctcccaggcaccaagtggccaggggcccgtccccaaggtagtcagggcctttgacttctgtgctgtgccttaggtgcaaccccgcgctcgggctgggcagtggacccctttggacacagctccaccatgccttacctgctgcgccgtgccaacctgaccagcatgctgattcagagggtgcattatgccatcaagaagcactttgctgccactcatagcctggagttcatgtggaggcagatgtggggtaaggccaagtaggggcacgcatgggtactgtagcagtggagtcatgttgacctctgctggcttctgtgggcacatctcccacaggagctgtgggcctgggagccccatgtcctaattcccagcctacatacatgcaacctcagcgtctctcagggctgcctgtgggtggcatgaacctgcacacctctgacgtccctgtgcccagctcctcaggctgtctgccgtggctgaccctgcggtatgtcttctgtagattcagactccagcacagacatcttttgccacatgatgcccttctacagctacgacgttccacacacctgtggccccgatcccaagatctgctgccagtttgatttcaaacgtctgccgggtgggagaatcaattgcccttggaaggtgccaccccgggctattacagaagccaatgtggcagacaggtatctgctgtcagccctgcttggaccaggtgctgggttttgggtttgggattttgagcttgtgtatggtctcgctatgtagccccagcaggctccaactccatcctcttgccccagtctctggggtccacaggactttgctgccacacccagctggtgttgacattttactccaaagaggagttagactgaaacctggtttctggtcttggttgtgccacatgggactgcatggtgctgaccatacctggaaaaagggtagactttgggggtgagtttaggccagagtctacagcagtgactccttagctcttccatgggaatgggaatggcagagtggcactaagcaaacacctttcccagaatgctcttactttcctccatgaggttgtccttatagacttgggaagcaaccctagcccctgctgggctgtttgcttgtttgttttgttttcatttttgttttttgcttctgtttttgagataggctctcttgtattccgagctggctggtctcaaacctgcctccagttcctgagtgctagggtcataagcatgcctataaccagttatgcccagttatgcccaaaccagagctctgcttgtgaggcctgggcaagcaccttaccactgagctacatccccagccctaaacaattctttttcatcttcctgagacagagtcttactgtgtagccctgactgacctgtagactaggctggcctcagactcaagaggcctgcctgcctctgctttccaagtgctgaggctgcaggcctgtgttgctgtgctgggcacccaccctaaacagttctcactaaacagttcttacactgggaccctttcttgcaaactcccagctgtcgtccttcagtggactcaggttctcagggtcagctctaggccaggcaatgggccaaagcttgttcagatctgccagagagcctctaccctgagaaaaaaggcctgtccctttggagagactagtaagggacttcaaagatgttactgtgactaaaattagactcctataaaagcgctggtttagggtgatctaaatgtgagggtgtaatatgtagcagcagtccaagcattgaaggcaacttttctggggtttttttgtttggctggttttttgttttgttttgttttgttttgtttttttgttttttgtttttgtttttgtttttcgagacaaggtttctctgtgtagccctggctgtcctgacactcactttgtagaccaggctggcctcgaactcagaaatccacctgcctctgcctcccgagtactgggattaaagtcgtgcgccaccacgcccggcttgtttgtttgttttgtttttgtcttttttgtttttgaagacaaggtcttgtcatacatctctggcttgcctggtactgactgtgtctcaggctgacccctaacttgcaacaatcctcctgcctcagcctgtaagtgttgggattctaaaattcttaaaaaaaaaaaaaagcttccaatgactcgctataaggttctgttgggtagatagtatagattttttttaaagatttatttatttattatatgtaagtacactgtagctgtcttcaggcactccagaagaaggcatcagatttttgttacggatggttgtgagccaccatgtggtttctgggatttgaactcggaaccttcagaagagcagtcggctctcttaaccactgagccatctcgccagcccccgatagtatagatttaaaaaatgttctcatacagttcaagttaggtgccattttatgtgtgtgtgtgttgggggtggagctctagatagagtctcactagctgaagctctccttgaacttgctgtgtaaatgaagatgggtttgaactactgatctctaccaaagtgctgggtgtataggcacatgctcccacacccagtaggccttttccatgtacacctggctggcctcaaacatggagtcctctggcctcaacttcccgccaactgggattacaagcatgcacctctgtgcctagctcttcacagggtctcctctcctttcctttcccttttccttttccttttcctttttcttttcgagacagggtttctctgtatagccctggctgtcctgacactcactttgtagaccaggctggcctcgaactcagaaatccacctgcctctgcctcccaagtgctgggattaaaggcgtgcgccaccactgccgggcttccttttcttctcttgagacaggatttcattatgtcaccctagctggcctgaactttgctatatagatcaggccggtctcaaactcacctgcctcccaagggccggagttaaacgcaagcaagcgccaccaggcatagtttgcatgtgtgcgaacccacatttgcgggcgtgtatgcgggtccgtgaatgtatatggcgacccaaggttaacatcagaaattttccttggtgtcttcccaccttattcattgaaaaagttcctcagttgaagccagtgctcatctctagtattggctagtgtaagcatgcagcttgctctgggatcctgtctccaccctctaggtgctgagactacagtcctgccaccatgcacgttggcatttatttatatgttggaggggagggtgcctaaactccagtcaccacgcttgtgtggcaagtacttgatccactgagccatccccgtagctccctcactggtcttttaagcctggggcttcatgttggacctgtgaccatctccatttccagggcagccctgctcctggaccagtaccggaagaagtcccggctgttccgaagcaacgtcctcctcgtgccacttggtgatgacttccggtatgacaagccccaggaatgggatgcccagttcttcaactaccagcggctctttgacttcctcaacagcaagcctgagttccatgtgcaggtgggggcacacatacagacctgtgggtatgggtgctccctcctgggccttcctttaacagccaacccttctgctgagggctccactgtcattcctgagcaaggtttctaggcccaaaagagcaggacacccagaggtcctgtcttttgctaggcaaagtcgtcacccctgtctttactagcatcataggatgaatattgtggccagtgttcccaggaagttctgtaattgatggtagttcgttttgggtccctacaggcccagtttgggaccctctctgagtatttcgatgccctgtataagaggacaggagtagagcctggtgcccggcctccagggtttcctgtgctgagtggggacttcttctcctacgctgaccgggaggaccactactggacaggctattacacctcccggcctttctacaagagcttggaccgcgtcctagaagcccacctgcggtgagacttgcccacctccccctgctgagttaggaggggctgggtgggagaggaccccttcagtgtgtgggtggcccgtgggagcgacgttggctagaacagaaaggctctgacttctttctctgggtagtggggcagagattctatacagcctggctttggcccatgcccgccgttctggactggccggccagtacccgctgtctgattttgctcttctgacggaagctcggcgtacactgggcctcttccagcaccacgatgccatcacgggaaccgccaaggaggcagtagtggtagactatggggtcaggtaggagccagcccgtttccctcgccatgtcaaagaacggctgcgtggttgggtgatcgggtggtcggctgccgagggctggtcctgttggcagagcagacggcctccctgtggccatctgctctcagcgtcctctcctgctccccgcaggttgctgcgttccctggtcagcctcaagcaggttatcatcaatgctgcccactacctggtgctgggggaccaggagacctacagctttgaccctgggacacccttcctccaaatggtgggccccctcctacctctgcttgagagatcctctggtgtgggtgggtactatctcaagagctgctagccgtggggaccattccttttccccactttcttgttttgggggtcctagttccatgcttaaggtggttggtggcctggacaggctggggtggggaggaggttgagcgtagtcctcattcgtccctcctgcccacgacattgcaggatgacagccgtgtaagccatgatgccctgcccgagcgcacggtgatccggctggactcctcacccaggtgagccaggcctggtgaggttcatggaggcacctccaacccagagcggcccttggatgccaatgtaggggccccttgttctggctgctgcttctgcccttctgccacagcaagctcctgggtcagcccaccttccacccacaggtttgtggtggtatttaacccgctggaacaggagcggctcagtgtggtgtccctgctggtcaactcgccccgggtgcgcgtcctttcagaggagggccagcccctgtctgtgcagatcagtgtgcactggagctcggctacggacatggtccctgatgtctaccaggtgaggcagggcacagctttccccgcttgtcagtacttctcctggggactcactccccatgaacacctgcctcccactcccctgctgttccctgcttactccctgggatggaaacaggtggccagggagaggcgttgcccaaaggacaatcactattgggatttgagcatccttaaaaggatattgaggacagtgtggtaacagttatagccaagacagcaagcaccctcagccaactcaacaagtatttagtgtttactacactgtgatggggtcttgtctcattcctgggcttaagcttctagtgaggatttagtgtgttgacttattatgtattcatgaaaaataaatgttcagatgtagttcatgctaggctcggctctaagtgcttaattattcaaggaataattgaattattattaagctcccccacactgcagaaagtcaagtgtggtggcacgggcttgtaacccaacactgggaggtggagacaggagaatcagaagttaaggtcagccttagctgggtgtgtgtgagagagatgtgcgtcttcaatcaatttgttaagaaagaagttttagccgggcaatgatggcacacacctttgatcccagcactcaggaggcagatgcaagaggagctctatgaggccaacctggtctgcagagtgagttccaggacagccagggctacatagagaaacactgactttaaaaaaaaattaaaagtttttaacacaaagtcttgctgcataatccaggctggcctcagactgaagatctctgcttcagtatcctgactgcaggatacagagatgcacaaagatgtcagtcactgctgggtctcatttaaattctcatgagcgcacacagtgatgccacccctcattcccccaggaatcgaggttaagtcactgcctacggtcactcagtctgtgtgaagcctgctccaggccctaggctgtcacctcggcgggcactgtgtgcctttgctgacgagtgtgcagaaggacactgggactcagaaccagggtccccaaacagacgggattcttcagatagaaatgtagggctcagtgcttagcttcggaaagcagaacgccaaggtcagggatggagggtagaaggcctgtctggactgatgctgcttaccgcccatgctcacaggtgtcagtacccgtccgcctgccaggcctgggcctgggtgtgctgcagctgcagccagatctcgatgggccctacacgctgcagtcttccgtgcgtgtctacctgaacggcgtgaaactgtccgtcagcaggcagtcagcattccctgtccgtgttgtggactccggcgccagcgacttcgccatcagcaatcgctacatgcaggtctggttctccggccttactgggcttctcaaggtaaagggccaggccaggggaggtggggaggggccagaggaaggcatgggtgtcagggggcttgtggatagctgttcctgctcccatgtgccctcctgtctgtcacctgactcacagagatttgggtgtgaacattagcagttgccaagtgttagtcaccttctactgtgtcagtgacttgtaaagagagaaggtttattttggctcacggttctgagctttgatcctacagtcaggcagaccgattgcttttgggcctgtggttaggcagcacgtgtggcagagaacacaccacagcagaggaaatgacttcacagccagaatgcaagagaggggttggttgttgtggtacacctgtgatttcaacagtggagggggtaggatcagaaactcaaggtcatctctggctacatggcaagtttgaggcaacatgagacccttgtctcaaaaaaaaaaaaaaaaacagagaaagaagttgtgtttgttggcacatacctttaatccctgcactggagagactgagacaggtggatctctgtaaatttgagaccagcctggtctacatggtgaattccaggtcagccagcacaacacagtgaaatggtgtctcaaaaaaagaaaaaacaataagtataaaaaggggcctggaggcgcagggtagacaaatactctaccaacagagctacaagaatccctgggtttgctcccccacactgcagaaagtcaagtgtgctggcgctggcttgtaacccagcactgggaggtggagacaggaggatcagaagttaaggtcagccttagctgggggtgnnnnnnnnnnnnnnnnnnnnnnnnnnnnnnnnnnnnnnnnnnnnnnnnnnnnnnnnnnnnnnnnnnnnnnnnnnnnnnnnnnnnnnnnnnnnnnnnnnnnnnnnnnnnnnnnnnnnnnnnnnnnnnnnnnnnnnnnnnnnaggaaggaaggaaggaaggaaggaaggaaaatatagccgggaagaggtgggaggatcccagttttctcaacctctcctagtagcagtggtgtgcgaccaagcccttatggggaacccctaagatcccaactgtagcactgggcttggctctttgggggaagtcagtccctgccctcccagggggagacctgacaagctggtgtggggccaggggtcagggctgtggtttttggcagagcatccgacgggtggatgaggagcaggagcagcagatggaactggagttcctcgtctacggcacccgtacctccaaggacaagagtggcgcctacctcttcctgcctgatagcgaggctaaggtacctgagaggcctcacagaaccgggggcacctgcgcatggggagagcctgggaggggcctggcgtaccgggttttgccttactgtccttatgaggttggtgggctgtggtcttagtgatggctttgggcctgctcaggccagagcactgggacgatggtttctgttgaccagccctggcttgctactgctgctttgtactccatgctgcgggttcagtggccacttgctctttctccagccctacgtccctaagaaacctcctgtgctgcgtgtcaccgaaggccctttcttctcagaggtggctgtgtactatgagcactttcaccaagtgattcgactttataacctgccaggtgagccctgcaggcagggaaggtcaccaggtgtaagtcccacaggctggcacctgctcctcttccactgttgtcatggacaagcagactcgtcatttgacacggggatgcttgattctcttaaggaaaagtccaacagtgccctgagagctcccggggtgtagggtgggggagcccgtcgctggaatagtcccttgttgtgctcacctcacttctggctgtccctgtgtttccaggggtagaggggctgtctctggacatgtcattccaggtagatatcagggactatgtgaacaaggaactggccctgcgcatccacacagacattgacagccagggcactttcttcacagacctcaatggctttcaggtaattcttggggcccatgggacagaactcatactgcttatggcccccaaaactggagctgtgtggaggggtgggggtcctgaggacaggtgacaagtatagaacaccagtgaaatggctcagtgggtaaaggctcttgcctatgcctggcagcctgagtttgattcctggagccctcataaaggtggaggagagaatccagtccacagagttgtcctctgacctccacatgtgtggtgtggcacggacacccatacatacatattatatacatacacacaattagaaaaaagtagctggccgggcagtggtggcacacacctttaatcccagcacttgggaggcagaggcaagcagatctctgagttcaaagccagcctggtctgcagagtgagttccaggacagccatgactatatagaggtaccctgtcttgaacagtcagacagacagacagacaggaatacctttacactgagaactcttcagaacataaaccaggctggactctaactcttccctatagatacagccccggcagtatctgaagaagctgcccctgcaggctaatttctaccctatgccagtcatggcctatatccaagattcccagaggcgcctcacgctgcacactgcccaggctctgggtgtctccagcctcggtaatggtgagtagggaaccagcctaccctttgttccagtcagcccatgctgtggacttccctcccctctctccaggtcccctcaccccagagcctgaagagggggaaagggggtgagccctccccttcctctcagtcacacttggcatcctgtcttttggtggaagcagttgagtattgaagggtgactttcagctgaagggttcagctcttctttttcttttcctctctctctctctcatttttttcattcatttgtttgttttttattttgttttgtttttgagacagggtttctctgtatagccctggctgtcctagaactcactctgtagaccaggctgatcttgaattcaaagaactgtctacctctgcctcctgaatgctgggattaaaggtgaaggccaccacagcctgggaggaggcagctcttaagtggttacagtggaatatttaggaaaggagaaagatacgtattttcctcctaatggtcagtaaaagaaaggataacaacagtcttacaaatcaaaggtttctaagcccagtagcacagaggccgaggaaggtcaccccgaactcaaggtcagtttgggcaactttagtaacactgtctcaagacaaaaagttaaaaccaggaggacttgagacttagctctgtggttggaatacttgtgtggtatgggcaagatgtgagcttccgccctcagtgtggagagagtgcagagacaagtcaggagctctcctacccgtttgcacagccttgggacaaaatgagcagtgatttacagactctcaggccccagagccttctgtctgtggctgtagagcttgtgaaggctgaagcgaatgcagggttgaagccttgccacaccgtggcgagtgctgtgcctgcctcctctgtgggaggggtatggctctcctaccctctgccaggattattcgggatctgtcctcctctaaactgaatgcagcccattgtccttgctcggtcagctgtctgcccctctgggacatggcctgttagggagtgattatcgtctactcaaggaacatgttttagggctggagatagcctcctgtgcttgctcagagtacaaagccaaagaaaatacagaaatcctagtcaggactgtgccctctgggaaaggctgtgtgggctgctgtgggagagccttccttcacaccggtcagcttgtcagccaagacccctgtcccatgcaacattccaaacggtttacagaggtggtcctctcctgtcctttacctgggccagactggaggccttgctgaacctctacctcatgcctgtcctcagcacagcctgcttctgacaagcaaggccacccactccagtctggactgctgggccttcgagctgatgctgggcagtgtaaaggcaggagagcatgtgtcaagccatggagtctgtccagcctgagaaagcccatctcagatgggggactctgcagcagtgtcacaaagaggcctttctcttttccggctgctggtgactgtgttctctggggccaattcctaagaggtttcctcctgcaccagggtcccacccctgagtcgcagaggtgaatggccatggtcagtgccccctttctaggcctcctgttacttacaccctgctctctcataccaggagtctgtcattctctcttgagtacctcagctcatctgtctcgatggctccccgcccggggacctgaggtggagagtctaggcatggatttggcggccggagctcactgttaccttccttaggccagctggaggtgatcttggaccgaaggctaatgcaggatgacaaccggggactaggccaagggctcaaagacaacaagatcacctgcaaccgtttccgcctcctgttagaacgtcggaccacaatgagcccagaggtaagatctgggcctgttgcactgtgggtaaccctgggggtttccaaatgtagcaggaagagggcaaggggcagattatatatatatacagcttatttccaccactgaggtaggaggctgtctggcattttgctaactcatttcatgcagcttcgcagtcccttgtcacgttcatctcctgcctctgtctttcctgccttcatcttctcaccccaagcccgagcacttcctaaccttgacacaacactgctcatctcacagttttctttgcctcaccagcctggctttttctccaaactggcagacatgtttagggacttgatcttttccagcaacacaatcaggagctcaaaggtaagggccagggagggccttggtggcctagggcgagcggcctggcactgtagttggagtctgctgcctagaaccccagaggtgcggcttagacacttactccccctgtagacgctgagcccccgctgtgttgtgggacaggggatacaggccaatatgctgccagccctgggctccgctagtgagcagggcccggagctgctgtgagcgtgagggtagaggagcagtagggtctctcagggcctgcagaggcgaaaggcggcttccggagacgacagtcaccaggctcagcctcggtgagtggggcccattcacagagtcgaaggcaggaagacagaatggaagtgggactagttgtaactttaggctaaaatggtgctgactagcatagccaccgtcgcccacatgtgccgcccgtttactttattggagcttaggattgaacccagggctttgcccaaggtaggcaagtgctttaccactaaactaaatctccagtccggtttagttttttgggtttgggtgtttgaggtaaggtcttatgtagcttgggctggccttttggtatggggatatccttggataaccttgattttagtctcactgttgcctaggctggccttgaactcctgagtttgagtgagcctccaggctcagcctcctaagtagctaagaccccaggcgtatgccaccttgcccagctaagaccccaggcgtatgccaccttgcccagctacctagagttggctgtttacttaattttttttcttttcctttttctttttctttttcttttttcttttttcttttgagacaaggtgtcatgtagtgcaggctagacttaatcctcatgcctctatctcccaagggttagaattagaggtctataccatcatgctgggatttattttcatctatggttactgaaatgaattaagatgacgtaggttcaggttccgctcatactggctacgttccttgggtacacgtctcagtctcaagatagaggtggtggatctctgcggttggcccctggtctgcatagagagttccagggcagccactactacatagtaagaaccctgtctcaaaaaaaaaaaaaaaaggggggctggtgagatggctcagtgggtaagagcacccgactgctcttccgaaggtcaggagttcaaatcccagcaaccacatggtggctctcaaccatccgtaacgagatctgactccctcttctggagtgtctgaggacagctacagtgtacttacaataaataaataaatctttaaaaaaaaaaaaattacaaggggctgggggctcctcagcagataagagcctacacttggacccccaacacccacagggcagcacaggaccatctgtaactccagttcgtgggatccagtgtcttcttttggcctccaaagtgcacagacatatgtatagacagaagcacaaagacaaaactcccatatacacaaaatgatcataataaattggggttatttttgtttttttgttttttgggttttttttttgtttttttgagacagggcttctctgtatagctctggctgtcctggaactcactatgtagaccaggctggcctcgaactcagaaatccacctgcctctgcctcccgagtgctgggattaaaggtgtgcgccaccacgcccagcaataaattgttttttaaaattacctttaagcccccccccccctgtgtttccaggttgtcagtagctatcacagaaggtgtggccagcaatgtttctgttatttcagaaaactctgtgagccaaactgggcttgaacaccggagtgtaggacagggcagaccctaaagatcccagtgcctggccagagcctggagatggggaagactggggagggagggatactggaggaattagtcctcagctgtcaggactacgaggagcagagtggctgtgtaggaagacaaggtaggggtgacagtttcagatgctgaaacaggaagccttggagacttgaagtaagccaagaataggaaaaagaaattggcaaggaagtgtgcgttgaagactttgcagaagcaaaatggaaggggaacagtccctgcctgggcttgaagggccaagggagactgtgtagggcactcagatggcagtgccaggagcagagatgggcacacagaaatggcgtggccgtggaggaagtccatgtagtcctgtgagtgtggcctcctgggagccacctgaggaggagtcttaccagctggggcccatggagctgagcgtctggccgacacagggatgtggcatcttacctcgggactctcactattagaggcctgtccgtagtgaagcatgtctgtctgttgtccatgcctactcctttctgtggggtgatggcacctttgagagtacattcttcatgatagtgttaaagaaaacagaagcaggcctggtcacctgactgtctgtgagccgggcgccatagttagtagccacctctgagggattggaggtacagggcctgaaaccaggcagtcagagtccaagtgacctaggaaagctgttctgaaaagagctggcctgcctccccttcacctagaggggctctgtcccctcatttacgttttgggtctatcttgcaggtgcatcaggagcaggagcgttctacaagctacccgtccctcctcagccacctgacatccatgtacctcagcacacctcctcttgtcttacccgtggccaagaggcagggcactagccctgctctgcgctctttccaccctctggcttctccattgccctgtgacttccatttgctcaatctgcgcatgctcccagccgaggtgagtgtcccagtcagtgctaaccctcacctccaggctctggccctcctcccagctctcctctgtccagccttcttggcagatgtgctgctaacccgccactgcccttgcccctgactgtcttccaggacaccttgcccgcaactgactctgcgctcatcttacaccgcaaggggtttgactgtggccttgaagccaagaacctgggcttcaactgtaccacaagccaaggcaaggtgagtggggtcccggtgtgggaggcacgggccctggtcaggacagcagagctctaggctgagagcctagaggaaggctggcagtcagtaggaagaaaggaggagtagcctcggggctctctggagactaaggggaggcctttggcctgtgcttttggtaatggagtcggcaggagccatttcagaccagcatggggctagaaacctcgggtttcctgaggacagaccttttcagagtgaagtgggaaacctgagaatgaaaaaccactgcaccttttcagagcatcgctcatggtgtaaactggcacgttgcttgccctggtgactcagccgtgaacccaaacagcccctgttctcagctcacacagcgtggtgtgagagttcctacgaggagcctgggcaagctttggacttgagtggattgcagcagtgccctctctgaggctcgctgctcctgggagggctgtggcttccagcagcccgtttccctcttactttatttatttatttatttctctatcttatttttattctttatttttgagacaaggtcacacataacctaggctcgatacaaccttactgtgtagtcgaagctgagttgaacccctgaactgcctgcctctacctcccaagagctagagtcctgttacaccattttagctctaagaatctgacagaaatccaggtgtgttggctcacaacacagtcccagcactgtggcaggactgctctgagtctgaggctagcctggattacagtgtgagaccctgtctcaaaaaatcccaaaagggctgggcaaggtggcgcacacctttaatcccagcacttgggaggcagaggcaggtgcatttctgagttcgaggccagcctggtctacaaagtgagttccaggacagccagggctatacagagaaaccctgtctcaaaaaaaaaaaaaaaaaaaaaaaaaaagaaaaagaaaagaaaagaaaaaaaaaggaaaaaacccaaaagggcagcactccgtgtaaggaagaacttacccactgttagcagcgcccggctcaccctgccccctttctcttcacagctagccctggggagcctcttccatggcctggatgtgaccttcctgcagccaacctccttgactttgctataccctctggcctcaccttccaacagcactgacatctctctggagcccatggagatcagcaccttccgcctgcgcttgggctaggccagggcttcttgtggcctgaagacagggttcatccacagagactgcctcctaacaccaagactaagctggacaagccacaccaagtctcccctccgctctgcctcagaagtgacagactgtgctgtgcccttccgttgtctattgctgctcctgcgtttggaacagtccttacatcagcaggcggcgggggcagagagacaggggagaggaggcccttgccctaggctgtgagtaggtacccagctgggcacaactcaggcttcatccttttcccaaaatgggatgtaggaagagtggggacaagcagaagaggtcagggaggctgggggacaacctcacgctaggagactgcaggtatgagcttgctctgcggggtcatatggaccccacagtgctggtatgagggtacaggagcagggtgattctgggaggagaggggtaggcgcccattattagtggagtaaaggcgtggaaggagtccctggttctcctaagagcctaaaggctttgctgctttctgctctggctctgttctgagtgccactgggcctgctctgagtgccactgggcctgcatgccctggctaggggctgctgggtgcaggaagggcttgcttcagactccaggccagaggccacggaacacttcaggcactagcactagttctcagctgatcatttggtgttgatctgtgacaggggtagggagtgtctccccctgatctgctttcttatctcacacaccaggctccccacgagttcccattgtggggatcctggcaggattcctttccctagaatggaaacagagtttccaagagggctgtgcttgggtgtcttgggaaggcatcctgtgctggggcccctggtgggctgaggaggttcactcgtgtcccacctgcagaagtattacctgcccgctgtgtggacgaggaaggcagagacaaaattaggaggtcatgtgcttggatgaaccttcgtttttgcttcaatcaatagagaatctgtctataaatgataagagttggtaaaagcaaagttccatccttacgaaaacttagtaagccaagactagaaagaagcccgtaatctggataaagatctcgtcaccagtaagcgaaggcgcccaaagcatcggacagagcaggctctgatcccctcagtcagaaactggccggcggcacagtgtgttggtgtcactaacccacacttcagatggaaacaagaattacaattgccactgttttaaaaccataagctacctaagaaacctgtgtgtcaactagcaaggcattctgtgagttgccctgtaacgactggttctccccaaatcaacccataaacatcagtgtaattcccacgaggttggacactttctggaactcttcaggtcctggcattcatctggaaggtgacaggctgaggatgtgaagtagttctgaatggccgaggtgatgaacggctgctgacactaaggcgggcaacaggcagtagctgtcttaacagagttctcaaacgacttggactcttctgccagcgtgaattcagctgccatgataggtcaggtcagacagacctaggcacgtagaaattcagtatatgatttcaggtgcaggggaggggaggtggatattttcatagtgctttgagacagctacctacctatgagacttctgtttcaaaaacaaaacaaaacaacctagggctagagggaaaaaagcaaaagcaaacaacaaaattgttattattattattattatcatcttattattattaattattattttagtctcactgtgtacctctggctgtgctggaactcattatgtaaaccaagctggcctggaaatcacagagattccccacctgcctctgcctcctgagttctgggactaaaggcatgcgccatcatcacacctgggaggaaaaaaaaatttgttttttgttttttcgagacagggtttctctgtgtagctctggctgttctggaactcactctgtagaccaggctggccttgaactcagaaatccacctgcctctgccttcctagtgctgggattaaaggcgtgcaccaccactgcccagcagaaaaaaatatttttatacctgatttaggaaacccttttctagacataacatgaaacctaatatataatgggggaacgttaaaaaataggttttgacacacacacacacacacacacacacacacacacacacacacacacaaagcttgaaagcatgctataggaaacaggttaaatcaatacagctgtgtgggtggaaatgagtctgcagtgagttctgtcactgctggagaaaagtgtgttttgacttctcagagaacgtcactagggtctgtccagcagcacccaaagactcagtagtgacaaggctgagttcttgcagggtctccatggtttatgttgccaggctcaggccacacggcttcctattcatgtcttggtgacaggaatgagatgaagagtggggagcgcttagcacagagcaggggttgcgcctacagcaagacttatttgctaccatatggtttgtaatcaaatgatagggaactgtgcagaataaagaatattctttggaggtcagagatgtgcagtgaagttacttgtctgacaggacaaattttaatcacaaacacacacttgggagtgtcttgcaatgtatccctgactaacccagacttgccatagagagccaggctggccttaaacttgtaatcttcctgcctctgctgcccacaggctaggctcacaggcatgcacaccatgccctccctgctgctgtttacatacataaatagtacttagagcagtgtcctttcaaaagttcgtcagcagagttgcctctggaaagataggcaggcctgtttcttcagtctgggtgctaaggtgatgtgtnnnnnnnnnnnnnnnnnnnnnnnnnnnnnnnnnnnnnnnnnnnnnnnnnnnnnnnnnnnnnnnnnnnnnnnnnnnnnnnnnnnnnnnnnnnnnnnnnnnnnnnnnnnnnnnnnnnnnnnnnnnnnnnnnnnnnnnnnnnnnnnnnnnnnnnnnnnnnnnnnnnnnnnnnnnnnnnnnnnnnnnnnnnnnnnnnnnnnnnnnnnnnnnnnnnnnnnnnnnnnnnnnnnnnnnnnnnnnnnnnnnnnnnnnnnnnnnnnnnnnnnnnnnnnnnnnnnnnnnnnnnnnnnnnnnnnnnnnnnnnnnnnnnnnnnnnnnnnnnnnnnnnnnnnnnnnnnnnnnnnnnnnnnnnnnnnnnnnnnnnnnnnnnnnnnnnnnnnnnnnnnnnnnnnnnnnnnnnnnnnnnnnnnnnnnnnnnnnnnnnnnnnnnnnnnnnnnnnnnnnnnnnnnnnnnnnnnnnnnnnnnnnnnnnnnnnnnnnnnnnnnnnnnnnnnnnnnnnnnnnnnnnnnnnnnnnnnnnnnnnnnnnnnnnnnnnnnnnnnnnnnnnnnnnnnnnnnnnnnnnnnnnnnnnnnnnnnnnnnnnnnnnnnnnnnnnnnnnnnnnnnnnnnnnnnnnnnnnnnnnnnnnnnnnnnnnnnnnnnnnnnnnnnnnnnnnnnnnnnnnnnnnnnnnnnnnnnnnnnnnnnnnnnnnnnnnnnnnnnnnnnnnnnnnnnnnnnnnnnnnnnnnnnnnnnnnnnnnnnnnnnnnnnnnnnnnnnnnnnnnnnnnnnnnnnnnnnnnnnnnnnnnnnnnnnnnnnnnnnnnnnnnnnnnnnnnnnnnnnnnnnnnnnnnnnnnnnnnnnnnnnnnnnnnnnnnnnnnnnnnnnnnnnnnnnnnnnnnnnnnnnnnnnnnnnnnnnnnnnnnnnnnnnnnnnnnnnnnnnnnnnnnnnnnnnnnnnnnnnnnnntttgagtatgtgtgtccctctgtagtgcaatgaaatcaggggaacctgtgggaggtgactgggccttgcaggcttctctctagtgggggagggggaaaccattataaaacaaggaaagaggaaaccatttacttcaccctagggaaggaaggctctctgcctaactcagggaagtttgcttcaggcagaggtggttctgtccacctgagtctgacccaaccagacacggggcaaagttcttacgcatcttcttcatgcagacttgctctgtagatcagcatgagaagaaacaccctgactccagttctcagaaatatgttgcaaaagatggaggaccatgtccataaaggaaaagttgacgtctgaaggtatggtccaaagcaatgaggctcactgtgccctggagatgaattatgtccctcccaaaagggctatggaggaaagccgaaaaccctaaaactcctaaagaccccatctgtctcctgcctgtttgctctgaatatcactcaaaggccaaaactgacccaggcatgtctattagagacactgcagggtgggggcagggtgaggatgtcgaaacagccaaagataaccacgtgagcagaaagcagctagactcaaaaagcgtgaaaagattgctgtacaccatgccaagggcaaaaatgaagcaggaaggaccagccttgagagaccaacaggcataaaaaataatgagccagaagagggtggaggatggctgccctgtcgtgtggtgtgtgtgtgtgtgtatagtgtgtgcatgtgttcaggtgtttttctaggaatgggaaattcaagtgcagcttaacattagcttcagtgtaaaaactagatttttgtatagccaatgagatttaagaagccttctggagagccttggtatggttgtgctttattgcagaggcaggagtattgtagaatggctgtgggggccctatgcccctccagcaaacaaaaacagaccaaaaaaaggggctctgaaggtgaggtgagacggcagagtgggtaaaggcaccagcccgccaagcctgacaaacttgagttggatatctcagacctacatgatagagggcgaaatccaactccccgaaaattctctgccacacccacactgtaggacttccgctcttccggatacccggaagctcttgtgacttagccagcaatttttaagggtccagggatcggctatgaatcattgagcaatcactgcagttggtgttggagcactaaggtcttccaggcttcctcatgttactgggatttctgtctttgccagtcagttgccagaaagtggtggcattccttcccagtatatctgccatcccacaactgcatcatctgaccttcgtaaggacatagtccagcccacttgataaggacgccaggctccaagggttgatgcttttaacccaaaggacatgggaaatgactatttagcatgtgggtcctcttcgggagaccagagaaggaagaacagcaatttaagcctttacctaagtgctttattttccacgactaaaccacggacgcttattccaatcttaggtccctgaggggccagaggtctcaccatgcaaacagacccaagacttaaagaaaggctgttagtgcctggatggaggggcatatctgctttccatattccgggcccaccttagtgaaaaaacacagacgtttttagcctgtgatgtcagggttgagtgatggaatgtgggaaatgaggaggctctggaacgctgcagtaagaatcccatctttcctggaccttgctggagccatgctgcaggatggcacagagaacggctcagagcgtcagccctcgctcctcgaacagctgctttagtgcctcttccagttgctggtttgtcccttgaagcccttttaccacctgggctgcccactcgaagtactcctggactcggtgttctgaccatcctgcaccagagtggacagaaacctgcttgtgtggtgtcaagggcagcatcggcttttgcctgtttcctggcaggctttggtacaaggccgtgagttgcgatggcatgatctgacaacttctccatgacccagcaactctgttcccaccttagggaagaagactattctaggaggtttagtcggaggtgttacgaccacccctccccactctaccccccgacttatttctgggaatctaaccaacctgtattttcagaagctggccatcccctccccctctctcctcagagccagtaggagagcatacctgtaggggtgcagcgattcaggtccctcagattgtatagcttgtctgccagcttcaccagtttggcccctgggctgctgtgtggtgcctgctccacctgttgccgctttctttccagtttgggcagagtcttgtcatctgttacctcctccaccaagcgtcgaacctgtgctccaaagtgcagctctacctcatccagggtagtatctgtgtcttctactgtgtcatggagcagggcggcctggggataggttaccattcagcccagtgacactaacctactagccaaataaatagcacccattgttcaacagtactctggtttcccgcaccagcctcctggcagagaagggtagccttacctgtaacaccacaatatcagtgattccagcctcatgggttaggatccgggctacacctggcaggggcaaagcagaagtcagtctagaaggagccagatgtagcacctcaccagctggatgaccttggaaagtcccttaccctcttgggatatcgactgtaccaagggagcactcctgccttctaccccaggtgaggcttacacgcataacgcatgaaaagtggttgatacaacgcttgggactcgaagaaggcgctcagtaatttatatgcgctttgtgttcccgtcccagttagtccccacccgccacgggccgcgagggctgcttcccaactggcgcgcccaccgatggggtgattaatgtagggagtcccttcaggatcttttcgtcgctgctgtcggtgtttgtgagcggcgaagtcagcagcctccagcagctgagctgcctccgagcccattgcgctggtggcgcgagggactgaagcttcggagtccgaacaaatcacctatagcgccgcctggcgcttcggaggctcggagaacggaactatttctaacaagctgtaattcattcatcccccctcccccaacgtgtgtgcgcgtgcgtgtggattatagaggctataagtctccaccttagtttttggagacaaagactctccttgaacctgtagcccaggtatttagcaagactagctaccgaacgagtttcaaggagtctcctgtctctgcctccacagtacaacaggcgtaggttgccatccccagcttttttacccggctattgcaataatctgaaagaatgcaagtccttattcttgtgcagcaagcactttacccactgaaccatcatcccattctcaacggaggttctttaaagaccgagatcctggatatagaagttttcaacaatcacagcggctggtgcagcgttctccccaccatgccccaggacgtagtagaactaacagtctttgcagaaaagggagacaaaaccaaaagtgatagtttcacagagtgctgggtacagagctggaaggcacgggtggccgtgggatcgtggggggaaagcccattttatctagcctgggaggcagagacagcgtcttccacgagaaaaaggccatctacagcctggcacaacacccagaccgttttcaacgtgctccaaacatcgctctcctcacagggtcagtctctgttatcttgggcatctgaacctaacatcttggccctagagatgctaggatttgacctggagagttggatcttgcttaattgcttcagatgtgggctcctgggacacaacactgtttctacagaaaccgtttgcattcatctcttgaatcatgagggagcctgcttcagtccccagacctctgctctgggcccttgaggtagtgagtcttgtccccgcggtttcaggagcatagtgttgcctagcttgggtaggcactggaacaatccttctctctttaccggccatcgagctttggatcttctggagaaatcccgtcttggcgttggcagctctgaagtatgagggataagcaagaccttggcatctccccaaagggttctgagaagtggagacagccagctgctaagtgtattccaccaggcaggtagcttttgtgtctgggctggcagctggggagataaggctcaggggaaagcctaatgactggactctctgacaggcttggtggttgccatggcgctgcagttacagagggatgccccacaggctgaacagaggtctctggggtctaaaatggaataatccatatcccccaaggtgtccgtgcagcctagaaattgaggaatgggtagatagaaacacagttggcttcacacgctcatttcatttctttctttcttctttcctttctttctttctttctttctttctttctttcttcctttttgacaatggctcaactttttctctcctggcattcctttcctcccttctgcttaggaaatcataggcagtttggagccaaaggcctcacatttcccagcagatgataggacccaatcactctcatctctccacaagcttataatagaggagttttcacccctgcaaatcttgggactttaatttcagcttccttcttgtctgtagccagggcttagaacccctgttggattcctaggactacgactgaggtggaggcgacttcttatgggcctccaggggaggggtccagggctcctgctgacaggcctgtgtgggggactgcttttcagttggatgaatcttgcccagccaaccgacctctcaggtataatactttccctatcctctgagggtgacttggggtacgggagagctgatggtgaggggtggagagagcctcctcttctcttctctttgggacttggaccccattttgcactttgagcagggtgaaggggatgtgggtaacctcccttctctatagacgtcttgcttctctccagccctggctcaccacccccatttgtgccagactacacgggatgcagaaggcggccactaccctggttttttctgtccgcgcctctctgacactcccgaggaagcctactgttgccacctgcaggctgccgggggttcctgctgtaccctggatgaatttgaggccctgtaccaagtaaacttgtcttcgcttcagccaccacccatcctcaggtaagaactctagtcccggattcgcagaacactggcagagtgctcccgtgtcttgggctctgtccttgaattctgcagtgggagacttgtagcttccagattagtggagaggaagtcactaaatcataattacaaccaatgctgtaaatgaaaacaagtaacagaagctgctttgtcttaaggggtttggacggtgttaataaagaggatttgttaatcttggacacattgtagtaggaggtttaattctgaatctgccgcgtttgtcttcaaggtacttgcgagctcccagatttgtatgcaaaatatgtgtatgcatctgtatttatcccctgctctcgtgggactctgggctctgcaaaccctgacttgtagcagccagtagacaaccttgattctctcctgtctccccaggggtccaggcccgctcctagcactgggcatctacactctactgctgatggcactgatgactacagatttcgtgcacttctgccgtggtcggggacggagagaaaaacaaaactccagcggctgccgccgcctttcctttagagcctcttccgcgcgccctctacaggttccagtgggaacagactaggcgctcgtgaagcagccctgagcctgagcctgcgcctgcgcaacgcgagtaccccgcccttgcacagacccaaccacttcttggcctcgccttgtttagcgtaacactgacgcattgctggggcggggcagtcgccggcatctcgcggatcccagggacacctttgctctaaagactgcgcctgcactggctcttggagcttagcttcgtgatgactgtgagtggcccggagacccccgagccccgaccttccgaccccggggtgcgtactgattctcctgtgccatctcccctttcacacatgcgccttcgcacctggtcgccgtcaccttattctagcccttcacgggactcggccaagacccggctcttctcccaggcgcgctgctctgcccaacgcctttctctctctctctctacaggccagctcagccgagcagctgcggaaggagggcaacgagctgttcaaatgcggggattacgagggcgccctgaccgcctacacacaggccctgagtctcggcgcgacgccccaggaccaggccattttgcaccgaaacagggctgcttgccacctcaagctggtgaggggatcgggttgctctaacctggttctacctgggcctgggattgcccatagccgctgctgtttgtgcaccagttgggcatttcctagccacgcacgattgccagaggtctttaggcgtgggtagtgggggatcaggtggttcagcaaaacaagggtgccattgccactctcaggctcctgatctttctcttacaggaagattacagcaaagcagaatcagaggcgtctaaaggtagggtgggtgtgggtcctcatatggagcaatggggtcttctgtggtgggaaaggactctggggccaccgagccatccctttctcctcctctggacccagtcactcgtctttctacttgctttcccacttcttcggcctttccttttctgcagccgccctcaccttttctgaggctgaagcaccgagctccacattcgtacccctatcttcctttggccctcgagatctatccctactgctcttgcctggagacggtggcctcctgggtgctgatagagttcctgtttgtgctcagccattgaaaaggacggtggggatgtcaaagcactctatcgccgaagccaagccctagagaagctgggccgcctggaccaggctgtccttgacctgaagagatgtgtgagcctagaacccaagaacaaagttttccaggagtcgctgaggaacattgggggccagattcaggagaaggtatgtgaaggtaccaagagaagttggagttgcctgggtctgggacaaggatgtagacacagtactccagagaggagctactggtaacaaatacacattaattaataatgctcagactgatggaggaaatcaagtttaaagcatgtttttttctgtgtatgtataagtttgtccttgtatgtaagtggtgtgggtgcgtggactcttacggtacctggcgaaggtatgaagtgatttggctccgttaggctgtagtgctttagcatatcaaagttgtaaatgaatatctgatgatctagttagcccctcttgaccttagactcactacctgcccgaagctggccttgaacccctgattctcttgcttccaaaaacatttttagttttacttttttaagacagggtttcatgtaacctaggctaggcctggacttggctgcgtagctgtggatagccttgacttcctgcctacacctcccaagggctggaatttcaggcgtctgacttttatttcagccttgtttatagtaagagagacttggaacttgcctaaatgcccagcaatgaagagaaaaaaaaacctaaacagactaggtcagtgctgtttctgagaaatggatcatatatgactagacgcgggctctgctgattggtagatggaaaagcaaaatatgcggtaatctaagtaggaaagtactatgtccatgagggaacgatccaaacagtggagcctgtctgagaatatctggctgaatccgtgacagtccaatgaaaaatgtcagtaaagcttgacattaaaagccaggtggtagcgcatgcctttaatcctggcactcgagaggcagaggcaggcggacctctgggttagaggccagcagggtctacagagtgagttccaggacagccagggctatgcagaggaaccctgtcactaaataaataaaataaaaataaaagcctgttaagaatgcacatcaagccaggggtggtggtgcacacctttaatcccagaggcagagaaaggcaggtctctgtgagttcgaggccagcctgatctacacagtgagctctaggacagccaggactgtttcacagagaaaccctgtcttgaaaaaacaacaaaaaacaatgtccactaaaggccaggcctggtggtgaatacctctaatcacagcactcaggagctgaatgaagcagacagatctttgtgagttcaagaccagcctgggctaatttaaaaagaaagaaaaaagtgtgtgtgtgtgtgtgtgtgtgtgtgttgnnnnnnnnnnnnnnnnnnnnnnnnnnnnnnnnnnnnnnnnnnnnnnnnnnnnnnnnnnnnnnnnnnnnnnnnnnnnnnnnnnnnnnnnnnnnnnnnnnnnnnnnnnnnnnnnnnnnnnnnnnnnnnnnnnnnnnnnnnnnnnnnnnnnnnnnnnnnnnnnnnnntgttagcagctacctcaaaaccttcctgccctcttttgaacgactgtcaagcgtagcaccatagtggcatttctgtgctgttaacgctgctatagtatg

SEQ ID NO: 931 - DNA, 665 bp, Mus musculus
tttgtttttttgagacagggcttctctgtatagctctggctgtcctggaactcactatgtagaccaggctggcctcgaactcagaaatccacctgcctctgcctcccgagtgctgggattaaaggcgtgcaccaccactgcccagcagaaaaaaatatttttatacctgatttaggaaacccttttctagacataacatgaaacctaatatataatgggggaacgttaaaaaataggttttgacacacacacacacacacacacacacacacacacacacacacacacaaagcttgaaagcatgctataggaaacaggttaaatcaatacagctgtgtgggtggaaatgagtctgcagtgagttctgtcactgctggagaaaagtgtgttttgacttctcagagaacgtcactagggtctgtccagcagcacccaaagactcagtagtgacaaggctgagttcttgcagggtctccatggtttatgttgccaggctcaggccacacggcttcctattcatgtcttggtgacaggaatgagatgaagagtggggagcgcttagcacagagcaggggttgcgcctacagcaagacttatttgctaccatatggtttgtaatcaaatgatagggaactgtgcagaataaagaatattctttggaggtc

SEQ ID NO: 932 - protein, 59 aa, Mus musculus
VCSEFCHCWRKVCFDFSENVTRVCPAAPKDSVVTRLSSCRVSMVYVARLRPHGFLFMSW

SEQ ID NO: 933 - DNA, 910 bp, Mus musculus
tggatgaggagcaggagcagcagatggaactggagttcctcgtctacggcacccgtacctccaaggacaagagtggcgcctacctcttcctgcctgatagcgaggctaagccctacgtccctaagaaacctcctgtgctgcgtgtcaccgaaggccctttcttctcagaggtggctgtgtactatgagcactttcaccaagtgattcgactttataacctgccaggggtagaggggctgtctctggacatgtcattccaggtagatatcagggactatgtgaacaaggaactggccctgcgcatccacacagacattgacagccagggcactttcttcacagacctcaatggctttcagatacagccccggcagtatctgaagaagctgcccctgcaggctaatttctaccctatgccagtcatggcctatatccaagattcccagaggcgcctcacgctgcacactgcccaggctctgggtgtctccagcctcggtaatggccagctggaggtgatcttggaccgaaggctaatgcaggatgacaaccggggactaggccaagggctcaaagacaacaagatcacctgcaaccgtttccgcctcctgttagaacgtcggaccacaatgagcccagagcctggctttttctccaaactggcagacatgtttagggacttgatcttttccagcaacacaatcaggagctcaaaggtgcatcaggagcaggagcgttctacaagctacccgtccctcctcagccacctgacatccatgtacctcagcacacctcctcttgtcttacccgtggccaagaggcagggcactagccctgctctgcgctctttccaccctctggcttctccattgccctgtgacttccatttgctcaatctgcgcatgctcccagc

SEQ ID NO: 934 - protein, 301 aa, Mus musculus
  VARIANT (1)...(301): Xaa = Any Amino Acid
DEEQEQQMELEFLVYGTRTSKDKSGAYLFLPDSEAKPYVPKKPPVLRVTEGPFFSEVAVYYEHFHQVIRLYNLPGVEGLSLDMSFQVDIRDYVNKELALRIHTDIDSQGTFFTDLNGFQIQPRQYLKKLPLQANFYPMPVMAYIQDSQRRLTLHTAQALGVSSLGNGQLEVILDRRLMQDDNRGLGQGLKDNKITCNRFRLLLERRTTMSPEPGFFSKLADMFRDLIFSSNTIRSSKVHQEQERSTSYPSLLSHLTSMYLSTPPLVLPVAKRQGTSPALRSFHPLDLPCDFHLLNLRMLPX

SEQ ID NO: 935 - DNA, 4165 bp, Mus musculus
cgcgcgggccgcggtcccccgggatgcgagcagtggcggctcggccggccgggtcccgagcggcgcggaggccggccgcgtacgctccgccctctttggcccggacccaatctccagggactaaaaatattgcccggaggctcctgagcggaatcagatcgcattaagtaggacgcaggctgaggtgactgagcttttcagcaccagggcccgaagagcagactccagagagcggtcccgcccacgcgcgttcagcagctagcgtcctccctcctccggcaggaacgtgcctcctgggtcagtatgaagctgaaaaagcaggtgacggtgtgtggggctgctatcttctgtgtggccgtcttttctctgtaccttatgctggaccgagtgcagcatgatcctgccagacaccagaatggtgggaacttccccaggagccaaatctctgtgctacagaaccggatagaacagctggaacaactgctggaggaaaaccatgacatcataagccgtatcaaggactctgtactggaactgacagccaatgcggagggcccgccagccctgctgccctaccataccgccaacggttcctgggctgtgctcccggagccccggcccagcttcttctccgtctccccccaggactgccagtttgctttggggggacggggtcagaagccagaactacagatgttaaccgtgtctgaggatttgccgtttgacaatgtggagggtggcgtgtggaggcaaggctttgacatctcctacagcccaaatgactgggacactgaagacctgcaagtgtttgtggtgcctcactcccacaacgatccaggctggatcaagacttttgacaagtactacacggaacagacccagcacatcctcaacagcatggtgtccaagctgcaggaagacccccggcggcgctttctctgggcagaagtctccttcttcgccaagtggtgggacaacatcagtgcccaaaagagggcagcagttcgaaggctggtgggaaatgggcagctggagattgcgacaggcggatgggtgatgcccgacgaggccaactcccattactttgccttggttgaccagctcatcgaggggcaccagtggctggagagaaacctgggtgcaaccccgcgctcgggctgggcagtggacccctttggacacagctccaccatgccttacctgctgcgccgtgccaacctgaccagcatgctgattcagagggtgcattatgccatcaagaagcactttgctgccactcatagcctggagttcatgtggaggcagatgtgggattcagactccagcacagacatcttttgccacatgatgcccttctacagctacgacgttccacacacctgtggccccgatcccaagatctgctgccagtttgatttcaaacgtctgccgggtgggagaatcaattgcccttggaaggtgccaccccgggctattacagaagccaatgtggcagacagggcagccctgctcctggaccagtaccggaagaagtcccggctgttccgaagcaacgtcctcctcgtgccacttggtgatgacttccggtatgacaagccccaggaatgggatgcccagttcttcaactaccagcggctctttgacttcctcaacagcaagcctgagttccatgtgcaggcccagtttgggaccctctctgagtatttcgatgccctgtataagaggacaggagtagagcctggtgcccggcctccagggtttcctgtgctgagtggggacttcttctcctacgctgaccgggaggaccactactggacaggctattacacctcccggcctttctacaagagcttggaccgcgtcctagaagcccacctgcgtggggcagagattctatacagcctggctttggcccatgcccgccgttctggactggccggccagtacccgctgtctgattttgctcttctgacggaagctcggcgtacactgggcctcttccagcaccacgatgccatcacgggaaccgccaaggaggcagtagtggtagactatggggtcaggttgctgcgttccctggtcagcctcaagcaggttatcatcaatgctgcccactacctggtgctgggggaccaggagacctacagctttgaccctgggacacccttcctccaaatggatgacagccgtgtaagccatgatgccctgcccgagcgcacggtgatccggctggactcctcacccaggtttgtggtggtatttaacccgctggaacaggagcggctcagtgtggtgtccctgctggtcaactcgccccgggtgcgcgtcctttcagaggagggccagcccctgtctgtgcagatcagtgtgcactggagctcggctacggacatggtccctgatgtctaccaggtgtcagtacccgtccgcctgccaggcctgggcctgggtgtgctgcagctgcagccagatctcgatgggccctacacgctgcagtcttccgtgcgtgtctacctgaacggcgtgaaactgtccgtcagcaggcagtcagcattccctgtccgtgttgtggactccggcgccagcgacttcgccatcagcaatcgctacatgcaggtctggttctccggccttactgggcttctcaagagcatccgacgggtggatgaggagcaggagcagcagatggaactggagttcctcgtctacggcacccgtacctccaaggacaagagtggcgcctacctcttcctgcctgatagcgaggctaagccctacgtccctaagaaacctcctgtgctgcgtgtcaccgaaggccctttcttctcagaggtggctgtgtactatgagcactttcaccaagtgattcgactttataacctgccaggggtagaggggctgtctctggacatgtcattccaggtagatatcagggactatgtgaacaaggaactggccctgcgcatccacacagacattgacagccagggcactttcttcacagacctcaatggctttcagatacagccccggcagtatctgaagaagctgcccctgcaggctaatttctaccctatgccagtcatggcctatatccaagattcccagaggcgcctcacgctgcacactgcccaggctctgggtgtctccagcctcggtaatggccagctggaggtgatcttggaccgaaggctaatgcaggatgacaaccggggactaggccaagggctcaaagacaacaagatcacctgcaaccgtttccgcctcctgttagaacgtcggaccacaatgagcccagaggtgcatcaggagcaggagcgttctacaagctacccgtccctcctcagccacctgacatccatgtacctcagcacacctcctcttgtcttacccgtggccaagaggcagggcactagccctgctctgcgctctttccaccctctggcttctccattgccctgtgacttccatttgctcaatctgcgcatgctcccagccgaggacaccttgcccgcaactgactctgcgctcatcttacaccgcaaggggtttgactgtggccttgaagccaagaacctgggcttcaactgtaccacaagccaaggcaagctagccctggggagcctcttccatggcctggatgtgaccttcctgcagccaacctccttgactttgctataccctctggcctcaccttccaacagcactgacatctctctggagcccatggagatcagcaccttccgcctgcgcttgggctaggccagggcttcttgtggcctgaagacagggttcatccacagagactgcctcctaacaccaagactaagctggacaagccacaccaagtctcccctccgctctgcctcagaagtgacagactgtgctgtgcccttccgttgtctattgctgctcctgcgtttggaacagtccttacatcagcaggcggcgggggcagagagacaggggagaggaggcccttgccctaggctgtgagtaggtacccagctgggcacaactcaggcttcatccttttcccaaaatgggatgtaggaagagtggggacaagcagaagaggtcagggaggctgggggacaacctcacgctaggagactgcaggtatgagcttgctctgcggggtcatatggaccccacagtgctggta

SEQ ID NO: 936 - protein, 1144 aa, Mus musculus
MKLKKQVTVCGAAIFCVAVFSLYLMLDRVQHDPARHQNGGNFPRSQISVLQNRIEQLEQLLEENHDIISRIKDSVLELTANAEGPPALLPYHTANGSWAVLPEPRPSFFSVSPQDCQFALGGRGQKPELQMLTVSEDLPFDNVEGGVWRQGFDISYSPNDWDTEDLQVFVVPHSHNDPGWIKTFDKYYTEQTQHILNSMVSKLQEDPRRRFLWAEVSFFAKWWDNISAQKRAAVRRLVGNGQLEIATGGWVMPDEANSHYFALVDQLIEGHQWLERNLGATPRSGWAVDPFGHSSTMPYLLRRANLTSMLIQRVHYAIKKHFAATHSLEFMWRQMWDSDSSTDIFCHMMPFYSYDVPHTCGPDPKICCQFDFKRLPGGRINCPWKVPPRAITEANVADRAALLLDQYRKKSRLFRSNVLLVPLGDDFRYDKPQEWDAQFFNYQRLFDFLNSKPEFHVQAQFGTLSEYFDALYKRTGVEPGARPPGFPVLSGDFFSYADREDHYWTGYYTSRPFYKSLDRVLEAHLRGAEIKLAHARRSGLAGQYPLSDFALLTEARRTLGLFQHHDAITGTAKEAVVVDYGVRLLRSLVSLKQVIINAAHYLVLGDQETYSFDPGTPFLQMDDSRVSHDALPERTVIRLDSSPRFVVVFNPLEQERLSVVSLLVNSPRVRVLSEEGQPLSVQISVHWSSATDMVPDVYQVSVPVRLPGLGLGVLQLQPDLDGPYTLQSSVRVYLNGVKLSVSRQSAFPVRVVDSGASDFAISNRYMQVWFSGLTGLLKSIRRVDEEQEQQMELEFLVYGTRTSKDKSGAYLFLPDSEAKPYVPKKPPVLRVTEGPFFSEVAVYYEHFHQVIRLYNLPGVEGLSLDMSFQVDIRDYVNKELALRIHTDIDSQGTFFTDLNGFQIQPRQYLKKLPLQANFYPMPVMAYIQDSQRRLTLHTAQALGVSSLGNGQLEVILDRRLMQDDNRGLGQGLKDNKITCNRFRLLLERRTTMSPEVHQEQERSTSYPSLLSHLTSMYLSTPPLVLPVAKRQGTSPALRSFHPLDLPCDFHLLNLRMLPAEDTLPATDSALILHRKGFDCGLEAKNLGFNCTTSQGKLALGSLFHGLDVTFLQPTSLTLLYPLDSNSTDISLEPMEISTFRLRLG

SEQ ID NO: 937 - DNA, 38356 bp, Homo sapiens
  misc_feature (1)...(38356): n = A,T,C or G
atcaccacgggtcccgcatacacagaggttacactgcatggcacagtgtgaagtgcttgaccaccgtggtggtgtttagtcctcgaggccccccattgcgggtagtacccccttatagtgccgaagggtagaggctgccccaggtcacacgtccgggtctgctggccttggaggccaagctcttctcccatcatccctggggggccctggggaggcgggcctggccacgtagatcctgagcagcagtgccctccaggatcctgaagcagtacagccaccccaacatcgtgcgtctcattggtgtctgcacccagaagcagcccatctacatcgtcatggagcttgtgcagggtgagcgcggggcgctgagctccaggtagggcgcgcagcctggtcaggtggcagccttacctcaggaggctcagcaggggtcctccccacctgcagggggcgacttcctgaccttcctccgcacggagggggcccgcctgcgggtgaagactctgctgcagatggtgggggatgcagctgctggcatggagtacctggagagcaagtgctgcatccaccggtgagtgggcggtggccacgggccctgccaacacccccgaccagagtcaagaggtacctatacccctagggccccccgctggaccatcaggcatcagctccagagggggagttggcctctgtggtagacaggggtgcccagggccgggagcagcttttgtccttggctttcctagagtgttcagccagggctgggcaggcgactgttggccaaatgagcccctgccctgtctcacccagggacctggctgctcggaactgcctggtgacagagaagaatgtcctgaagatcagtgactttgggatgtcccgagaggaagccgatggggtctatgcagcctcagggggcctcagacaagtccccgtgaagtggaccgcacctgaggcccttaactacggtacctagtccctgtctaccctggactccatggccagaggccaggcctgggtcctgccggctgcctcgccctggccccagggagggtgcactcacgctgcctcacctcctcgcctcctctgcaggccgctactcctccgaaagcgacgtgtggagctttggcatcttgctctgggagaccttcagcctgggggcctccccctatcccaacctcagcaatcagcagacacgggagtttgtggagaagggtaagcaccctgtgatgacagcagcctcaggctgcaccctcttccagatgctccagccggactcttctaactcccttaatgccaaccttcccaccaggcagaataagaataacctggccagttgctcacgcctgtcatcccagcactttgggaggctgagctgggtggatcacttgagcccaggagttcaagatcagcttggacaacacagtgaaactccatctgtacaaaaaatacaaaaatagactgggcacggtggctcacacctgtaatcccagcactttgggaggccgaggcaggtggatcacctgtggtcaggagtttgagaccagccagaccaacatggtgaaaccccatctctactaaaaatacaaaaattagccaggcatggtggcacgtgcctgtaatcccagctacttgggaggctgaggtgggagaattgcttgaacccaggaggcggaggctgcagtgagccgagattgtgccactgcactccagcctgggcgacaagagtgaaactccatctcaaaaaaaaccaaaaaacaaaaaatacaaaaattagctgggtgtggtgacatgcgcctgtagtccctgctactcgggaggctgaggtgggaggatcactggagcccgggaggtggaggttgcagtgagctgagatcatgccactgcaccccaacctgggtgacagagagagagagagaccttgactcgaaaaagaaaaaaacctgggcgcagtggctcacgcctgtaatttcaacattttgggaggctgaggaaggtggatcacttgagtctaggagtttgacactagcctggccaacatggcaaaacctgtctctactaaaaatacaaaaaattagcgaggtgtagtggtgcaagcctgtaatcccagctacttgggaggctgaggcacaagaatcgcttgaacctgggaggtggaggttgcagtgagctgagatcacaccactgcattccagcgtgggtgacagagcaagactccatctcagaaaaagaaaaaaaaaaatagaatatccctgtagctactactgagtgagcacctggtctgtgctaggtcacatgttatttcatttgctcatcactacatgtgtggtagggattaatatgtccctttctcagatggaaaaacaggctggcagaggggacacagctagcacgtggtaggattaggatcagaagccaggcctctttgtcctttgggcccttggtggagaacagtgcatccttcagaacagtgcatcttaagcagctcctatggctcatggtatcccccagagtctgccgaggaccctcaaactccctcctcatgcctggtgtgctgtgcctctcctcacagggggccgtctgccctgcccagagctgtgtcctgatgccgtgttcaggctcatggagcagtgctgggcctatgagcctgggcagcggcccagcttcagcaccatctaccaggagctgcagagcatccgaaagcggcatcggtgaggctgggacccccttctcaagctggtggcctctgcaggcctaggtgcagctcctcagcggctccagctcatatgctgacagctcttcacagtcctggactcctgccaccagcatccacactgccggcaggatgcagcgccgtgtcctctctgtgtccctgctgctgccagggcttcctcttccgggcagaaacaataaaaccacttgtgcccactgaacactcctggcatgtgcactcctctggaaggcaggtctcagaaggcacaagtgccggtatggtggccttggggaaggaggaggacaggcagtatgcatggggcagagctgacatgatttagtagcagctggatgtgagacatgcggaaggcgggggagagatcaggatgatatacaggctatggccagatggcggtgtcatcccctgaaataggattataggaagaggatcagagcttcgaggaggatgttgagtttagagatgttgcattttattggagataaaagtgtgggtgaagccaggtgtggtggtagacacctgtagtcccaggtacttgggaggccaaggcatgtggattgcttgagcctagtttgagaccagcctgggcaacatggcaaaactccatctttacaaaaacaaaaaacaaaaaacaaaaaaccaagaaaattagccaggcgtggtggcacacacctatagtcccagctactcagaaggctgaggtaggaggatcaattgagcctcggaggtcgaggctgcagtgagctgtgatcacaccactgcattccagcctgggcaacaaagcgaggccctgtctcaaaaataagtaaataaaaataataaataattaatttaaaatgtagatgaataggtctggaagcccagatggagatgaaggctggcaatagatgtgtgaatcattggcttatgaatattagagagtagctgacactatggatgcgtataacactcgcataaaattcaggaggagatgagaagagagttccactcaaagaagactgatgtggctgatgaggaagaaaatgcttttgagggagttgtttctcaagatgaatttattgaggaataagatggcagactggggagccttcacctcctcccctaagtcccagtgaaacctaaaaagtcatctgaaatattaacatcaccaaaagcgaagtttgagaagataaggaagtatgaacataactaaaaaacaaagtgggaaacatttgtaatacagaacagggcaatgaaaaccttgaagtaaaatggccatccctcaagaaagttcaggaaatagttaacatcagctgggtgcagtggctcacacctataatcccagcactttggaaggctgaggcaggtggatcacctgaggtcaggagctcgagaccagtctggccaacatagtgaaactccgtctctgctaaaaatacaaaaaaaattagccaggcgtggtggtgtgcacctgtaatcccagctactctggaggctgagaagggagaattccttgaaccggggagatgaaggttggagtgagcagagaccgcgccattgcactccagcctgggcaacaagagcgaagaacaaaactatgtctcaaaaaaacaaaacacagcaaacaaaaatctattttgaaagagatgagagtgagccatataacttgtttaaacaaaaggaagttgtgttgtcgtgtaattaaatgaaaatactaggaagtgaaataatacctccaatggaaatggtagaaagcagaactgaaaaacttctgctaggtaggatatggtaggtctctgcacgccaccactcccattgcaaccgctagggaaaaaacagctaagatgaaaatgtctttttttttcttttttttttttttttgagatggagtctcgcgctgttgcacaggctggagtgcagtggcgcgatctcagttcactgcaacctctgcctctcgggttcaagcgattctcctgcctcagcctcctgagtagctgggattacaggcacgcatcactacgagcggctaatttttgtaattttagtagagacggggtttcaacatgttggtcaggctggtctcaaactcctgacctcaagtgacccgcccacctcggcctcccaaagtgttgggattacaggcatgagccaccacgcctggccgaaatgtcttatttttaaaaagaatgaagagtggtcacagaaataaagactgaatggactaaaatttcaaggagggaagagcccttccgagttgaactagtgataggcagctattttcttccctgaaacatttgcccatttgggacatgaggatcagacttggcccaagcagagagactctactggggaagagagaaaggaacagtttttggtagttgcaaggacttgctatggattaggacctagaggagcacaaaatgtagagtgttttccccatgggacatttgctgagttctgaggcagtgcaggagactgagaaggcaagtcccacagtcttgcagtgtttagagaggaggcctggagtgaacaaatagctggtctccccaacataaggtatttgccaggttttgcgcctgtgtgggttgggaagctaaagggctccctttaaatctctgaagagcagaactttaagatctgagagagacagagactgactaggctttcaatccaaaatccaagagggccattcctaaggaacaaggacaaccaggaggggattgaattttactgcaattccaacactgccccaacccagttcagtacgtaattgcatcgaagtgactagctcctgtagggaataacaagatttgaagcccctatccttcttttatacccaatatgtgacatacaattaaaaatcataaaccatgcaaaaaatggagaaatatgggtctaatacataaaagaaaaaataaataaaagcagacccacatgtgatccaggcattggaactggcaaagatttttaaataacttggttaatatgtcaaatagagaagaagatggacaaaaaagaagcaaatgtagagaatgtcaacagagttggaatctattaaaagaggatgaaaggaggctattgaactgaaaaatacccctgaaattacaaactcattggatggatttcataaacattgatagaagtaaaggataaaatcacaatcgaatttagaaattaagtcatatcagaaaacagaattagtgaacttaataggttaaaaggaggtacctaaactgaagtacagagaggaaaaaagagaatggaagctaagaaacatgggactatatgaataattcaagttacagaagaagtggagagagaaattaggtccagaacaactggaaaatgacccaaacgtatatacagcaataaaaacaaacaaacaaaacaccactaatatatgcaccgacattgatgaatgtcaaagacgtggttgggcacagtggctcatgcctgtaaccccagcactttgggaggccaaggtgggcaaatcacttgatgccaagagttgaccagcctggccaacatggtgaaaccccgtctctactaaaaatacaaaaattagatgggtgtggtggcacatgcctgtagtcccagctactcaggaggccaaggcatgagaatcacttgaacccaggaggcggaggttgcagtaaactgagatcgcaccactgcactccagcttgggtgacagcaagactgtctcaaaaaaaaaaaaaaaaagtcatactgagtaaagaagccagacatgaaaagagttcatacttatgattctattttatgaagttcaagaacaggcaaaactaagttacagagaagtcaaagcagtgcttatgtctggagggtcctgatggaaaggcgtgtgaagatggaggggaaaaggttcaccatggtgcccttacaaccatgtgtgtctctacatgggccacataggcaaggctggaccacagtctgacagccactatggtgtgcttagggactgcttggccacttaacacgggaacattttgggtagatgggaatgtcctgcattttgatctgggtggtgattatgcttgtgtatgtatttatcaaaacccatcaagctgtacacttaagatttgtgccacacagtgtaaactgtacctaaatttttaaaaaagaaccaccagacaacaaacaagaattcttgaaaattgagattatcaggctgggcgcggtggctcatgcctgtaatcccagcactttgggaggctgaggtgggcagatcacctgaggttgggagttcgagacgagcccaaccaacatggagaaaccctatccctactaaaaataccaaattagccaggcgtggtggcagatgcctgtaatcccagctactcaggaggctgaggcaagagaatcactcgaatccagaggcagaggttgtggtgagtggagatcacgccattgcactccagcctgggcaacaagagcagaactccctctcaaaacgaaggaaaaaagaagattatcaccaaaatgaggctgagcacggtggctcacgcctgtaatcccaacactttgggaggccgaggtgggcaaatcacctgaggtcaggagttcaagaccagcctggccaacatggtgaaaccccatctctactaaaaatacaaaaattagctgggcatggtggtgcgcgcttctaatcccagctactcgggaggctgaagcacaagaatcacttgaacctgggaagcagaggttgcagtgagctgagatcacgccaccactcttcagcctgagcgacagagtgagactttgtctcaaaaaaaaaaaaaaaaaaaaaaaaattaccaaaatggaaaattcaatagaagggctggaaaataaatctcccagaacacaaggcaaaatatgaaaagacaaagaggatgatgagcccagtctaggtctaacaccctaataacaggcattccagtgagtaaacaaacctggaaagctgttcctgatggtgataaaagaagtggcagtcgagtgcagtggcttatccctgtaatcacagcactttgggaagctgaggcaggaggatcaaggccaggagttcgaggctgcagtgaaccatgatcacaccactgcactccagcctgggtgacagacaagagcttgtcaaaaacaataaaaaaataaaaagagctgggcactatggctcatatctgtaatcctggaactttggaaggccaaagtggggggatcgcttgagcccaggagttggagaacagcctgggcaacacagtgagaccctcccacccaccacaaaaaataaaaaaattagggccgggcacagtgactcacgcctgtaatcccagcactttgggaggctgaggcaggtggatcacctgaggtcaggagttcgagaccagcctggacaacatggtaaaaccccgtctctactaaaaacacaaaattagccaggtatggtggcacgtgcctgtagtcccagctatttgggaggctgaggcaggagaatcgcttgaacctgggaggcggaggttgcagtgagccaagatcgcgccattgcactccagcctgggcaacaagaacgaaactccgtctcaaaaaataaaaataaaaaaattaaaaaataaaaaaattagctgggtgtagtggcacatacctgtaaggctcagctactcaggaggctgaagtgggaggatggcttgagtctggaaggtcaaagatgcagtgagctgagatggtgccactgcactccagcctgggaaacagtgagatattgtctcaaaaaaaagaaatggtcgttaaataagagagagcattgatcattctcagcaaactaacacaggaacagaaaaccaaacaccgcatgttctcactaataagtgggagttaacaatgaaaacacatggacacagagaggggaacatcacacaccggggcctgtcgggggttgggggcaaggtgagggagagcacctaatgtatgtggggcttaaaacctagatgatgggttgatgggtgcagcaaaccaccatggcacatgtatacctatgtaacaaatctgcatgttctgcacatgtatcccagaacttaaaggaaaatttttaaaaatgagatggcattatatatctcattaatcagctaaaacattgtttaagcaatatccagcagtttgttattgatggtgtaaactggtacagtcttttgggggagcgatagtgtcatcagtcatctctgtccttatcttttgcccgggtaacttcactgttgcaaattcatcataaaataacgtcttaatctgttcgggctgttaggacaaaataccataaagtaggtagtttatcaacaacagaaatgtattttctcacagttctggaggctggaaagtccatgataaggcataagcggattcagtgtcgggtgagggcctgcctgtggtgcacagatagtgccttctagctgtgttctcacgtggttgaaggggccgactctcggggtcatttgataccggcactaatcccattcatgagagctctcccttcaaactctgttcacccccaaaggcccatctcctaataccatcatcaccttgagggattaggatttgaacatgaatttggggggtcacattcagataatgttatatataacttaaaaagaacaaaaatgtggaattcatggagatgttcattgcagtatggattacactgaaaaactgtaaacaacctagatgcccagtaaaagggaaacagccaagaaaagtctgtgtcttgttcactcgctggcaggaaacatagagcaggcacggaaaggaaagggactcgaggaatgcgctgtaccgacaggaggcagcacccctttgcccgaggggcgcaacgacagagacctaaggctacctgggccggagccgggtgaggccgcggagaacgcaccccgctacgcgtctgccgagacggaggcgggcgtttcgaccactgcccgatcatgcgcttactcaagtaggattccgaaaaaattcagtcgcgcgtccctcctgaggttccgcagctggccaggcccggcccgggctggtgcggctgcgcactgcagcccagcggacgggcccgggaggagccgggcggggaccgcggcggccagagctcctgtcagctccgccgggcacacgcaggccggggcgggcggcgcggctgtccccgccccgcacgctgctgggcccggcagcttcagaggctggcggacccgcgcggggccggcgcagcggagcgcgccggctgcccggggcccagcgggagcgcggcagcggcgcgcggagcagggggctacgggtgggcgggcgcccgccttcgcctgcgtcgctgcctgcacgcgggccgccgtccccgggcgtgtgagagccggcagctcggccgactgggcccggagcggcgcggaggccgggcgctgacggtaacgggccgggtgcgcgcgcgggagggctccggctgccccgacagaggccgggctcgggcggcgggagtgcgagcgccactgcggcgtcagaggggccaggaagggacaggaggctgcctgaggcccgtacctggcgcctgtctctgcggtccccggggccgacgaagtcggagcgggtggggagggagccgggcgggcggccagagacctggcggcaggtgcctgccctctgtgatccaactctctccccagctccacccacactggcctagacccagtctctaagggctgaaaatattgcccggaagctcccgagcagaatcagatcgcgctaagtagggcacaacgcagaggcgacaaagctcctcggccccagggcccgcggagcagactccggagcgcggtcccgcccacgctcggctccgcagttagcgtcctccttcctcctgagcaggcaagcggagcccgagggcggtggcggcggggggcacgggtcccctgaagttgcctcgcagctgagcactgggccccgtctctcccttcccagggggccttcggcgtcactgcaggcttcctaggggtcccctaagtgctctgcaaaccgcggctggaagtttcccactgcagtgaacagtagagaaacagggagaacacacagggcttgctttatgctagaaacacaagcatctttcttctttattagaaagaaactcattctgtgtttctgagaaaggatcgtgccaggcactgtttctggtgagtgccagtttgacccgaaagggcactgagaaaggctttcctatcagtctctttgggttctggctaaacttttaaatcaaacaaaatagagactagcttattcacctgaaactagaagcacatggccgaggagcctgaacaggcacctcctatctaggcagggaagctgtgtaatcaggagcttgtgtggtgcgctccagtcggagctgggactcttatcctgggcccgtttttcatagcaccagccaaaggagagcgtcctctccaccctagcggcagagctgctaccaggaccaggtgggccagcctcagatgtgctgcttgtgctacttggagccaggcaaatgggtgttcctttggaacagccctcaggaactcactggggtatttggtggaaagactgccacgggcattttgcatgttggagctacagatggtgtccttcctgccaggtgtgtgtggaggccagtatgaagctgaaaaagcaggtgacagtgtgtggggctgccatcttctgtgtggcagtcttctcgctctacctcatgctggaccgagtgcaacacgatcccacccgacaccagaatggtgggaacttcccccgggtgagtcgtgcctggttgctaatttctttgtatacaagtcacctgggctcagggtatgcacctcccaccccgccgcctcccctcccaccccccgctggagggtaatgtcagtacaggacaggagccttccttcccaatagtcaggttttgtagaaaccctcagctaaaaacagtgatggcgaaaagaaggaaggaagaaaaaaatgtcaatggcaatgagtattgtcactctgttctcctgaattcttttctttctttttttttttttgagacagagtctcgctctgtcgcccagccttgagtgcagtggcgcgatcttggctcactgcaacctccgcctcccaggttcaagcaattctcctgcctcagcctcccaagtagctgggactacaggagcctgccaccatgcccgactaatttttgtatttttagtagagacgagacgaggtatcgccatgttggccaggctggtcttgaactcctgacctcaggtgatccacccaccttggcctcccaaagtgctgggattacaggtgtgggccaccgcgcccagcccctcctgaattcttggcagacattgctaattgattgcagcattctttgccattaagccccgctgaaatcctcagcacaggcaacaccgattgttgagaataggtaggtgaaaggaaatctttgccatccctgagctagagagtgatggttctcccaacccaagtggagtgtagtcctcagtggtgatctgcacagctccctttatctgaacggtgtcatctatccctctaggctcatggtctggctttgactgatgagggaagaattgtactcaggcctcagctggtagaccccaagcagagaccctccctgtggcataaggagctgtgtgtgattgctttctggttttttggcagagccaaatttctgtgctgcagaaccgcattgagcagctggagcagcttttggaggagaaccatgagattatcagccatatcaaggactccgtgctggagctgacagccaacgcagagggcccgcccgccatgctgccctactacacggtcaatggctcctgggtggtgccaccggagccccggcccagcttcttctccatctccccgcaggactgccagtttgctttggggggccggggtcagaagccagagctgcaggtaagagtcagagctggcagggacgtacagtggccacgactggggtactgagctgcagttcacctggcagatgctcactgtgtcggaggagctgccgtttgacaacgtggatggtggtgtgtggaggcaaggcttcgacatctcctacgacccgcacgactgggatgctgaagacctgcaggtgtttgtggtgccccactctcacaatgacccaggtgagggccctgcagactcctgggagctggagtgtggagtgggatttctgatggccaatacaagggagggacgtcgaagaagatggtggcatcctcaggggaccctacattggctccctaggctggatcaagacctttgacaagtactacacagagcagacccaacacatcctcaatagcatggtgtctaagctgcaggaggacccccggcggcgcttcctctgggcagaggtctccttcttcgccaagtggtgggacaacatcaatgtccaaaagagagcggcagtccgaaggccagtaccaggcggggaggcatgggagggcattgtctgagccccaggctgggtggacgggtcttaccttaagctatgggtgccaaggtggcagggagaggcccagagagctgtggaagagatgagtgatggtggagggagggaaggcaaaaacagataggttccgagataagcggggccaggatagcctggaggttggctgtaaggaaaggagggcaagtgtgtgttctcttggtcctgggattgggagaactggtccagtgaggccagtgcacacaggccctgacatttgctggttggcaggactgggcagagtgtcctgctccgtcctgagtgtgagtccttaactataggctggtgggaaacgggcagctggagattgcgacaggaggctgggtgatgccagatgaggccaattcccactactttgcattgattgaccagctcatcgaaggacaccagtggctggagagaaatcttggtaagtccaggcccaggcatgggggtctgccccctgggctgtaaggcacaggcaggggctgtaaggcacagggatcggcagggggtggttcctttctaggcagatcccaccatgtgggcctggtgtgatatcatctctccactcactaccaggacaagagctggggtcccagcacctggaaggccggggggccagcccctgaggtgtgttcagggcctctctggcttccatgccctgcccaggtgcaaccccccgctctggctgggcagtggacccctttggatacagctccaccatgccttacctgctgcgccgtgccaacctcaccagcatgctgattcagagagtgcactatgccatcaagaagcactttgctgccacccacagcctagagttcatgtggaggcagacatggggtaaggccgggtagggtagagggggttactgcagcatagtcttcactggggaacagcagggatatcagaactaagacccccactgttcttcagagcagacctgcaggcactggtgtggactgccagaaatggtcgcaccctctggttaggggagggccatattgacctctggcctctacagggcctgctgtcccaagggcttcagcgtgccctgtgtgcccgtcccctgagggagcccctcatgtctttctccctggcctacacactctctccagccctaggtccagttacagcctcacggtctatcagggctgcctttagcctgaacagatccttgcccccctggcgtccagaggctgcctgctggtggtgaccacgtggtgtgtctcctgcagactcggactccagcacagacatcttctgtcacatgatgcccttctacagctatgacgtcccccatacctgtggcccagatcccaagatctgctgccaatttgatttcaaacgcctgcctggtgggcgcatcaactgcccttggaaggtgccaccccgggccatcacagaggccaacgtggcagagaggtatctgcttccagccctttcacttcacagaggaatcgggaggcctggctctggtctgggccgtgccacgtggagggtgggctcaggtggtgagttgaggctcctagcctctgcagcagcagctccttactaagtctcctgaaaaactggaatggctcttgcaaccacctttcacagaatgcttttaggttctcacatgagtacttcttgatgccctaacaaactgccagggccagctgacaacttagaggtgaaggattcccaggttagatgtatgttacaaacttcaggctcatgtgccttcacttagtgccagtgttctgacttggctttaagtcaaccacgagaatcctgttcagatccacattcagtcccacgagatagcctccagcctctgagaaaacagacctgtcccttttgagagaatttagggacccctaaagatagcactcttgctgaaatcaggccccgggggaaagtgttaggtaagagttgatccaaacagcaatttagtcagaaccttaagaatacgacaagttggattggtttttatgttgcaatgctctgatttctccctgatgtccaagagttgaaacgtgaccaaaagggaaataaagtggtcttttgtttccagaagtctaaatggcgattccaggcaagaatctagggctatgagggcgtgacttttcttaaagcagcagttgtgatcagtgaggctggcctaggtttacaagaacaggccctgaaaggtaaccattttctcctttgaaaagcttactagactgataagttaggggaaagtggtatttgaggaatcctctcatgagaacagagtagaaaagtacaagctgggccagcgccgctaagtagattagttgactctttggactgtgatatttataacatgccaattaaagtaggaaagggcttctgctgatgtgccacagggctgtttttctactgattttgccaataatttggatgaaaagaaaagaaatgtttatatatagttcccattatgtaccaggcactattctaagtgtttaacaaatattcattcattgattttattttatttatttaatttaattttttttttttttgagatggagtctgtcacccaggctggagtgcggtggtgcaatttcggctcaccgcaacctccgcctcctgggttcaagtgattatcctgcctcagcctcctgagtagctgggattacagatgtgcaccaccacacccggctaatttttgtatttttagtagagacagggtttcaccatattggccaggctggtcttgaattcctgacctcaggtgatctgcctgccccggtctcccaaagtgctgggattacaggtgtgagccactgcgctcggcctattcaatccattttaattctcataacattatatgggtacctacggatgttatccttattttgctagaaatggaggctcagagaggttacttgcccacagtcactgagctagtacttgtggagctggtgtgatatggctccggggtccagacccttcactttggtgctgcatcgctaactggtgggcaaaatgaggcgggagtgtcagaaccaggatcccaaaagatctcaacagcctagcataaaaaataacatgtcagctgtcagaactgcccagagagcaccggactcccctggggctgggattcatgtgcaggaggtgtctgtttgcgctgaaccactccttggtggatgggatgtcttctaggggcttgctggcgggatggctgtgcgtggtgctcttttactgatgagacttcgtggtgggcccatgttttttttcctgccccagggcagccctgcttctggaccaataccggaagaagtcccagctgttccgaagcaacgtcctcctggtgcctcttggagatgacttccgatatgacaagccccaggagtgggatgcccagttcttcaactaccaacggctctttgacttcttcaacagcaggcctaacctccatgtgcaggtgtgaggggcacttgactggggaggggcctcacagtgctgcagcccatcccttcccgtgagaccgtgccctgggttcccaactcgggcagggtgccccccttttttttttttttttgagatggagtctcgctctgttgcccaggctggagttcagtggcgcgatcttggctcactgccagctccgcctcccgggttcacgccagtctcctgcctcagctgcccaagtagctgggactacaggtgcctgccatcacacccagctaattttttgtagttttagtagagatggggtttcactgtgttagccagggtggtctcgatctcctgacttcgtgatccactcgcctcggcctcccaaagtgctgggattacaggcgtgagccaccgcgcccagccgaaggtgccccttttatgtcagaattaattcccaggctcccctacttctgttaagtctagaatggcaggatgtacagttcctgcttctgaggccagagcccctgcctcacccccaactgcagcactgtggccacaatttgcaggaggctctagaactgatgggagtgggtttttggggttcccacaggcccagtttggcactctttctgactattttgatgccctgtacaagaggacaggggtggagccaggggcccggcctccagggtttcctgtgctgagcggggatttcttctcctatgcggaccgggaggatcattactggacaggctattacacttcccggcccttctacaagagcttagaccgagtcctggaagcccacctgcggtgagaccctgtccccgcttccaggctggagggggagagtcagcctttggggtttaaggaggggctggattggctcagaagggaatagataggcccagaggccagggcaggtagaggaggggtgggaaggaaggaggctgcactggcagagtgtgggtgggccctggctagtggtgcaggctggcagctaacttctctctctgggcaggggggcagaggttctgtacagcctggctgcagctcacgctcgccgctctggtctggctggccggtacccactgtctgatttcaccctcctgacggaagctcggcgcacattggggctcttccagcatcacgatgccatcactggcacggccaaggaggctgtggtggtggactatggggtcaggtgggagccttctcttttcccttgtaagctcccctgctcactgtcccaaagaaaggacattgggtggtcagggggtaggccggcctagggcttgtcctgctgacaaggcagacagcttccctatggtcatcttctctccttccctctcctgcgccacccacaggcttctgcgctcccttgtcaacctgaagcaggtcatcattcatgcagcccactatctggtgctgggggacaaggagacctaccactttgaccctgaggcgcccttcctccaagtggtgagcccctcctgggtctgcatggggaccctctggtgtgtgcaggtcccatcccaagagctgctggatgggggtgccgcttctctttttccttccccatccggatgagttctgtgcccagtgcagccgctggtccacacctgggacaggtggggtgggaggaggctgagcccatgatggttcttcccttccggctcactgaattccaggatgacactcgcttaagtcacgacgccctcccagagcgcacggtgatccagctggattcctcgcccaggtaacctggactacgccatgtgcagagaggcagagccattccctggctctcaggcccctctgccccagcatgtgctgaaccagtgcagggcgcttgccctggtcggaagcagcagcctcctgggtcagcccaccttctacgcacaggtttgtggtcctattcaacccactggaacaggagcgattcagcatggtgtccctgctggtcaactctccccgcgtgcgtgtcctttcggaggagggtcagcccctggccgtgcagatcagcgcacactggagctctgccaccgaggcggtccctgacgtctaccaggtgaggtgtgggcttgtcaggtgggcctggccctctgcccgtcgtgggcccctccccgcccggcgacgccagcctcccaccctcctgcttgtggccctgctactctccaggctgaggacaagtgtcctggggagggggttgtccagaagacaggcactcttgggatttgagcgtgtccttgaaaagaaggggaaggttggtatggtaatagtaatggtaaaaatagcagttataatgccccatcattcagtcattcaatgtttatcgaaagcttaatgtgttgttaccgcttcatactttttcaaatatcacttgagaatcataaagtctgatgaggaagaaagggcaaatcagatcacctccactttggaggaggggcagaggcccagcgggtgcaggggcttgctcaagccctctgttagtaagcggatgcctcagcacccctgtggcgaaagccgtgcccccacttcctcacccctcctgtgcccacaggtgtctgtgcctgtccgcctgccagccctgggcctgggcgtgctgcagctacagctgggcctggatgggcaccgcacgctgccctcctctgtgcgcatctacctgcacggccggcagctgtccgtcagcaggcacgaagcgtttcctctccgtgtcattgactctggcaccagcgacttcgccctcagcaaccgctacatgcaggtctggttctcaggccttactgggctcctcaaggtaaaaggccagggtggtggggaagggccaggggccagagtagggcgtgtgtggtggtggcactgtgcagagcggcctcccggccctgtgagcattctgccacctgacccacagtggaccggggcctgggccatctcagctccagcctgacagcatggggaagcagggcacggctccttggggaagctattccgtgtcctcccaggaggcaggcctgacatgctggtgtggggccaggggtcagggctgtgttttttggcagagcatccgaagggtggatgaggagcacgagcagcaggtggacatgcaggtccttgtctatggcacccgtacgtccaaagacaagagtggagcctacctcttcctgcccgatggcgaggccaaggtatcctaaagatgccttgaacaacctggcagggagggcaggagggggcacaggccttcccacaggtttattgctgcctgccaggggccttgtctttcctgttcagcccaggggtgtctgggaataggtgctctcttgcccagccctgggctggcaccttcctgctttgccctctgtgctgtagtttcaacagcaatctgctctttccctagccctacgtccccaaggagccccccgtgctgcgtgtcactgaaggccctttcttctcagaggtggttgcgtactatgagcacattcaccaggcggtccggctttacaatctgccaggtgagccctgcatatgaggaagggtctggaaggaggtgtgggctccacaactgtggcgtattcttccttctgctgcttctctgttcatacctctgttccgtatcatttgagacagggatgctccattctcttggagaaaaagtcatccagaaatgccctggggatttcttgggaggttggacagagcctctccccagctcggctctgatcccccagcccagcctcttagctgtgcttcagcctcacacctgtccatgcccccactttgttcctgtacccaggggtggaggggctgtctctggacatatcatccctggtggacatccgggactacgtcaacaaggagctggccctgcacatccatacagacatcgacagccagggtatcttcttcacagacctcaatggctttcaggtgactcctgggcctgggtctcggagaccccacagagtagaacttggactctgcttttgcccctgtcacaggccctgggggatgatctgccctgatggagaaagatgaatgagaggcgaagagttatcggggactccttcagtctggggaccgcttgggcccacatggtgcccgggtgcccttgatctgctggccttgcccccacaggtgcagccccgacggtatctgaagaagctccccctccaggccaacttctaccccatgccagtcatggcctatatccaggacgcacagaagcgcctcacgctgcacactgcccaggccctgggtgtctctagcctcaaagatggtgagtagggcccaggagttctgcagagggtatcagacaaaaagaagcccgtccccaccctcaagggctccccgctctgttggcctcccttgcctctttctggactgcatcacctccatgcttggagagggggcaagccattcagagctcttggcacaggaggcaggcatctgctgtccccatcccctggtggaggcagcagtgtaggcaactgggtggagtgtcctactggatcccctgaagaaccgtcagggttacaactcttggggccaaagaaaggaaaaaaaatgtcaaaaagcaaagctaggcacagtggttcactcctgtaatcccagcactgttgggaggccaaggcagaaggccaggagtttgagaccagcctgggcaacaaagcgagacccaggctctacaaaaagatttaaaaattagctggatttggtggcacgtgcctatagtcccagctactcaggagactgagatgggaggattgcttgagcccaggagctggaggctgcagtaagccaagactgtgccactgcactacagcctggtgacagagcaagacccagtctgaaaaaaaaggcaagaagcatcagggtattgaacagtggttctcagctgaggtgtgcaaccctcttctgggcggggctgagagtagggacagcttgtaaagtgcactcagtgttatgaaatattaaggaaatgagaaaattacatactgttttccttccagtgatcattaaaagacagactgacgttctttttttttgtttttttgttttgagacggagtttcactctttcgcccaggctggagtgcagtggtgcaatctccgctcactgcaacctccgccttccgatttgaagcgattctcttgcttcagcctcctgagtagctgggattacaggcgcccgccaccatgcgcagctagtttttctatttttagtagagatggggtttcaccatgttggccaggctggtctggaactcctgaccttgtgatctgcctgcctcggtctcccaaagtgctgggattataggtgtgagccaacacgcccggccaagactgacgttcttaagaatcaagacgggcatggggagcactggcctggagtcagacccgggtagctggtcacgctggcagctctgtgtggcccccatatcctcagggcaaaacgaacagtttgcacttggtggcatctgaggcccttgagatctgtctctgggaagagcccttgtgaagggctgagccgagagcacccagtcaaggctaggcgtggcccaatggctggcaagttcgggggcctgactccctgctgggaggagtgtgcctttctctgccaggagcagcccctggtccatctgtgtcatgactcctaactgcagcccaatatccctcactggatcttctcctctccccctctgggatatggtatttgaaaaaatgactgtcttctatacaagggatccgttttagggttttcagacatctttctgtgattgttctgggttaaaagactgagcaactacacaagtcagtaaggactggagaggtgaaagggagaataaggccatctgtcccggtggaatgtaggggcagctggtgtggtttccctcgagatcttgtacaagaacagctgcacccacctccaacacctgcacacactggggcctctgtccccaacacatcagccatgcaccgagcccctgctccaagcatactctagaaaacagagcaaaggtggtcacttgccatatcttttttccagggcaacccagatgacacttaatatgagcctctgcctgacttgccatctggctgtcctttccagagccctacttttaacacacagacagtcagagcttgagtctgacctgctggggctgtctggctgtccagtgtagaacaagggcaggagagcctgtgttttagtcacaacctgcccaacctgagcaaacctgccccagattacggaggtgtgcagcaacactaccgatggctgttgatctaagtttttcatttctggtttattttgttgtatgtaacccgtcctgattcggtttcctgcctgggcccctaggcccgttccctactcctgagtcccagagcgtggggggtaaactgccagggccagccttcccctttctggacctcatgcttcctcatctgcaaaataacggcccaggacgagcccctcatcaggttccctcccagccgtgggaacccgtgacctctcctgagtgactcagcttctgtctctcgagctgcgcttttccgtcagggcctgtggcttgggattctcctttgaaaggtcagtgcctgcttgggggtgggggcgggccagcactcactgtttgcttccccaggccagctggaggtgatcttggaccggcggctgatgcaggatgacaaccggggcctaggccaagggctcaaggacaacaagagaacctgcaaccgtttccgcctcctgctagagcggcgaaccgtgggcagtgaggtaacatctggggctgacgcccagggagccaggtctggctagtccctgggggtggccggggggtccagcctagggctcgaggagcgtagttggaggtgggcaagagagagagagtagggctgaattcctggggtggggggaggcagtctggcgttttgtgtcccatctcacgcagcctggcaccttcctctcccagcagcgctctgtcacctgtgcccctcatgttcgtctcccactttcctctgtgctgccctcctctgccctgtcccagcattctctaagcctgtgctccaaccccgctcatctcatggctttctttgccccaccagcctgactttttctccaaactggcagccatgtttaggggcttgatctttcacagcagcaggagcggtaaccgagaggtaagggtcggctctgggagcggggaactagtacgagcaaggtgtagctgcgccagagcccaggtgacagagcccgccactcagtcactcgtgcatcagatagatattgagcacctgctttactgtgaggacccagagggacataagtgcagacagtgctgactctcccaggagtttactcgtgagtaggggtggcagagaagccatgtgtgtaaaaatgcaaggtagaaagggctttgtctcactgatcctgaggagcaaggtaataatgtgggctaaggagatcgaggtcaaggaggtgtcacccaggtgtggctttgatgaatggggtgtgatttgaagatatgaaccagggcacaggataggaggcaggaaagacaacaggctggggaacagcagtgagttccttagttatgctggagctatgctatccagtacggtggccagtagccctatatggctatttaaattacaactaaatcaagtaaaaaatttgctttcttattcctactgaccacacttcaagtactcaagtggctaagtggctgccgtattagaccatgtggtgtcggatatttccatccttgcagaatgccctcttggctggtgctgggctagagtgctagggggagatcagggcagacggcagagcaccttgagtgcctgctaagggatctggactttatcctggctaggaaaggtccaggctaaggaaagagctgagcaaggagggacaccgtcagaactctggtctcagcatgtcacgctgacagtacggagcaggttggatctgtgggaagggagactggaggagggtgacagcgggaggctgttcaggcaggacatgctggctgcttgaactaggccagaggctggagaagttgccggtggctatgaggacactgcccaggtgcgacggaagagggtttagcattacctgggaatgcagagggaagtgagagatgctgggcgcttggaagaagggggatgccagggacagaagtccagaatattcagcccaggcctgtgagtctgacgtccaggtgagctgctaaggagtagccctgctggcagagccccggccgcgctgggcctgagagccaggctggcactgtggatgtggcatcgctcgtgaagccgcagattacccagagcactctggattggaggtccgtgctccatggtgaggcctgcgtctgcctggctgccatcctccctgcactgtggatccatgtgtgaggggagacatggctgatgggagtgggttgctcatgatagtgttatgtgagcaaggaactaaaaagtagagaagaaacagcttagtgaagtagccctctgcgttaggggagacggcaaatgtccacacttgaagggttagcggaacctcgcctggagccaggcgtgcccttgagtccaggcacaccaggaaaggtctttccaaaacaactgacctgggtgtgcttttatcctgcctcgtcctctcccctcagcctggctttggtccctcaccaatatctcgggtcaattttgcaggtccaagatagccactctaccagctacccatccctcctcagccacctgacctccatgtacctgaacgccccggcgctcgctctgcctgtagccaggatgcagctcccaggccctggtctgcgctcatttcatcctctggcttcctcactgccctgtgacttccacctgctcaacctacgtacgctccaggctgaggtgagtgtccctcagcgtgacatgctgagagcagagttctgatggtgtccctccctgctcagctccttccttagcctccaggatgaggtccagaccccttagcaggtattcggctccaaacctccaggaccaggttttggcctttccttacccacacgcctccctgtgccagcactgcctctgggcagaggcgctgctgcatctccgatctctgaaagccctgcgcccacttccctgggcactgtctgtcatccaggaggacaccctaccctcggcggagaccgcactcatcttacaccgcaagggttttgactgcggcctggaggccaagaacttgggcttcaactgcaccacaagccaaggcaaggtgagtagggtggggaaacagagcacctaggaatggcaggcatgagcttggtaagactgggctgagattcggtgacaggctgggagaagaaagtgtcactccagggctttctggagagaaggggggaagctgtagacatgttttcagagctccggaggcctggcagggggagttccagacaaggtagatcgcttgagaacttttgttccctgagcagggacctctatcaagcaaagtggaaaacaccagaaatagaaaaccagaacccatcctgttgttactttgtaagctcatatcagccggcactgataaatgtccccgggtgccaggtcctctgctgggctccagtgtttcagaagtgaaccaagacatggtcactgttttcacagagctcacagctcagtggaacggttcttacccggagatctgtaggcaggctttagggttgagcaaatctcagcaagcccgtgagactggatgcacactcatgtgtaagaaggcatggtgttgctgagaggggccagccggaactggagtgcagtggcgtgatcgcagctcactgcaacccccgcctcctggttcaagtgatcctcctgcctcagcctcccgagtagctgggattacaggcgcctgcccccacgcccagctaatttttatattgttagtagagacggggtttcgccatgttggccaggctggtctcgaactcctgacctcaggtgatccacccgccttggcctcccaaagtgctgggattacaggtgtgagccactgcccctggctgagattcttaaagaggtaccaaattgtagatgaacagccacattctttagtgtctcggcacctagcacaaccctgccccttctctgctctccacaggtagccctgggcagccttttccatggcctggatgtggtattccttcagccaacctccttgacgttactgtaccctctggcctccccgtccaacagcactgacgtctatttggagcccatggagattgctacctttcgcctccgcttgggttagggcttcttgtggcctgaagagaaagttcattcacagagactgcctcttaacatgaagatcattggacaagccacacgggtatcccatcccgatctgcctcccagaactgtgacacactgggctctgccctcattttctgtttattgctgctgctgtgttttcggcgcaacccacaaacccagtgatgggtaaatagggcagacgccagtgagatcagggagagaaggcccttggtcagagtgggcagtgccaggctctgctttgggttgtgagtggacacccaactgggcacaggctcaggcacccatcctttttccaaacagggatatagaagtggtggaagcagacagaagaggtaagggaggctaagtgggtaacagcccagcatcagggtcactgtggcaacagcaggctctaggggaatcctgtggttatgtagagactccatgtcctggtgtgatgagcaggatcagagtgactctgggaggacaggggtggggacccagagttagcagtggggatggagcagtagaaggaatcactgtttctcctaggagtctgaaggcctcgctgctttctgtgatggctttgcagtaagtgccgcctggcctgcatgcattggctaacaggctgcagaatggcaggaaggactcgctagagattgtcatggccagagatcataggtcacttcaggtagcaagacccctggcaaactgggcacttggcctatgtactgatttgtgggatggtggcaggggtgtggggtccttcaccctgcctgaattctctttggcttctgtgctctgtatgctgctgtccccaagagctctttcttattatggcagggagtggggattggtcctactttctttctctggaaaggaaagcctccaagactccatgtgcttgggcagcttgagaaggcgttcagcaccacgcctagcaggcagaccttgaagcctcacctttagtctatctgcagaggtattcagttcctggcacaggggactaggggcatgtagagtatatgaggaggcagtatggctgtgcaggagccttcatttcagcttcaattaatagggaagaatttatgatagctctatagatgctgaaaaggtatttcgtaagatttaaaatccatcccttattaaaactcttagtaaattaagtctggaaagaaacaccctaatctagataaaggtctgtttcagaaaccaacagtgatggcattctaaagagtcagacgccacaggcattcccattaaagtcagaaactagccaagggcaagctattattcagcagtgtcccggcactactaacccctgcaacaagccagatgaggaacataaggaagaattataattgtcattatttgtagacaataaaactgcctacctgtaaaacctaagaatcaactgaagacctgttaagagtattctgtaagtcaacccaatgatacacatcatgttcctgtccacatactggttttccccaaatcagctgataaattcagtgtaattccaatgagattgaaactttggaattgacagttctaaagtgcatttgggagagtgaatgtgtgagaacactaagaccactctgaacgatgataatgagttggggggtggactgctcgggggtgatcctgccagattcccagaggattctcacgccaccattacctcactcagtgtgacctggagggggtcagacagacgggagagtccagaaacagacccagggctacaggaatttagtatatggtaagagggatgttttaagtggggaaaaaggtggattatttaataaacagcacttttagacaactagctatcaaagctagatctcagctgggtgcgatggctcacgcctgtaatcccggcactttgggaggccaaggtgggtggatcacttgaggtcaggagttcgagaccagcctggccaagatggcgaaaccctgtgtctactaaaaatacaaaaactagccaggaatggtggcgcgcgcctgtaatcccagttacttaggaggctgaggcaggagaatcacatcaacctgggaggcggaggttgcagtgagcttagatcatgccaccatgccactgcactccagcctgggtgacacagccaaaaaaaaaaccactaagttagatctctacctcacagtgtccatacaaattagttccagagggaagatataccacaaaattactcaaaaatttttatacctctggtgtgggacggtcttttctaaactttaacatgagacttaaaagatataataagggaaaagataagcagatttcgcaaccaaaaaatatcgaaagtctctgtgtgatggaaaacatcaaggttaaaacacaaatgacagatatggaagaaaatatttgcagcacataaaaaaatcaacgagtacaattactttaggagaaaagcttgcttcagggtccttagagaaagtcactggggcctgccaagctgccacctaaagacaagagtgagagggctgagttcttccaggtcatcagagttgttgctgcccgtattaggccacacagtggaaccccatttatatcatagcagaagaaataggattatcaatgtgaactgcttagcatggtgcctggtatatacgagagctccacaaatgtgagctataatcctactagtaaaggatgctaagcagttccactgtggcaggtgtcatttgctagtagaatttgtaatcaaacaataggaggggaatctgtgaacgcctagaaaatgagcagaataaaggatattatctttggaagtcttagatgtgcaatgaaattatttgtctgacagaaacgaatgctgaattctatttacttaagcctttaaaatgacttaaggcagtccgggcacggtggctcatgactgtaatcccagcaccttgggaggccaaggtgggtggaccacctgagctcaggagttggagaccagcctggacaacatggcgaaaccccatctctaccaaaaaaatacaaaaatgagccgggcgtggtggtgtgtgcctgtaatcccagctactcggtaggctgaggcaggagaatcacttgaacctaggaggcagaggttgctgtgagccaagattgcgccattgtactccagcctgggtgacagagcgagactctgtctcaaaaacaaaaaaacaaaaaaaaaaaacataaaatgacttaaggcagcatggctcaaggtgtgattcagaatcaccagaactgccattgaaagtacaggtttctgttctgactagggcttcttcagcctggaggctgcagtgcagatgcgtagggcagagccacagctgccctgagactgctgtgtcataggagataggagcaagaaacaaaagctgacttcagtgcacagggggataaaggcagattcctgggtacaacctttgaactggtttctgggagtagaggccaaataatttgcatttttaacaagctcccaggtgattcttgtgcatgcataatttggaaatggcccaacttttaaagcaagcagcaaccctttaccacagagctgtggtactgaggcctcacggtttgtttgtttgttttttttttttttgagacagagtcttgccttgttgcccaggatagagtgcagtggcacaatctcggctcactgcaacctccgcctcctgggttcaagcaattctcatgcctcagcctcccaagtagctgggactataggcgtgcaccaccatgcctggctaatttttgtatttttagtagagacaggttttcaccatgttggccagactggtcttgaactcctgacctcaagtgatccgcctgtctcggcctcccaaagtgctgggattacaggcgtgagccactgcgcccggccagcctcacagttctgagggttaccatcaaaatgaaccaggacatgacagaagccatttcaaccactggagacggatcggattctattcctacatttacttggaaccatccagctttcatgaagaaggaagggctgtatggccagttggaaccacagagagaaaggctccagttgaaccacttaagagctggtcctcccatgcagggcgagccagcccagacagtgtcctcatatggcttgcctcagggtaggtaaaacataaaacctcgaccacttgtgcagagagagcagcatctttaatttgacctgaacctgacttgcttaccttgctctgtcactggggcatctgtgcactcacggagggggaaaatcagtctaggatggtgggaatgaggcttaccatccacaatagagatctctgaacaaaatctttgttcttccctaacaaaaaagtgtgtgaaggacaaacacttcaagggctcattctcattctcattctcatagtgagaagagataagacagagaccagatccttcgcaacaaccctcaattttacttagggtcagtgagaaatcaattcagatggtaacagtacccaggaccagctgggtctgcagttggctcctgactcctgacattctggctcctgactttggacctccctagttgagaataaacctgaactaaaaatccatgtagttaggtagtctgggcacaggaaaccaaagtggggttggagatgcggactctgtcattctgaatgtgacagagttgaagatttgagacacagcattgagtgtggagacctagagaaggcccctcagtggagtaggaaggactggggtttcccagtcagcatgcctcccgcaagtttgaatatttgtgtccctctcaaattcatactgaaacttaacctccaatgcagcatattaagaggtggggcctttagaaggtgattaggtcatgagagcttctccctcgtgaataggattaaggccctaatgaaagaggcttcacacagcctgccttttttactgtgtgaggatgcagtgaccaccttggaagcaaaaagcagccctcgctagacaccgaacctgccagcaccttcatcttggacttcctgcttctagaactgtgagaaaacgaatttctgttctttataaattacccagtctcaggtatttttgtcataacagcacagactaacatacctagagacttgcattccaactagaggcgcaagcacacctataattctgccctctcaactcctaatgccagagattgctaaataaatactaaaaatgtaaaaacaggccgggcacagcccagcactttgggaggccgaggcaggcagatcacctgaggtcaggagttccagaccagccagaccaccatggcgaaaccccatctctactaaaaaatacaaaaattagccgggtgtggtggtgggcgcctgtaatcccagctacttgggaggctgaggcacgagaatcacttgaacccaggaggcagaggttgcagtgagctgagatcttgccattgcactccagcctgggcaacagagcaagactccatctcaaaaaaaaaaaaaaaaaaaaaaaagaaagcaaaaactgtcaaactcaaaataaaggaaatcttctttgacaaagaatggagagaataatacagccattagcagaggctgaggctatacagcttgagagaagtagagactagttcaggatggtaggtgctgggacttcaaagtccacgtgggacaggtaaccaagtgtaacctaggaacgtcaagggaccagaaccagactctgagaggtacacaggcaggaaaaatgtaagttgcaaacaaaaacaggatgacatgcaagcaatctaaaaaaatactttaaaaaatatatatgtgcaatcaccaaagagctaaagatattcagtcttgcaatgagaaactgactgaaaagaagcaaataagattttacaaattatacatgctggaaatgtaaaaatacaattattgaaatatactctatgtatggtataagccctagactggaggcagatgacataaaaatttagcaggtctggaaaacaactgaggaatcacccagaatgcaccacagtgataaaagaaatataaaaaagaagctaagacagatggaggatagactgagaagctttggcataatgtttcatagcagttttagaaaaaaagactagtgagaatacagggatgagaaaacaaagacggtgaatttttcagaactgaagaaagatgtgagatctcagaatcaaagagctcattaagttccaagaaaggtacatttaaaaaaaaaggccaggccgggtgcggtggctcatgcctgtaatcccagcactttgggaggccgaggcgggtggaacatgaggtcaggagatcgagaccatcctggctaacatggtgagatcccgtcactactaaaaaaatacaaaaaaattagctgggccaggtggcaggcgcctgtagtcccagctactcaggaggctgaggcaggagaatggcgagaacccaggaggcagaggttgcagtgagccgagatcgcaccactgcactccagcctgggtgacagagcaagactccatctcaaaaaaaatagatagctgggcgcggtggctcacccctgtaatcccagcactttgggaggccgaggcgggcggatcatggggtcaggagatcgagaccatcctggctaacatggtgaaaccttgtctctactaaaagtacaaaaaattagccgggcatggtggcgggcgcctgtagtctcagctacttgggaggctgaggcaggagaatggcatgaacccggaggcagaggttttagtgagccgagatcgcgccactgcactccagcctgggcgacagagtgagactccgtctcaaaacaacaacaacaacaacaaacaaacaaataaataaataaacaggccaggtgcagtggctcatgtctataatcccagtactttgggaggccaacgtgggcagatcacttgaggtcaggagtttgagactagcctggccaacgtggtgaaaccctgtctctactaaaaatacaaaaaaacccaaaaaccagaaaaatcaaaatgtagcggggcatgctggtgtgtgcctatagcctgtaatcccagctacttggaaggctgaggcagaagaatcgcttgaacctgggagatggaggttgcaaatagccaagatcatgccactgcacttcatcctgagcgacagagcacgactccgtctcaaaaaaattaaaacaatttaaaaaacctcgtgtagatatattgcaaattacgtaagataaaacctaaaggccaggcacggtggctcacgcctgtaattccagcactttgggaggccaaggtgggtggatcacctgaggtcaggagtttgagatcggcctggcccacatggcaaaaccctgtctgtactaaaaatacaaaaattagctgggctggtggcatgcgcctgtagtcaaagctactcaggaggctgaggcagaagaatagcttaaaccagggaggtggaggttgcagttagctgagatcatgccactgcactccagccttggcaatagagtgagtgggattcactctcaaaagagaaaggcaaatataagaacttattgagaaactgcaggaatgaatataacctgttgtacaaccatggtttaactgtagatttttagcctagcttttttttttttttttttttttttgagacggagtctagctctgtcgcccaagctggagtgcagtggcgtgatctcggctcactgcaacctctgcctcccaggttcaagtgattctcctgcctcagcctcccaagtagctgggactaaaggcgcccgccaccacgcctggctaattttttgtagttttagtagagacagggtttcaccgtgttagccaggatggtcttgatctcctgacctcatgatccacccgcctcggcctcccaaagtgttgggattacaggcgtgagccaccacactggcctttttttttttttttttttttgagacggagtcttgctctgtctcccaggctggagtgcagtggcatgaccttggctcactgcaacctccgcctcctgggttcaagtgattctcctgcctcagcctcccgagtagctgggactacaggtgcccgccaccatgcccgggtaattaannnnnnnnnnnnnnnnnnnnnnnnnnnnnnnnnnnnnnnnnnnnnnnnnnnnnnnnnnnnnnnnnnnnnnnnnnnnnnnnnnnnnnnnnnnnnnnnnnnnnnnnnnnnnnnnnnnnnnnnnnnnnnnnnnnnnnnnnnnnnnnnnnnnnnnnnnnnnnnnnnnnnnnnnnnnnnnnnnnnnnnnnnnnnnnnnnntgtgtgtatatatatatatttgttttttttttaagaaactcaaaaaattagccaggtgcagtggtgagcagctgtagtcccagctacttaggaggctgaggcaggaggattgcttgagcccaagagttcaagctgcagtgagctatgatcaggccactgcactccagcttgggcaacagagcaagaccccatctctaaaattgagaaagaaaaaaaaatccaggtgctgtagctcatgcatgtaatcccagcactttgggaggccaaggcaggcggataacttgaggtcaggagtttgagaccagcctggccagcatggtgaaaccctgtctctactagaaatacaaaaattagccgggcgtggtggcacacatctgtaatcccagctactagggaggctgtggcataagaatcgcttgaacccaggaggcagaggttgcagtgagccgagattgcgccactgtactccagcctgggtgacagagcgagaatccatcttaaaaaaaaaaaaaggctctggaacatttcatttcctgttttgttactgacctgtgactctgtaaaagtctactttcgcaatttggattaataattttatgaatgcaaattggagatgctgttcaaaaaaaaaaaatagaaaagtcttacaaaggaaagacaatcacagtgatagcagacatctagttagctacagtagacacctggagtccattcaaacctagagaaaactcagccttgaatttgctatcagctacaccattcaagagcacgggggaaatgaagacattttcagacatgcaaagactcaacagtttgcaatgtacaaaactttagtggaagaaagtaggtgtacttaagcaaaaagagaatttgtctaggggcataaactaatgagagggagggtacacctaaatactggctataaatgtaatactagtttatagtttaaaaagaggcaggaactaaaattctagaaagcaatattgtgaagagttattcaaggctgggcacagtggctcacgcctgtaatcccagcactttgggaggctgaggtgggcagatcacctgaggtcaggagttcgagaccagtgtggccaacttagtggaacgccatctctactaaaaaataaaaaataaaaaaatccaaaaacaggtactaagaggacagaccttgcatcaaatggtgctaggaaaactggacatccacaagcaaaaccatacatcatatattttgtatatggtgtatatacaaaaaaattacaccatatacaaaaattaacccaaaatgttcttgccacaaaaacaacaaaaaattgggtaactacgtgaaatgatggatgtgttaatttgcttcactatagtaacctttttactacctgtatgtagcctcataacatcatgtataccttataccaaattaaattgatttaaaaagaaatttaacccaaaatggatcaaaaactttacttgtaagagctaaaacgataactttgggaggccaaggcgggtggatcacctgaagtcaggagttaaagaccagcctgggcagcaaggataaatcccgtcactactaaaaatacaacaattagccatgcgtggtggcgcacgcctgttatcccagctactcgggagactgaggcaggagaatagcttgaacccgggaagcggaggttatggtgagcagagatggcaccattgcactccagcctgggcaacaagagtgaaactccgtctcaaaaaaaaaagctaaaacgaaagctcctagaagaaaacaggaaaagcttcatggcattagatttggcaacgatttcttagatatgacactaaaaacacaggcaacaaaatatataaagtggactacaacaaagtcatcttttcttaaaaaaatctcgttatcttactcccgcaaaactatttaaaaaaattaagttcaaagttctccaaaatgtaccataccctggggattactctgaactttgttcatttgttttcttttaattcggcttttttggttgcctttcacctactttttcgcagagccctccgctggggccttcacttgggcaaacaactatcgtagtcgaacagctttgacctaacaatttcctcgtacccaagatgatcgcttttccagacaacttaataaactttggctttaatggatgactggatgcagaataaaatacataaaaataaacctcagctgctcagcaacgactgaaaaaccaccaccgggcaatccctccccatggccaccgagcaaagttccaccgcctcccctacgccgaccgccgggctcccggggtcggacagccccgggccacttccgggccttcccggaagtccctgtcacttaacaaccgaagtaacccgcaatgcggaagggcgaggggattgcgagtcaccgagtttcccgcgcggcttgaggtactggggaaccggaatcccccaccggcccaatcatgttgctgctggggtctctccggtgcccagcagtggttgtcagtaagcgggcggcactcccttccgatacgtcttttcttttttcatttttgagacggagtctcgctgtgtcacccaagctggagtgcagtggcgcgatctcggctcagtacaaactccgcctcccgggttcaagcgagtctcctgcctcagcctcctgagtagctgggattacaggcgcgagccactgcgcccggctaatttttttttgtatttttagtagagacggggcctcgccatgctggccaggctggtcttgaactcctgacctcaagtgatccgcccgcctcggtctcccagagtgctgggattacaggcgagagacaccgcgcctggcccccttccaactttcttaacgggaaaggctgctaccatttcttgagcacctatgtgtcaggctccatcaggcacgtcacagtctaacctgataattacacaacccatgtcactgacaaggaagccaggttcggaggggttgaggcccgcaacctgagggaggtgactccgggacacacaattagtcctgctttgctgaaggaaagatatgcagcccaccagtcggaggctggagaaggagcagcagcagcttaaaccttaacccagagttatttttattttccagaacgtgttagga

SEQ ID NO: 938 - DNA, 5130 bp, Homo sapiens
ggggctacgggtgggcgggcgcccgccttcgcctgcgtcgctgcctgcacgcgggccgccgtccccgggcgtgtgagagccggcagctcggccgactgggcccggagcggcgcggaggccgggcgctgacggtaacgggccgggtgtgtgtggaggccagtatgaagctgaaaaagcaggtgacagtgtgtggggctgccatcttctgtgtggcagtcttctcgctctacctcatgctggaccgagtgcaacacgatcccacccgacaccagaatggtgggaacttcccccggagccaaatttctgtgctgcagaaccgcattgagcagctggagcagcttttggaggagaaccatgagattatcagccatatcaaggactccgtgctggagctgacagccaacgcagagggcccgcccgccatgctgccctactacacggtcaatggctcctgggtggtgccaccggagccccggcccagcttcttctccatctccccgcaggactgccagtttgctttggggggccggggtcagaagccagagctgcagatgctcactgtgtcggaggagctgccgtttgacaacgtggatggtggtgtgtggaggcaaggcttcgacatctcctacgacccgcacgactgggatgctgaagacctgcaggtgtttgtggtgccccactctcacaatgacccaggctggatcaagacctttgacaagtactacacagagcagacccaacacatcctcaatagcatggtgtctaagctgcaggaggacccccggcggcgcttcctctgggcagaggtctccttcttcgccaagtggctggtgggaaacgggcagctggagattgcgacaggaggctgggtgatgccagatgaggccaattcccactactttgcattgattgaccagctcatcgaaggacaccagtggctggagagaaatcttggtgcaaccccccgctctggctgggcagtggacccctttggatacagctccaccatgccttacctgctgcgccgtgccaacctcaccagcatgctgattcagagagtgcactatgccatcaagaagcactttgctgccacccacagcctagagttcatgtggaggcagacatgggactcggactccagcacagacatcttctgtcacatgatgcccttctacagctatgacgtcccccatacctgtggcccagatcccaagatctgctgccaatttgatttcaaacgcctgcctggtgggcgcatcaactgcccttggaaggtgccaccccgggccatcacagaggccaacgtggcagagagggcagccctgcttctggaccaataccggaagaagtcccagctgttccgaagcaacgtcctcctggtgcctcttggagatgacttccgatatgacaagccccaggagtgggatgcccagttcttcaactaccaacggctctttgacttcttcaacagcaggcctaacctccatgtgcaggcccagtttggcactctttctgactattttgatgccctgtacaagaggacaggggtggagccaggggcccggcctccagggtttcctgtgctgagcggggatttcttctcctatgcggaccgggaggatcattactggacaggctattacacttcccggcccttctacaagagcttagaccgagtcctggaagcccacctgcggggggcagaggttctgtacagcctggctgcagctcacgctcgccgctctggtctggctggccggtacccactgtctgatttcaccctcctgacggaagctcggcgcacattggggctcttccagcatcacgatgccatcactggcacggccaaggaggctgtggtggtggactatggggtcaggcttctgcgctcccttgtcaacctgaagcaggtcatcattcatgcagcccactatctggtgctgggggacaaggagacctaccactttgaccctgaggcgcccttcctccaagtggtggggtgggaggaggctgagcccatgatggttcttcccttccggctcactgaattccaggatgacactcgcttaagtcacgacgccctcccagagcgcacggtgatccagctggattcctcgcccaggtttgtggtcctattcaacccactggaacaggagcgattcagcatggtgtccctgctggtcaactctccccgcgtgcgtgtcctttcggaggagggtcagcccctggccgtgcagatcagcgcacactggagctctgccaccgaggcggtccctgacgtctaccaggtgtctgtgcctgtccgcctgccagccctgggcctgggcgtgctgcagctacagctgggcctggatgggcaccgcacgctgccctcctctgtgcgcatctacctgcacggccggcagctgtccgtcagcaggcacgaagcgtttcctctccgtgtcattgactctggcaccagcgacttcgccctcagcaaccgctacatgcaggtctggttctcaggccttactgggctcctcaagagcatccgaagggtggatgaggagcacgagcagcaggtggacatgcaggtccttgtctatggcacccgtacgtccaaagacaagagtggagcctacctcttcctgcccgatggcgaggccaagccctacgtccccaaggagccccccgtgctgcgtgtcactgaaggccctttcttctcagaggtggttgcgtactatgagcacattcaccaggcggtccggctttacaatctgccaggggtggaggggctgtctctggacatatcatccctggtggacatccgggactacgtcaacaaggagctggccctgcacatccatacagacatcgacagccagggtatcttcttcacagacctcaatggctttcaggtgcagccccgacggtatctgaagaagctccccctccaggccaacttctaccccatgccagtcatggcctatatccaggacgcacagaagcgcctcacgctgcacactgcccaggccctgggtgtctctagcctcaaagatggccagctggaggtgatcttggaccggcggctgatgcaggatgacaaccggggcctaggccaagggctcaaggacaacaagagaacctgcaaccgtttccgcctcctgctagagcggcgaaccgtgggcagtgaggtccaagatagccactctaccagctacccatccctcctcagccacctgacctccatgtacctgaacgccccggcgctcgctctgcctgtagccaggatgcagctcccaggccctggtctgcgctcatttcatcctctggcttcctcactgccctgtgacttccacctgctcaacctacgtacgctccaggctgagcactgcctctgggcagaggcgctgctgcatctccgatctctgaaagccctgcgcccacttccctgggcactgtctgtcatccaggaggacaccctaccctcggcggagaccgcactcatcttacaccgcaagggttttgactgcggcctggaggccaagaacttgggcttcaactgcaccacaagccaaggcaaggtagccctgggcagccttttccatggcctggatgtggtattccttcagccaacctccttgacgttactgtaccctctggcctccccgtccaacagcactgacgtctatttggagcccatggagattgctacctttcgcctccgcttgggttagggcttcttgtggcctgaagagaaagttcattcacagagactgcctcttaacatgaagatcattggacaagccacacgggtatcccatcccgatctgcctcccagaactgtgacacactgggctctgccctcattttctgtttattgctgctgctgtgttttcggcgcaacccacaaacccagtgatgggtaaatagggcagacgccagtgagatcagggagagaaggcccttggtcagagtgggcagtgccaggctctgctttgggttgtgagtggacacccaactgggcacaggctcaggcacccatcctttttccaaacagggatatagaagtggtggaagcagacagaagaggtaagggaggctaagtgggtaacagcccagcatcagggtcactgtggcaacagcaggctctaggggaatcctgtggttatgtagagactccatgtcctggtgtgatgagcaggatcagagtgactctgggaggacaggggtggggacccagagttagcagtggggatggagcagtagaaggaatcactgtttctcctaggagtctgaaggcctcgctgctttctgtgatggctttgcagtaagtgccgcctggcctgcatgcattggctaacaggctgcagaatggcaggaaggactcgctagagattgtcatggccagagatcataggtcacttcaggtagcaagacccctggcaaactgggcacttggcctatgtactgatttgtgggatggtggcaggggtgtggggtccttcaccctgcctgaattctctttggcttctgtgctctgtatgctgctgtccccaagagctctttcttattatggcagggagtggggattggtcctactttctttctctggaaaggaaagcctccaagactccatgtgcttgggcagcttgagaaggcgttcagcaccacgcctagcaggcagaccttgaagcctcacctttagtctatctgcagaggtattcagttcctggcacaggggactaggggcatgtagagtatatgaggaggcagtatggctgtgcaggagccttcatttcagcttcaattaatagggaagaatttatgatagctctatagatgctgaaaaggtatttcgtaagatttaaaatccatcccttattaaaactcttagtaaattaagtctggaaagaaacaccctaatctagataaaggtctgtttcagaaaccaacagtgatggcattctaaagagtcagacgccacaggcattcccattaaagtcagaaactagccaagggcaagctattattcagcagtgtcccggcactactaacccctgcaacaagccagatgaggaacataaggaagaattataattgtcattatttgtagacaataaaactgcctacctgtaaaacctaagaatc

SEQ ID NO: 939 - protein, 1176 aa, Homo sapiens
MKLKKQVTVCGAAIFCVAVFSLYLMLDRVQHDPTRHQNGGNFPRSQISVLQNRIEQLEQLLEENHEIISHIKDSVLELTANAEGPPAMLPYYTVNGSWVVPPEPRPSFFSISPQDCQFALGGRGQKPELQMLTVSEELPFDNVDGGVWRQGFDISYDPHDWDAEDLQVFVVPHSHNDPGWIKTFDKYYTEQTQHILNSMVSKLQEDPRRRFLWAEVSFFAKWLVGNGQLEIATGGWVMPDEANSHYFALIDQLIEGHQWLERNLGATPRSGWAVDPFGYSSTMPYLLRRANLTSMLIQRVHYAIKKHFAATHSLEFMWRQTWDSDSSTDIFCHMMPFYSYDVPHTCGPDPKICCQFDFKRLPGGRINCPWKVPPRAITEANVAERAALLLDQYRKKSQLFRSNVLLVPLGDDFRYDKPQEWDAQFFNYQRLFDFFNSRPNLHVQAQFGTLSDYFDALYKRTGVEPGARPPGFPVLSGDFFSYADREDHYWTGYYTSRPFYKSLDRVLEAHLRGAEVKLAAAHARRSGLAGRYPLSDFTLLTEARRTLGLFQHHDAITGTAKEAVVVDYGVRLLRSLVNLKQVIIHAAHYLVLGDKETYHFDPEAPFLQVVGWEEAEPMMVLPFRLTEFQDDTRLSHDALPERTVIQLDSSPRFVVLFNPLEQERFSMVSLLVNSPRVRVLSEEGQPLAVQISAHWSSATEAVPDVYQVSVPVRLPALGLGVLQLQLGLDGHRTLPSSVRIYLHGRQLSVSRHEAFPLRVIDSGTSDFALSNRYMQVWFSGLTGLLKSIRRVDEEHEQQVDMQVLVYGTRTSKDKSGAYLFLPDGEAKPYVPKEPPVLRVTEGPFFSEVVAYYEHIHQAVRLYNLPGVEGLSLDISSLVDIRDYVNKELALHIHTDIDSQGIFFTDLNGFQVQPRRYLKKLPLQANFYPMPVMAYIQDAQKRLTLHTAQALGVSSLKDGQLEVILDRRLMQDDNRGLGQGLKDNKRTCNRFRLLLERRTVGSEVQDSHSTSYPSLLSHLTSMYLNAPALPVARMQLPGPGLRSFHPLASSLPCDFHLLNLRTLQAEHCLWAEALLHLRSLKALRPLPWALSVIQEDTLPSAETALILHRKGFDCGLEAKNLGFNCTTSQGKVGSLFHGLDVVFLQPTSLTLLYPLDSNSTDVYLEPMEIATFRLRLG

SEQ ID NO: 940 - DNA, 4932 bp, Homo sapiens
ggcagctcggccgactgggcccggagcggcgcggaggccgggcgctgacggtgtgtgtggaggccagtatgaagctgaaaaagcaggtgacagtgtgtggggctgccatcttctgtgtggcagtcttctcgctctacctcatgctggaccgagtgcaacacgatcccacccgacaccagaatggtgggaacttcccccggagccaaatttctgtgctgcagaaccgcattgagcagctggagcagcttttggaggagaaccatgagattatcagccatatcaaggactccgtgctggagctgacagccaacgcagagggcccgcccgccatgctgccctactacacggtcaatggctcctgggtggtgccaccggagccccggcccagcttcttctccatctccccgcaggactgccagtttgctttggggggccggggtcagaagccagagctgcagatgctcactgtgtcggaggagctgccgtttgacaacgtggatggtggtgtgtggaggcaaggcttcgacatctcctacgacccgcacgactgggatgctgaagacctgcaggtgtttgtggtgccccactctcacaatgacccaggctggatcaagacctttgacaagtactacacagagcagacccaacacatcctcaatagcatggtgtctaagctgcaggaggacccccggcggcgcttcctctgggcagaggtctccttcttcgccaagtggtgggacaacatcaatgtccaaaagagagcggcagtccgaaggccagctggtgggaaacgggcagctggagattgcgacaggaggctgggtgatgccagatgaggccaattcccactactttgcattgattgaccagctcatcgaaggacaccagtggctggagagaaatcttggtgcaaccccccgctctggctgggcagtggacccctttggatacagctccaccatgccttacctgctgcgccgtgccaacctcaccagcatgctgattcagagagtgcactatgccatcaagaagcactttgctgccacccacagcctagagttcatgtggaggcagacatgggactcggactccagcacagacatcttctgtcacatgatgcccttctacagctatgacgtcccccatacctgtggcccagatcccaagatctgctgccaatttgatttcaaacgcctgcctggtgggcgcatcaactgcccttggaaggtgccaccccgggccatcacagaggccaacgtggcagagagggcagccctgcttctggaccaataccggaagaagtcccagctgttccgaagcaacgtcctcctggtgcctcttggagatgacttccgatatgacaagccccaggagtgggatgcccagttcttcaactaccaacggctctttgacttcttcaacagcaggcctaacctccatgtgcaggcccagtttggcactctttctgactattttgatgccctgtacaagaggacaggggtggagccaggggcccggcctccagggtttcctgtgctgagcggggatttcttctcctatgcggaccgggaggatcattactggacaggctattacacttcccggcccttctacaagagcttagaccgagtcctggaagcccacctgcggggggcagaggttctgtacagcctggctgcagctcacgctcgccgctctggtctggctggccggtacccactgtctgatttcaccctcctgacggaagctcggcgcacattggggctcttccagcatcacgatgccatcactggcacggccaaggaggctgtggtggtggactatggggtcaggcttctgcgctcccttgtcaacctgaagcaggtcatcattcatgcagcccactatctggtgctgggggacaaggagacctaccactttgaccctgaggcgcccttcctccaagtggatgacactcgcttaagtcacgacgccctcccagagcgcacggtgatccagctggattcctcgcccaggtttgtggtcctattcaacccactggaacaggagcgattcagcatggtgtccctgctggtcaactctccccgcgtgcgtgtcctttcggaggagggtcagcccctggccgtgcagatcagcgcacactggagctctgccaccgaggcggtccctgacgtctaccaggtgtctgtgcctgtccgcctgccagccctgggcctgggcgtgctgcagctacagctgggcctggatgggcaccgcacgctgccctcctctgtgcgcatctacctgcacggccggcagctgtccgtcagcaggcacgaagcgtttcctctccgtgtcattgactctggcaccagcgacttcgccctcagcaaccgctacatgcaggtctggttctcaggccttactgggctcctcaaggggtcagggctgtgttttttggcagagcatccgaagggtggatgaggagcacgagcagcaggtggacatgcaggtccttgtctatggcacccgtacgtccaaagacaagagtggagcctacctcttcctgcccgatggcgaggccaagccctacgtccccaaggagccccccgtgctgcgtgtcactgaaggccctttcttctcagaggtggttgcgtactatgagcacattcaccaggcggtccggctttacaatctgccaggggtggaggggctgtctctggacatatcatccctggtggacatccgggactacgtcaacaaggagctggccctgcacatccatacagacatcgacagccagggtgcagccccgacggtatctgaagaagctccccctccaggccaacttctaccccatgccagtcatggcctatatccaggacgcacagaagcgcctcacgctgcacactgcccaggccctgggtgtctctagcctcaaagatggccagctggaggtgatcttggaccggcggctgatgcaggatgacaaccggggcctaggccaagggctcaaggacaacaagagaacctgcaaccgtttccgcctcctgctagagcggcgaaccgtgggcagtgaggtccaagatagccactctaccagctacccatccctcctcagccacctgacctccatgtacctgaacgccccggcgctcgctctgcctgtagccaggatgcagctcccaggccctggtctgcgctcatttcatcctctggcttcctcactgccctgtgacttccacctgctcaacctacgtacgctccaggctgaggaggacaccctaccctcggcggagaccgcactcatcttacaccgcaagggttttgactgcggcctggaggccaagaacttgggcttcaactgcaccacaagccaaggcaaggtagccctgggcagccttttccatggcctggatgtggtattccttcagccaacctccttgacgttactgtaccctctggcctccccgtccaacagcactgacgtctatttggagcccatggagattgctacctttcgcctccgcttgggttagggcttcttgtggcctgaagagaaagttcattcacagagactgcctcttaacatgaagatcattggacaagccacacgggtatcccatcccgatctgcctcccagaactgtgacacactgggctctgccctcattttctgtttattgctgctgctgtgttttcggcgcaacccacaaacccagtgatgggtaaatagggcagacgccagtgagatcagggagagaaggcccttggtcagagtgggcagtgccaggctctgctttgggttgtgagtggacacccaactgggcacaggctcaggcacccatcctttttccaaacagggatatagaagtggtggaagcagacagaagaggtaagggaggctaagtgggtaacagcccagcatcagggtcactgtggcaacagcaggctctaggggaatcctgtggttatgtagagactccatgtcctggtgtgatgagcaggatcagagtgactctgggaggacaggggtggggacccagagttagcagtggggatggagcagtagaaggaatcactgtttctcctaggagtctgaaggcctcgctgctttctgtgatggctttgcagtaagtgccgcctggcctgcatgcattggctaacaggctgcagaatggcaggaaggactcgctagagattgtcatggccagagatcataggtcacttcaggtagcaagacccctggcaaactgggcacttggcctatgtactgatttgtgggatggtggcaggggtgtggggtccttcaccctgcctgaattctctttggcttctgtgctctgtatgctgctgtccccaagagctctttcttattatggcagggagtggggattggtcctactttctttctctggaaaggaaagcctccaagactccatgtgcttgggcagcttgagaaggcgttcagcaccacgcctagcaggcagaccttgaagcctcacctttagtctatctgcagaggtattcagttcctggcacaggggactaggggcatgtagagtatatgaggaggcagtatggctgtgcaggagccttcatttcagcttcaattaatagggaagaatttatgatagctctatagatgctgaaaaggtatttcgtaagatttaaaatccatcccttattaaaactcttagtaaattaagtctggaaagaaacaccctaatctagataaaggtctgtttcagaaaccaacagtgatggcattctaaagagtcagacgccacaggcattcccattaaagtcagaaactagccaagggcaagctattattcagcagtgtcccggcactactaacccctgcaacaagccagatgaggaacataaggaagaattataattgtcattatttgtagacaataaaactgcctacctgtaaaacctaagaatc

SEQ ID NO: 941 - protein, 701 aa, Homo sapiens
MAPGWCHRSPGPASSPSPRRTASLLWGAGVRSQSCRCSLCRRSCRLTTWMVVCGGKASTSPTTRTTGMLKTCRCLWCPTLTMTQAGSRPLTSTTQSRPNTSSIAWCLSCRRTPGGASSGQRSPSSPSGGTTSMSKRERQSEGQLVGNGQLEIATGGWVMPDEANSHYFALIDQLIEGHQWLERNLGATPRSGWAVDPFGYSSTMPYLLRRANLTSMLIQRVHYAIKKHFAATHSLEFMWRQTWDSDSSTDIFCHMMPFYSYDVPHTCGPDPKICCQFDFKRLPGGRINCPWKVPPRAITEANVAERAALLLDQYRKKSQLFRSNVLLVPLGDDFRYDKPQEWDAQFFNYQRLFDFFNSRPNLHVQAQFGTLSDYFDALYKRTGVEPGARPPGFPVLSGDFFSYADREDHYWTGYYTSRPFYKSLDRVLEAHLRGAEVKLAAAHARRSGLAGRYPLSDFTLLTEARRTLGLFQHHDAITGTAKEAVVVDYGVRLLRSLVNLKQVIIHAAHYLVLGDKETYHFDPEAPFLQVDDTRLSHDALPERTVIQLDSSPRFVVLFNPLEQERFSMVSLLVNSPRVRVLSEEGQPLAVQISAHWSSATEAVPDVYQVSVPVRLPALGLGVLQLQLGLDGHRTLPSSVRIYLHGRQLSVSRHEAFPLRVIDSGTSDFALSNRYMQVWFSGLTGLLKGSGLCFLAEHPKGG

SEQ ID NO: 942 - DNA, 4928 bp, Homo sapiens
ggcagctcggccgactgggcccggagcggcgcggaggccgggcgctgacggtgtgtgtggaggccagtatgaagctgaaaaagcaggtgacagtgtgtggggctgccatcttctgtgtggcagtcttctcgctctacctcatgctggaccgagtgcaacacgatcccacccgacaccagaatggtgggaacttcccccggagccaaatttctgtgctgcagaaccgcattgagcagctggagcagcttttggaggagaaccatgagattatcagccatatcaaggactccgtgctggagctgacagccaacgcagagggcccgcccgccatgctgccctactacacggtcaatggctcctgggtggtgccaccggagccccggcccagcttcttctccatctccccgcaggactgccagtttgctttggggggccggggtcagaagccagagctgcagatgctcactgtgtcggaggagctgccgtttgacaacgtggatggtggtgtgtggaggcaaggcttcgacatctcctacgacccgcacgactgggatgctgaagacctgcaggtgtttgtggtgccccactctcacaatgacccaggctggatcaagacctttgacaagtactacacagagcagacccaacacatcctcaatagcatggtgtctaagctgcaggaggacccccggcggcgcttcctctgggcagaggtctccttcttcgccaagtggtgggacaacatcaatgtccaaaagagagcggcagtccgaaggctggtgggaaacgggcagctggagattgcgacaggaggctgggtgatgccagatgaggccaattcccactactttgcattgattgaccagctcatcgaaggacaccagtggctggagagaaatcttggtgcaaccccccgctctggctgggcagtggacccctttggatacagctccaccatgccttacctgctgcgccgtgccaacctcaccagcatgctgattcagagagtgcactatgccatcaagaagcactttgctgccacccacagcctagagttcatgtggaggcagacatgggactcggactccagcacagacatcttctgtcacatgatgcccttctacagctatgacgtcccccatacctgtggcccagatcccaagatctgctgccaatttgatttcaaacgcctgcctggtgggcgcatcaactgcccttggaaggtgccaccccgggccatcacagaggccaacgtggcagagagggcagccctgcttctggaccaataccggaagaagtcccagctgttccgaagcaacgtcctcctggtgcctcttggagatgacttccgatatgacaagccccaggagtgggatgcccagttcttcaactaccaacggctctttgacttcttcaacagcaggcctaacctccatgtgcaggcccagtttggcactctttctgactattttgatgccctgtacaagaggacaggggtggagccaggggcccggcctccagggtttcctgtgctgagcggggatttcttctcctatgcggaccgggaggatcattactggacaggctattacacttcccggcccttctacaagagcttagaccgagtcctggaagcccacctgcggggggcagaggttctgtacagcctggctgcagctcacgctcgccgctctggtctggctggccggtacccactgtctgatttcaccctcctgacggaagctcggcgcacattggggctcttccagcatcacgatgccatcactggcacggccaaggaggctgtggtggtggactatggggtcaggcttctgcgctcccttgtcaacctgaagcaggtcatcattcatgcagcccactatctggtgctgggggacaaggagacctaccactttgaccctgaggcgcccttcctccaagtggatgacactcgcttaagtcacgacgccctcccagagcgcacggtgatccagctggattcctcgcccaggtttgtggtcctattcaacccactggaacaggagcgattcagcatggtgtccctgctggtcaactctccccgcgtgcgtgtcctttcggaggagggtcagcccctggccgtgcagatcagcgcacactggagctctgccaccgaggcggtccctgacgtctaccaggtgtctgtgcctgtccgcctgccagccctgggcctgggcgtgctgcagctacagctgggcctggatgggcaccgcacgctgccctcctctgtgcgcatctacctgcacggccggcagctgtccgtcagcaggcacgaagcgtttcctctccgtgtcattgactctggcaccagcgacttcgccctcagcaaccgctacatgcaggtctggttctcaggccttactgggctcctcaaggggtcagggctgtgttttttggcagagcatccgaagggtggatgaggagcacgagcagcaggtggacatgcaggtccttgtctatggcacccgtacgtccaaagacaagagtggagcctacctcttcctgcccgatggcgaggccaagccctacgtccccaaggagccccccgtgctgcgtgtcactgaaggccctttcttctcagaggtggttgcgtactatgagcacattcaccaggcggtccggctttacaatctgccaggggtggaggggctgtctctggacatatcatccctggtggacatccgggactacgtcaacaaggagctggccctgcacatccatacagacatcgacagccagggtgcagccccgacggtatctgaagaagctccccctccaggccaacttctaccccatgccagtcatggcctatatccaggacgcacagaagcgcctcacgctgcacactgcccaggccctgggtgtctctagcctcaaagatggccagctggaggtgatcttggaccggcggctgatgcaggatgacaaccggggcctaggccaagggctcaaggacaacaagagaacctgcaaccgtttccgcctcctgctagagcggcgaaccgtgggcagtgaggtccaagatagccactctaccagctacccatccctcctcagccacctgacctccatgtacctgaacgccccggcgctcgctctgcctgtagccaggatgcagctcccaggccctggtctgcgctcatttcatcctctggcttcctcactgccctgtgacttccacctgctcaacctacgtacgctccaggctgaggaggacaccctaccctcggcggagaccgcactcatcttacaccgcaagggttttgactgcggcctggaggccaagaacttgggcttcaactgcaccacaagccaaggcaaggtagccctgggcagccttttccatggcctggatgtggtattccttcagccaacctccttgacgttactgtaccctctggcctccccgtccaacagcactgacgtctatttggagcccatggagattgctacctttcgcctccgcttgggttagggcttcttgtggcctgaagagaaagttcattcacagagactgcctcttaacatgaagatcattggacaagccacacgggtatcccatcccgatctgcctcccagaactgtgacacactgggctctgccctcattttctgtttattgctgctgctgtgttttcggcgcaacccacaaacccagtgatgggtaaatagggcagacgccagtgagatcagggagagaaggcccttggtcagagtgggcagtgccaggctctgctttgggttgtgagtggacacccaactgggcacaggctcaggcacccatcctttttccaaacagggatatagaagtggtggaagcagacagaagaggtaagggaggctaagtgggtaacagcccagcatcagggtcactgtggcaacagcaggctctaggggaatcctgtggttatgtagagactccatgtcctggtgtgatgagcaggatcagagtgactctgggaggacaggggtggggacccagagttagcagtggggatggagcagtagaaggaatcactgtttctcctaggagtctgaaggcctcgctgctttctgtgatggctttgcagtaagtgccgcctggcctgcatgcattggctaacaggctgcagaatggcaggaaggactcgctagagattgtcatggccagagatcataggtcacttcaggtagcaagacccctggcaaactgggcacttggcctatgtactgatttgtgggatggtggcaggggtgtggggtccttcaccctgcctgaattctctttggcttctgtgctctgtatgctgctgtccccaagagctctttcttattatggcagggagtggggattggtcctactttctttctctggaaaggaaagcctccaagactccatgtgcttgggcagcttgagaaggcgttcagcaccacgcctagcaggcagaccttgaagcctcacctttagtctatctgcagaggtattcagttcctggcacaggggactaggggcatgtagagtatatgaggaggcagtatggctgtgcaggagccttcatttcagcttcaattaatagggaagaatttatgatagctctatagatgctgaaaaggtatttcgtaagatttaaaatccatcccttattaaaactcttagtaaattaagtctggaaagaaacaccctaatctagataaaggtctgtttcagaaaccaacagtgatggcattctaaagagtcagacgccacaggcattcccattaaagtcagaaactagccaagggcaagctattattcagcagtgtcccggcactactaacccctgcaacaagccagatgaggaacataaggaagaattataattgtcattatttgtagacaataaaactgcctacctgtaaaacctaagaatc

SEQ ID NO: 943 - protein, 794 aa, Homo sapiens
MKLKKQVTVCGAAIFCVAVFSLYLMLDRVQHDPTRHQNGGNFPRSQISVLQNRIEQLEQLLEENHEIISHIKDSVLELTANAEGPPAMLPYYTVNGSWVVPPEPRPSFFSISPQDCQFALGGRGQKPELQMLTVSEELPFDNVDGGVWRQGFDISYDPHDWDAEDLQVFVVPHSHNDPGWIKTFDKYYTEQTQHILNSMVSKLQEDPRRRFLWAEVSFFAKWWDNINVQKRAAVRRLVGNGQLEIATGGWVMPDEANSHYFALIDQLIEGHQWLERNLGATPRSGWAVDPFGYSSTMPYLLRRANLTSMLIQRVHYAIKKHFAATHSLEFMWRQTWDSDSSTDIFCHMMPFYSYDVPHTCGPDPKICCQFDFKRLPGGRINCPWKVPPRAITEANVAERAALLLDQYRKKSQLFRSNVLLVPLGDDFRYDKPQEWDAQFFNYQRLFDFFNSRPNLHVQAQFGTLSDYFDALYKRTGVEPGARPPGFPVLSGDFFSYADREDHYWTGYYTSRPFYKSLDRVLEAHLRGAEVKLAAAHARRSGLAGRYPLSDFTLLTEARRTLGLFQHHDAITGTAKEAVVVDYGVRLLRSLVNLKQVIIHAAHYLVLGDKETYHFDPEAPFLQVDDTRLSHDALPERTVIQLDSSPRFVVLFNPLEQERFSMVSLLVNSPRVRVLSEEGQPLAVQISAHWSSATEAVPDVYQVSVPVRLPALGLGVLQLQLGLDGHRTLPSSVRIYLHGRQLSVSRHEAFPLRVIDSGTSDFALSNRYMQVWFSGLTGLLKGSGLCFLAEHPKGG

SEQ ID NO: 944 - DNA, 5131 bp, Homo sapiens
ggggctacgggtgggcgggcgcccgccttcgcctgcgtcgctgcctgcacgcgggccgccgtccccgggcgtgtgagagccggcagctcggccgactgggcccggagcggcgcggaggccgggcgctgacggtaacgggccgggtgtgtgtggaggccagtatgaagctgaaaaagcaggtgacagtgtgtggggctgccatcttctgtgtggcagtcttctcgctctacctcatgctggaccgagtgcaacacgatcccacccgacaccagaatggtgggaacttcccccggagccaaatttctgtgctgcagaaccgcattgagcagctggagcagcttttggaggagaaccatgagattatcagccatatcaaggactccgtgctggagctgacagccaacgcagagggcccgcccgccatgctgccctactacacggtcaatggctcctgggtggtgccaccggagccccggcccagcttcttctccatctccccgcaggactgccagtttgctttggggggccggggtcagaagccagagctgcagatgctcactgtgtcggaggagctgccgtttgacaacgtggatggtggtgtgtggaggcaaggcttcgacatctcctacgacccgcacgactgggatgctgaagacctgcaggtgtttgtggtgccccactctcacaatgacccaggctggatcaagacctttgacaagtactacacagagcagacccaacacatcctcaatagcatggtgtctaagctgcaggaggacccccggcggcgcttcctctgggcagaggtctccttcttcgccaagtggtgggacaacatcaatgtccaaaagagagcggcagtccgaaggccgctggtgggaaacgggcagctggagattgcgacaggaggctgggtgatgccagatgaggccaattcccactactttgcattgattgaccagctcatcgaaggacaccagtggctggagagaaatcttggtgcaaccccccgctctggctgggcagtggacccctttggatacagctccaccatgccttacctgctgcgccgtgccaacctcaccagcatgctgattcagagagtgcactatgccatcaagaagcactttgctgccacccacagcctagagttcatgtggaggcagacatgggactcggactccagcacagacatcttctgtcacatgatgcccttctacagctatgacgtcccccatacctgtggcccagatcccaagatctgctgccaatttgatttcaaacgcctgcctggtgggcgcatcaactgcccttggaaggtgccaccccgggccatcacagaggccaacgtggcagagagggcagccctgcttctggaccaataccggaagaagtcccagctgttccgaagcaacgtcctcctggtgcctcttggagatgacttccgatatgacaagccccaggagtgggatgcccagttcttcaactaccaacggctctttgacttcttcaacagcaggcctaacctccatgtgcaggcccagtttggcactctttctgactattttgatgccctgtacaagaggacaggggtggagccaggggcccggcctccagggtttcctgtgctgagcggggatttcttctcctatgcggaccgggaggatcattactggacaggctattacacttcccggcccttctacaagagcttagaccgagtcctggaagcccacctgcggggggcagaggttctgtacagcctggctgcagctcacgctcgccgctctggtctggctggccggtacccactgtctgatttcaccctcctgacggaagctcggcgcacattggggctcttccagcatcacgatgccatcactggcacggccaaggaggctgtggtggtggactatggggtcaggcttctgcgctcccttgtcaacctgaagcaggtcatcattcatgcagcccactatctggtgctgggggacaaggagacctaccactttgaccctgaggcgcccttcctccaagtggatgacactcgcttaagtcacgacgccctcccagagcgcacggtgatccagctggattcctcgcccaggtttgtggtcctattcaacccactggaacaggagcgattcagcatggtgtccctgctggtcaactctccccgcgtgcgtgtcctttcggaggagggtcagcccctggccgtgcagatcagcgcacactggagctctgccaccgaggcggtccctgacgtctaccaggtgtctgtgcctgtccgcctgccagccctgggcctgggcgtgctgcagctacagctgggcctggatgggcaccgcacgctgccctcctctgtgcgcatctacctgcacggccggcagctgtccgtcagcaggcacgaagcgtttcctctccgtgtcattgactctggcaccagcgacttcgccctcagcaaccgctacatgcaggtctggttctcaggccttactgggctcctcaaggggtcagggctgtgttttttggcagagcatccgaagggtggatgaggagcacgagcagcaggtggacatgcaggtccttgtctatggcacccgtacgtccaaagacaagagtggagcctacctcttcctgcccgatggcgaggccaagccctacgtccccaaggagccccccgtgctgcgtgtcactgaaggccctttcttctcagaggtggttgcgtactatgagcacattcaccaggcggtccggctttacaatctgccaggggtggaggggctgtctctggacatatcatccctggtggacatccgggactacgtcaacaaggagctggccctgcacatccatacagacatcgacagccagggtatcttcttcacagacctcaatggctttcaggtgcagccccgacggtatctgaagaagctccccctccaggccaacttctaccccatgccagtcatggcctatatccaggacgcacagaagcgcctcacgctgcacactgcccaggccctgggtgtctctagcctcaaagatggccagctggaggtgatcttggaccggcggctgatgcaggatgacaaccggggcctaggccaagggctcaaggacaacaagagaacctgcaaccgtttccgcctcctgctagagcggcgaaccgtgggcagtgagcctgactttttctccaaactggcagccatgtttaggggcttgatctttcacagcagcaggagcggtaaccgagaggtccaagatagccactctaccagctacccatccctcctcagccacctgacctccatgtacctgaacgccccggcgctcgctctgcctgtagccaggatgcagctcccaggccctggtctgcgctcatttcatcctctggcttcctcactgccctgtgacttccacctgctcaacctacgtacgctccaggctgaggaggacaccctaccctcggcggagaccgcactcatcttacaccgcaagggttttgactgcggcctggaggccaagaacttgggcttcaactgcaccacaagccaaggcaaggtagccctgggcagccttttccatggcctggatgtggtattccttcagccaacctccttgacgttactgtaccctctggcctccccgtccaacagcactgacgtctatttggagcccatggagattgctacctttcgcctccgcttgggttagggcttcttgtggcctgaagagaaagttcattcacagagactgcctcttaacatgaagatcattggacaagccacacgggtatcccatcccgatctgcctcccagaactgtgacacactgggctctgccctcattttctgtttattgctgctgctgtgttttcggcgcaacccacaaacccagtgatgggtaaatagggcagacgccagtgagatcagggagagaaggcccttggtcagagtgggcagtgccaggctctgctttgggttgtgagtggacacccaactgggcacaggctcaggcacccatcctttttccaaacagggatatagaagtggtggaagcagacagaagaggtaagggaggctaagtgggtaacagcccagcatcagggtcactgtggcaacagcaggctctaggggaatcctgtggttatgtagagactccatgtcctggtgtgatgagcaggatcagagtgactctgggaggacaggggtggggacccagagttagcagtggggatggagcagtagaaggaatcactgtttctcctaggagtctgaaggcctcgctgctttctgtgatggctttgcagtaagtgccgcctggcctgcatgcattggctaacaggctgcagaatggcaggaaggactcgctagagattgtcatggccagagatcataggtcacttcaggtagcaagacccctggcaaactgggcacttggcctatgtactgatttgtgggatggtggcaggggtgtggggtccttcaccctgcctgaattctctttggcttctgtgctctgtatgctgctgtccccaagagctctttcttattatggcagggagtggggattggtcctactttctttctctggaaaggaaagcctccaagactccatgtgcttgggcagcttgagaaggcgttcagcaccacgcctagcaggcagaccttgaagcctcacctttagtctatctgcagaggtattcagttcctggcacaggggactaggggcatgtagagtatatgaggaggcagtatggctgtgcaggagccttcatttcagcttcaattaatagggaagaatttatgatagctctatagatgctgaaaaggtatttcgtaagatttaaaatccatcccttattaaaactcttagtaaattaagtctggaaagaaacaccctaatctagataaaggtctgtttcagaaaccaacagtgatggcattctaaagagtcagacgccacaggcattcccattaaagtcagaaactagccaagggcaagctattattcagcagtgtcccggcactactaacccctgcaacaagccagatgaggaacataaggaagaattataattgtcattatttgtagacaataaaactgcctacctgtaaaacctaagaatc

SEQ ID NO: 945 - protein, 795 aa, Homo sapiens
MKLKKQVTVCGAAIFCVAVFSLYLMLDRVQHDPTRHQNGGNFPRSQISVLQNRIEQLEQLLEENHEIISHIKDSVLELTANAEGPPAMLPYYTVNGSWVVPPEPRPSFFSISPQDCQFALGGRGQKPELQMLTVSEELPFDNVDGGVWRQGFDISYDPHDWDAEDLQVFVVPHSHNDPGWIKTFDKYYTEQTQHILNSMVSKLQEDPRRRFLWAEVSFFAKWWDNINVQKRAAVRRPLVGNGQLEIATGGWVMPDEANSHYFALIDQLIEGHQWLERNLGATPRSGWAVDPFGYSSTMPYLLRRANLTSMLIQRVHYAIKKHFAATHSLEFMWRQTWDSDSSTDIFCHMMPFYSYDVPHTCGPDPKICCQFDFKRLPGGRINCPWKVPPRAITEANVAERAALLLDQYRKKSQLFRSNVLLVPLGDDFRYDKPQEWDAQFFNYQRLFDFFNSRPNLHVQAQFGTLSDYFDALYKRTGVEPGARPPGFPVLSGDFFSYADREDHYWTGYYTSRPFYKSLDRVLEAHLRGAEVKLAAAHARRSGLAGRYPLSDFTLLTEARRTLGLFQHHDAITGTAKEAVVVDYGVRLLRSLVNLKQVIIHAAHYLVLGDKETYHFDPEAPFLQVDDTRLSHDALPERTVIQLDSSPRFVVLFNPLEQERFSMVSLLVNSPRVRVLSEEGQPLAVQISAHWSSATEAVPDVYQVSVPVRLPALGLGVLQLQLGLDGHRTLPSSVRIYLHGRQLSVSRHEAFPLRVIDSGTSDFALSNRYMQVWFSGLTGLLKGSGLCFLAEHPKGG

SEQ ID NO: 946 - DNA, 4993 bp, Homo sapiens
ggggctacgggtgggcgggcgcccgccttcgcctgcgtcgctgcctgcacgcgggccgccgtccccgggcgtgtgagagccggcagctcggccgactgggcccggagcggcgcggaggccgggcgctgacggtaacgggccgggtgtgtgtggaggccagtatgaagctgaaaaagcaggtgacagtgtgtggggctgccatcttctgtgtggcagtcttctcgctctacctcatgctggaccgagtgcaacacgatcccacccgacaccagaatggtgggaacttcccccggagccaaatttctgtgctgcagaaccgcattgagcagctggagcagcttttggaggagaaccatgagattatcagccatatcaaggactccgtgctggagctgacagccaacgcagagggcccgcccgccatgctgccctactacacggtcaatggctcctgggtggtgccaccggagccccggcccagcttcttctccatctccccgcaggactgccagtttgctttggggggccggggtcagaagccagagctgcagatgctcactgtgtcggaggagctgccgtttgacaacgtggatggtggtgtgtggaggcaaggcttcgacatctcctacgacccgcacgactgggatgctgaagacctgcaggtgtttgtggtgccccactctcacaatgacccaggctggatcaagacctttgacaagtactacacagagcagacccaacacatcctcaatagcatggtgtctaagctgcaggaggacccccggcggcgcttcctctgggcagaggtctccttcttcgccaagtggtgggacaacatcaatgtccaaaagagagcggcagtccgaaggccgctggtgggaaacgggcagctggagattgcgacaggaggctgggtgatgccagatgaggccaattcccactactttgcattgattgaccagctcatcgaaggacaccagtggctggagagaaatcttggtgcaaccccccgctctggctgggcagtggacccctttggatacagctccaccatgccttacctgctgcgccgtgccaacctcaccagcatgctgattcagagagtgcactatgccatcaagaagcactttgctgccacccacagcctagagttcatgtggaggcagacatgggactcggactccagcacagacatcttctgtcacatgatgcccttctacagctatgacgtcccccatacctgtggcccagatcccaagatctgctgccaatttgatttcaaacgcctgcctggtgggcgcatcaactgcccttggaaggtgccaccccgggccatcacagaggccaacgtggcagagagggcagccctgcttctggaccaataccggaagaagtcccagctgttccgaagcaacgtcctcctggtgcctcttggagatgacttccgatatgacaagccccaggagtgggatgcccagttcttcaactaccaacggctctttgacttcttcaacagcaggcctaacctccatgtgcaggcccagtttggcactctttctgactattttgatgccctgtacaagaggacaggggtggagccaggggcccggcctccagggtttcctgtgctgagcggggatttcttctcctatgcggaccgggaggatcattactggacaggctattacacttcccggcccttctacaagagcttagaccgagtcctggaagcccacctgcggggggcagaggttctgtacagcctggctgcagctcacgctcgccgctctggtctggctggccggtacccactgtctgatttcaccctcctgacggaagctcggcgcacattggggctcttccagcatcacgatgccatcactggcacggccaaggaggctgtggtggtggactatggggtcaggcttctgcgctcccttgtcaacctgaagcaggtcatcattcatgcagcccactatctggtgctgggggacaaggagacctaccactttgaccctgaggcgcccttcctccaagtggatgacactcgcttaagtcacgacgccctcccagagcgcacggtgatccagctggattcctcgcccaggtttgtggtcctattcaacccactggaacaggagcgattcagcatggtgtccctgctggtcaactctccccgcgtgcgtgtcctttcggaggagggtcagcccctggccgtgcagatcagcgcacactggagctctgccaccgaggcggtccctgacgtctaccaggtgtctgtgcctgtccgcctgccagccctgggcctgggcgtgctgcagctacagctgggcctggatgggcaccgcacgctgccctcctctgtgcgcatctacctgcacggccggcagctgtccgtcagcaggcacgaagcgtttcctctccgtgtcattgactctggcaccagcgacttcgccctcagcaaccgctacatgcaggtctggttctcaggccttactgggctcctcaagagcatccgaagggtggatgaggagcacgagcagcaggtggacatgcaggtccttgtctatggcacccgtacgtccaaagacaagagtggagcctacctcttcctgcccgatggcgagccctacgtccccaaggagccccccgtgctgcgtgtcactgaaggccctttcttctcagaggtggttgcgtactatgagcacattcaccaggcggtccggctttacaatctgccaggggtggaggggctgtctctggacatatcatccctggtggacatccgggactacgtcaacaaggagctggccctgcacatccatacagacatcgacagccagggtgcagccccgacggtatctgaagaagctccccctccaggccaacttctaccccatgccagtcatggcctatatccaggacgcacagaagcgcctcacgctgcacactgcccaggccctgggtgtctctagcctcaaagatggccagctggaggtgatcttggaccggcggctgatgcaggatgacaaccggggcctaggccaagggctcaaggacaacaagagaacctgcaaccgtttccgcctcctgctagagcggcgaaccgtgggcagtgaggtccaagatagccactctaccagctacccatccctcctcagccacctgacctccatgtacctgaacgccccggcgctcgctctgcctgtagccaggatgcagctcccaggccctggtctgcgctcatttcatcctctggcttcctcactgccctgtgacttccacctgctcaacctacgtacgctccaggctgaggaggacaccctaccctcggcggagaccgcactcatcttacaccgcaagggttttgactgcggcctggaggccaagaacttgggcttcaactgcaccacaagccaaggcaaggtagccctgggcagccttttccatggcctggatgtggtattccttcagccaacctccttgacgttactgtaccctctggcctccccgtccaacagcactgacgtctatttggagcccatggagattgctacctttcgcctccgcttgggttagggcttcttgtggcctgaagagaaagttcattcacagagactgcctcttaacatgaagatcattggacaagccacacgggtatcccatcccgatctgcctcccagaactgtgacacactgggctctgccctcattttctgtttattgctgctgctgtgttttcggcgcaacccacaaacccagtgatgggtaaatagggcagacgccagtgagatcagggagagaaggcccttggtcagagtgggcagtgccaggctctgctttgggttgtgagtggacacccaactgggcacaggctcaggcacccatcctttttccaaacagggatatagaagtggtggaagcagacagaagaggtaagggaggctaagtgggtaacagcccagcatcagggtcactgtggcaacagcaggctctaggggaatcctgtggttatgtagagactccatgtcctggtgtgatgagcaggatcagagtgactctgggaggacaggggtggggacccagagttagcagtggggatggagcagtagaaggaatcactgtttctcctaggagtctgaaggcctcgctgctttctgtgatggctttgcagtaagtgccgcctggcctgcatgcattggctaacaggctgcagaatggcaggaaggactcgctagagattgtcatggccagagatcataggtcacttcaggtagcaagacccctggcaaactgggcacttggcctatgtactgatttgtgggatggtggcaggggtgtggggtccttcaccctgcctgaattctctttggcttctgtgctctgtatgctgctgtccccaagagctctttcttattatggcagggagtggggattggtcctactttctttctctggaaaggaaagcctccaagactccatgtgcttgggcagcttgagaaggcgttcagcaccacgcctagcaggcagaccttgaagcctcacctttagtctatctgcagaggtattcagttcctggcacaggggactaggggcatgtagagtatatgaggaggcagtatggctgtgcaggagccttcatttcagcttcaattaatagggaagaatttatgatagctctatagatgctgaaaaggtatttcgtaagatttaaaatccatcccttattaaaactcttagtaaattaagtctggaaagaaacaccctaatctagataaaggtctgtttcagaaaccaacagtgatggcattctaaagagtcagacgccacaggcattcccattaaagtcagaaactagccaagggcaagctattattcagcagtgtcccggcactactaacccctgcaacaagccagatgaggaacataaggaagaattataattgtcattatttgtagacaataaaactgcctacctgtaaaacctaagaatc

SEQ ID NO: 947 - protein, 933 aa, Homo sapiens
MKLKKQVTVCGAAIFCVAVFSLYLMLDRVQHDPTRHQNGGNFPRSQISVLQNRIEQLEQLLEENHEIISHIKDSVLELTANAEGPPAMLPYYTVNGSWVVPPEPRPSFFSISPQDCQFALGGRGQKPELQMLTVSEELPFDNVDGGVWRQGFDISYDPHDWDAEDLQVFVVPHSHNDPGWIKTFDKYYTEQTQHILNSMVSKLQEDPRRRFLWAEVSFFAKWWDNINVQKRAAVRRPLVGNGQLEIATGGWVMPDEANSHYFALIDQLIEGHQWLERNLGATPRSGWAVDPFGYSSTMPYLLRRANLTSMLIQRVHYAIKKHFAATHSLEFMWRQTWDSDSSTDIFCHMMPFYSYDVPHTCGPDPKICCQFDFKRLPGGRINCPWKVPPRAITEANVAERAALLLDQYRKKSQLFRSNVLLVPLGDDFRYDKPQEWDAQFFNYQRLFDFFNSRPNLHVQAQFGTLSDYFDALYKRTGVEPGARPPGFPVLSGDFFSYADREDHYWTGYYTSRPFYKSLDRVLEAHLRGAEVKLAAAHARRSGLAGRYPLSDFTLLTEARRTLGLFQHHDAITGTAKEAVVVDYGVRLLRSLVNLKQVIIHAAHYLVLGDKETYHFDPEAPFLQVDDTRLSHDALPERTVIQLDSSPRFVVLFNPLEQERFSMVSLLVNSPRVRVLSEEGQPLAVQISAHWSSATEAVPDVYQVSVPVRLPALGLGVLQLQLGLDGHRTLPSSVRIYLHGRQLSVSRHEAFPLRVIDSGTSDFALSNRYMQVWFSGLTGLLKSIRRVDEEHEQQVDMQVLVYGTRTSKDKSGAYLFLPDGEPYVPKEPPVLRVTEGPFFSEVVAYYEHIHQAVRLYNLPGVEGLSLDISSLVDIRDYVNKELALHIHTDIDSQGAAPTVSEEAPPPGQLLPHASHGPGRTEAPHAAHCPGPGCL

SEQ ID NO: 948 - DNA, 81914 bp, Mus musculus
  misc_feature (1)...(81914): n = A,T,C or G
ttctggattgtggcccagacccagtgtatagtgtgtcgggtaaagccggtgtgtaacagtccaccgtcagctaccagcctacacctcccctgctcccccatccaccctcactacagaagggagaaataacctctcagttccaaggcacccttggcacccgctgctccacaccttactgtacttcaaaggcagtttggggtgggggggtggagttaggtgggaggccgtgaaggctgcctgaatgtgctaactatgggagtgggaactgtagggagatgggccagcacagacagtggcctccagagacctctgtgggtaacttaatgaaatgataaatgtcaagtgttccacaccacagggcacatagtaggcacttaattagtctttatcttggtccttctccaagatcctgaaaagagagaggcagatgaggcatatgggtacctctgagtgcactatactcccagaacaggctatcagtgcctccacagtgctaattagagaaacaattaccacaggtcccggcaaaggctagcatctgatagggtctagctaattactgtcacatcctgacatggggagatgggactctccccatggatgagtagtggcctccagcagggcttgatcttcctaggatactccacatccttgagcagacttgggtcacccccttcctagatgtccctacaccccatgactttgaccaggcccttccttctactcacactggttttagaagactagggtttaagacctggctccgtgcctgctggctactgagaaggttaaggcaaatggcttctctctaggggatcagtcacctgtacctataccccaggcacaaggaggattaaatgagatgctgcctgcctggcacctgccacttcccgggtccctggaggctgtgctgctctgctttccctgccacagtctgagatgggcagctgggtttgtttctctactagctgcctaccttgtcctcagtccccagtgagtccccagtcccctgaaaaagtctgttgtggaggaagacggcaggaatctccagggcaggaggtctgcctccatcttaggctatgtcatcttgttctgtctgtagggagacaaatatggtttgtatgaaaagcctccagagccttcatgggcagtcggagtgggctgacagaggctgggtggggagttttgcttcctattctgaaagcctgattatccactgtttctgacactgctttgctttgtccctgcggtggtaggacagacaaaggcccctgatcaatctctttgctgaggatttgtttctagatgactctgtgtttagggagagataatagtgaaggggcagagagaggctgttgatgtctgtgtgacctatgggcagatggagaaggaaacacccaggactgaggccagctcaggatgctggtggcctccgtgcccttgtcctcatatttctgccatcttgtccccactgccgtctgctctgcttcccagtctggtcctcactggcgggctcacccgctctgtcccctattctctcttcctttattactgtcactatattgcctcctgcctctggcttatcttctgtcatgaatccatccatctctgtcactcctcggagactctcgctcactctctggcacccaggcccagagctaggcgtagggtctctgtgagagctgagagctggtgtctgtccagcactggcctccagctctgcctctgtgtctggctggctcatctgctcctaccaccccacacctgtcttcctgattgtgcctcttccttttagtccccggattccctttgtccagctccaatgtttctcagctctaatttttgagtctcgtctcttgggtcctatatggacttaacctctctgcctctttcctctctgtacaagccctgcatagtagcgggtccaagcctccagcctgagagtggatgtagtctgctctcttgctggctgcctccaaagccccgacaatgccctccgccccacatcatgccttgttgctaggccttgggcttgcagcacctggcttccatagcgacgggtgcttagaaaccgaacaccacatctcctggtcccagtatgggagtctgctgatcgagtgactttggatcaatcaggaaatgtggctgcttccagtgcagaaagcaagagaagaaaggatcatgatctttgcctcctagagcctgggaccactgcggtaggaaaatgaggctaccaggagggaggcccctatctctcctgcctgaagccagtctgtctgtaaggaacaagagcttggggaactggaggcagctggttgttccaccattcctagctgtgtgaatttagacagtgaactcaatctcaccaattgaaaaatggcaccaatatcacaagatgaatcgagcatgaggatggtccccactgttccctttcttccttgtttaactggcagagaagagcaaaggttctcagacatgggagatggtgcaaagagcggagctggagagcctcacatatgcagggtgatcggaaaggaccaagagccatatctggagatggttctgccacaggagtaccacaaaggagggacttggtctcctggtggtggtgggtggtggtggggtaacttgaacagacttcaaagggtagcttgaacaaaccctcttcagccttcaaggctcccagagtagagaaccaagtggggtcccttagtctattctcagcccctccttgtcaccgaaccctatgaatgtggcatcagctggttcttcctgctaaggtcttcttgttgaggtcaccataacagcaatagcctaaatcctggcctgtaaaatttgagcatgaggccaagggagactgcatggctcatagtctcactttctaagggaccacgggatggggagggaggagcaaggtgggcctcgggggagcaaaggccagcagtaacatgtcacttgggctttgggttaaacatcctgtgcctaaaccatgcacactcatcctgccagggactgcaaggcttgctgggggtggggaacagccagtgctgtcttttcctcagctcctcagcatgcctggctctgcactgttgctcatgggttctctaatttatccgtcatgacccgaggaaagccagctgatcgcacagtgagaagcaagagtggactgtgttggtgcttattaggatggtgacactggactgagtcatttacactggccccgttccttccctgtctttgcaatctggggctccccatggctgttggcactgcctgggagagtggtgttatttctaaaggcctttccagttgccccttccttggtattcagagactcaacccatagacttgcaaggccatagaaacccagatgtgagagtcttgcctatatcatgatgttagtgtaaaataatattaaaattcacgggctcttgcactctgaggactccagggctttgaattcatagaatgtaagcagcacggattttgaaaatttcttagaacacgaagctgtgcaagtttctcggagccttgaacgcacagactgacagactccctgaaaggtctgtgagttggctgagtatggggctttggatccccgtggcttatagtgtcttacctcagtttcccaaacaggccctgctctgaaaaccccagggaaggatgtgtgtccaggaaggacaagttaatgattggttgtactatgagacacccctggagtctgtcgagctcaggaatggcagctgcttaagtagggttgtgcagggctgtgggtggccacaccacgggagggccagcccatccattcagtactcttgcagcttaggttcaggagggctgcattttacatggccctttcctagtgaaggagtcagaatagcttcctcccctgttcttgtagatgtcaagaggggagaaacagggcatcaggaggaaagtgggcctttatatgaatggatagggatgtggggatgagcttggtagggctcagtgatgggcaggagatgcaataaagggggactcagtggtgagaggtgggttaagtgagaaggcaatgaagtccaggagagacttcaagtccacgatttctccggaatgcctgtgtactttgatcaggttcctgagataatggatggcattgggtatctaagcaccttgaactcacttgctgacctgagacaggccagaggtgagagcccttcttcccatggctgcccaaagctgtacagaagatatccaggactgctctaaagggacctgcctcttctcctgcctggctacttcctgcttcccatgggaagctggacctcaggaaagccaggctgacaggatgatgctataagggagaagccatctctctcacacatgagaaagcaccagctgggaagaggtaagctccctgtccccgggagtgtgcaagcagggatggagtggctaggacgagtgacgttagggttctgatgggaggagaaagcagcctagagggctctttgctgaggccgttggactttgagtagtttattcaagcagtcctatcttccagatgtgcctgaacatcatagagtggttgtcataccctgggatccgctgtgccctaggctttactctctgtgcccagcctgtgcttgggcctgagtctctgtagctcgctgcagactcaatctctgccttaaggagctgtatcaggtgggggaggtacatgggggaaatgcatcattaagcaagtcctactgagggaggatgaacaggctgggggaaatcctacccaattcctggatgtgattttaagcaatggtaggccaagccttgttctagaagctgagtttattataatgagcaaagcaaaaatgtcccatcacaggggatgacagcatagtggggacagtgcctccagacagttaaaggagtgttagaagggaggggttaccaccgggcagagcttcacctgggcttaagggcctgacagggattccactcaaaagcagggcatcctctgtgtcctatgggcagcagggattcgtgtaggcaggagtgagaccaaggttgagttgggtaggagagatgatcacagtaggagtgagcatgggggcaatggtagagtgcttacagagagtgtgtgtgtgtgtgtgtacatgtgtacaagtgtgcacgtgtgtgtctgtgtgagtgcatgtgtgtgttcatctgtatgtgtgcatgtgtgtatgtgcatgtttatgtgcatgtgtgtgtgcatgtgtgtgtctgtgtgtgcgtgcgtgtgtgcaggagctccaagaatggatgtatacttgtgtctgtggaaaagctgttagtgtttgggggtataaggtgtgagtttgtggggctcggggccactttgtttactactggaaggattatgtggtctgtggatgataaagagaagatgttaaggtttcaggggtctcttcagcagggatggtaaaagccagaagattgacctcatgggttcccttcctcccggaggttcatggcattgaccacctgctgcatacaaaacaaatgtgcatgcaaatgagatggaaatgggtgacccaccccaatcatcaaacagaagaggttgggcaaagaccaaaagtttgaggagaagccacaagctctggatggggggaggaggtgtgcatggcagaggaagagccttgccacttgggcttctggaagcctagggaaagggtttgtataggcatgattagagcagctacacttggagccttgttctgcaggcacaagatgttcattcaaaatgataagaacacaaaatctgaagcccagataactgcttgaccaactgtttgaacccaggcaaggactatgcatctgggagctccagttttgtttgtttggggttgtttgtttgtttgtttgtttgtttactgtatagcacggggcttaatcaagacctcacgcatagttcctgggtacacacaggtcccaggccctgcagacacaggtgcaggtcctatgagagactggaggtcaggagggtatggtacccagagtggcaaggtcttagtggagtcacctttccttaaatatcttgcctaggacaggggtttggaggaacgcctggtatgggccaagcagacgctaaggaagggagacaagaagaggtctgaagcagctttggaggacatctggggatgagcttcctggtgtcagggatgagcagaggctgggcgcactgggcatagcatccccagtccctgtattgttggggataagagtatcctaactccattttcctttcctgccttttcctaagcatcgggcataagcttaagatacagatgataggtggccaaggctggaattctgggctgtggtttactcgctgtgtgagcatggacatttacttagtctgggtctgtggtttactcgctgtgtgagcatggacactttacttagtgttctgggccttccttatctataaactgtgcttgatagggactcgggagatagtccagtctgtgaagtgttagccttgccagaccagggcccagtctagtccagaaaatatgtgaaaattctggttgtgtggtgttccttgatcccagcactggcgaggcaagcaactggaggattctgatagctttgctggtcaaccaggaatctagcctaactccatgatgagctccatgctcatttgagaaactaatctcagagtagaaagcacccttgaggatgactcttgaggctgtcctccagattctacaggcaagcactcacctgtgtacatgtatgtccatacaaacatgcacacatgcatactcacatacatgtacacacatcagttctactttatgatggagagggtgtgtggcttgctagtgttgaagtgttccaggcctagatgtgcaactcaaatcttagtggtcaggctcgactcttgccttcataggacagggatcagctagaatctaattctcggctttcagactaggaagtactttcaaatcattagggagaaccaggcatagtggatcacagactgtagagataaggagccctgggatttatagggagctctggggaaccggacttaaccttggggtggcacaattcctagccatgagagtttggcaaggtccttccctttgcaatttggcagagctttggttgccccaactgtgagaggactggactaagaaattcagggacttcaggtgaagatgaagcctaccaagtgctgtaaggggttaggttgctcatttattgagtctagatgtgttaacatttcacagatggggcagtggaggccccattggccacatgcagcagccctctgactgagtgaggacacactcagtcctcttgatgaatatttgactcagaacaaataacacacaaagacctgagggagacaaaatgtgcatctgagactatagtcaccaaagcaggagagactcaagtaggatttaaaaaataacttctcaggaggcaagtgctgtgaaggtccctaaagatgggtctttgccagggtggggctggctctcgactgcagagctaagatgaggtcccctgaagatccagtagctagggtcagtaatcatgccagcacctcctgagcacctgtgtcttacttagagtatctgaaagcctgggaccaagccagtgacatgtgactaggattactaaggggtatgtgtactggacctgggaacagtcatcatcatattggtcatcccccctcttttacacaggaggaaactgaggccagaaaaaggagagtcccactgaaggagtaggtgtaacctttacacatcttagcccatgcatgtcatgttctataatgttaatatgtaggacaaactgctttactaagaagatgcacttgggaggcagaggcaggcggatttctgagttcaaggccagcctggtctacagactgagttccaggacagccagagctacacagagaaaccctgtttcaaaaaacgaagaagaagaagaagaagaagaagaagaagaagaagaagaagaagaagaagaagaggaagaggaagaggaagaggaagaggaagaggaagaggaagaggaagaggaagaggaagaaagaagaaaagaagaagaagaagaagaggaagaagaaggaagaaggaagaaggaggaggaggagaagaagaagaggaggaggaggaggaaggggaagaggaggaagaagaagaggaggaggaggaggaggaggaagaagaagaaagaagaagaagaaagaagaagaggaagaagaagaggaagaagaagcagcagcaattggcttagatcccatctccagacatgactcccaggaaggatacaaaaaggccccccctagatcactgatgtggaatccagaaaaggggtcttggagcagatggcctctgagttgctcttgaatggttagcaggtgacagggtggcaccatgacagaccaggaggcaagaatgaggcagctgctgtctaaaagaaaagggctgtataaaaacaagggatgggggttgtcagagctggtcaataatcagggttgaactgtggaaggtctgtaatgccaagtgagagatttaggttttatggtgctcgtggtagagacccccactaaggatgtttgagcactggaagctgtaagctcagctaggagggggaaaaatccttgtgtggaagatcaccccttgagctactgggacagctaggacacttccaagcctgtgccaggtgctgggaccgtgtccagcactgggctcagtgactcaacactggggaaattgctccccagggggaaagggcccaaatgaatcacatctatgaggcaaggagcagggggctcactgagtcaccttccaagggctggggggagagggaagtacaggaagaggggcagtagcgcagaaaggagaaccagggaaagtcacagtgagggctgtcaggagtctgtctgtctcaccatcattccaagtttttgtcttctggcagccctgtgggacaactgacacccaatgggaaggggatcaagctaaagttacactggcaaaatccaggaagacccaaattcaccatttgatatagactcgtcctgtgccttagcccatcttatagcaagcagaggctagaaaacaggttggtccaggcaaggggtttgacccaagttacacaaatgtcccctcatccctccagccatcccctactggggtcagggtgcacctttgcgatagaacaccagggggcgcaggagcgtcacggctgctgcaagtgcctgagcacagaggccgctctgcagagaaatgcgctcccagctctcggggtcccaccgcggaactgcggactagatggccctggggcttgcacccttttcagcctcctgggacgccgatgaaggcctatctggtagccttaggaacccagtgctctcaccccacatttgggaacagtgcgcctgtgtgtgtcagggcgcacgtgtctccttcacagatctgctaccgcttcagggctcgtcccattttggagcgacctctaaatttctccctcactttcctctaccctctgtactggaaggagtgaaaggacctcggggctcccggactgtggccgcggcccctctccccgcactgcgctggactcggcctcggggttctggccgggctactgaagtccaagtgatggggagagaatgtggtgcgacagtgcgcgggactctgggaggggccctaccacataggaggagtgacaatgggataagcggaaggcagcgaaggctgagaggcgaccgaggagtgggagccctcgtagccgacccgctgcaggagacttgagagggtgaaggcctggcagggagcaagccggccgggatcgggtggggtccgatctttggaaggcgttgaagtgctgtcccccggtagcagaaacgtaggcggggcctggaggcctggggcgggacgggggcgggggcggggcgggaccagggcggaccctcgcgcggaccggcgaagctgttgcggacgcgctgaccgagtgcagcgggccgggctggaggggcgggcgggcggctgcgagcatggtcctggtgttgcaccacatcctcatcgctgttgtccaattcctcaggcggggccagcaggtcttcctcaagccggacgagccgccgccgcagccatgcgccgacagcctgcaggtaggaggccccccccccccccattctgggtaacagggagaagcgggtgtccggggagagcccggtgagggcccggtcttctgaagagcttgcagtcgtctgccccacggtctactctctcctgaaccttcctttaagaggggacccttcccttagtttggaacccgtcttgtactgaatgggactgcagccatacccagagggggtccttgattcttcggctcatagttcaaatgcccctccagattctgactctgcttcgcatctagaactcctccatcccaagccccgaagtcctaatcctcgttgcccccctcagccacattaacagctctgtataaacccggagttccctcctcccaggttagccccactcccctctcaaacctctggctctctactgtacatatcagattccaggcacacccatatcccctaagcccctggctgcagagaactttacctcataagtaggacctcacccccaaacctctatcttctattttataaagtcttactccccatccttactaatcatctagattctagtcaccatcttccacccaacccaagggtccaacccccttttaaaacccagattctcttttctcctctgccagactgccccctcccagtcctcatcttttacacagacctccagtctcctcctgttgcctcccagcctctagatgtgatagtcccatatcattcttccagttcccaaatttctgagtgcatcatcctttggcccctctgctgttctcttgtttagtgtgttgctccaggctgcctacctctcctggtctgttcagcccttcagtttctgtaggtctctatctttgtgctagggtctttctgtgaccatgccttccctacatgtctgcctctactttgggtcgtgggggaaccggctcagaagacagggctggagcctctaggacctccacctgtgcctgtgttctcaggtatggcataggatggactcaagtccaagggcttaaacatggagaacgttgccctcagggtgcccaaaatatatggtgggtagggatcgtgaggtgggacactggtatttataacttatacatgatatctccttatcccagctgtcctggtagtgactggggcagttgggtttggggatagagagagggggtaaatgtccttcacctgtagtgagggatgggtgagtctggggtatatgtgcttatgtgagggttcctgtgtacatagcatgtgttgagtgtgccttgtgtgtaatcatatatgttgtgctatgtataatcacatcatttgagtgagatttagcatggggagatgacagtatggagattgtgagtctgtggtgttacatgctctgtgtgactacagtggcaggatcgtgggtgggagttgtagcacagcgagtgactgtggtgtgtgcatgtagttgtgtctgtcatggcattgtgatgctatagggacagcttgcatgttgaagactgaataagtggctatacatgctatttctctgcagtatgtggtcagaatgagtcctagtatgggcctgttggtttcgaatggatgtcctgtgagagaggagtggaggtttatgtctggctgtgcttctagcctcctgggtagcttagggtcactatggtacatcctgggtttgcttggagaaaatatttggacgcctgtgtgttagtgtttgtgtgctatgtgcctgtggtgactgttcgtgcaactatggatgagaccgggtgcagccaaaacccagggtccggttcgctcagcagctggttgaccaggttggagggtgggcaggagaaagcagtttccagactgaaggactttgtgtgtctacaaatgggtgatattttggtctgacattaagcatgcaaattatgcagaatatgtctgcacatgtgcttctgtgtctgagtggtgtgtgtgcatgcatgtgtgtgtttagttgggtgcgtgcatctgtggctaggaaggtgagtgtgaggtgtgtgaggtgcacggtgggagatggagtctgagtgtggtgtgaagtgtgggtgtgggtgtgagccttgtgactttttcagtgtgaggtgtgggttctgtgatcttttctccctgggagctgttggcatgtgatgaggagagtgtggggcatggacagtgagttaggatgagttagggatgccttggggcagggctgaggtctgggcagtggagtgtgtgcataaggtgtgtggcctgagaaaagaggtatattatgtttggccatgtgtgaattcagcaggtgccccataaatgtttgtggagtgacgtatatgtgcaaggcaggcttggctgccttcctgtccttgctttccttctaatcaagtccctagagatgccctcgcctgccctcccaacccaggctgcccctagcctttgcccttcatccttctcactttgaccaaagcctttgtcttgagtttcctgctgagcaggcgctggacaggcgggcggcgggtgatgttgtggtcagggaacctttgttcttttcctcttagcttgtcccgtgtttggggccaggttttagagggtggggagaggatacacgtgtcagcaagtctactgtgtttactacaacctcagcagaagggagggtctagcactgaccaaaaggttggtggtgtctctggaggtgcccctctatgccagagcagactgtgcctggagttgaccaaacctgaaaacagtttactgttcaaactggggtggttaggttgtctttctgggtcaatatcacctcggcctgaccaaagcccccccccctcggtactcccctctcctcctcccttcactatgtcgtcagactgggagacagccagaaagacttcagtttgtatctgcctttgttgaccccacatcagagatagacactgttctcacagaacccattacccgannnnnnnnnnnnnnnnnnnnnnnnnnnnnnnnnnntcacatcatactctccagagaatgctctgggacagcccttcccagcactctcaacaggtgttgttaaagaacattcaggactcctaagttggaggcacagagccatcccagttaattagaaaggggctggggcttattcagcattatcttctagaagattcttcaagcgagttgtgcgtaagctgggccttaaagcggtgcgtggtgggcgtggaactgtggtaggaaatcatgctgtgtctgcccaaccatgccagcagcgctgcctggcttctggttgccatccctggtctccagctttttgttcccttttttacccatcgtctttggctgagtcactgtcataattgtggtcgccatcatcgtttagctagttctttctaatttctgggggtcctttgatgacatcttgcctaacggctgaactcatgcaaatgcctacaagcgttggcagaggccctgctcggccacacaggtaccgtttcatgcattaggatcatttggtgggattcttagcttccatgtgcaccagttcctcctcatgactctctcaggagctccccagcctaaattgcacttggttctatggagtcttccatatccaccccattggggtctgccttcctgtgttccaaactaggtctgtctcctacttgttattggattgccctggagggttggcagcccacaccgtcagctagaggaactgaagccctgagcaggggagttcctcccagaacctcatccctctaacattctcagagaggaagagagatggctgggccagggctcacagcgtgtggcagggatgataccactgtccagctttcctggccaccaggctgggctctggccccagcgccatgctgttccttggctggcctctgtactgcctgtggcgggtaaatgattattaatgacccccctggcaaagagacaggaaatgcttcccagccacagctggggcactcttgcctgccagcctaccagctgtgcccgccctggccatggggtgagcatcattctatctatgtccgttcttccctgcatcctaaggcctccagccccccctgactttgacctcccaggaatgtccttgctcccaacctctcatttcaaccatcttccttgtctcaatcaagaaacaagtaacccttcttccaggaagccttccttgaatgttcagccagttcctctggtacctgctctcgtgggcttgagaacacaatgtctctgccatggatattctgtccttactctgatggctgctctggtgactctaggactgggctgaatgctttctgtagtctttagtccagtttcccagggttcttgcaccccttgctctgcctgtcctaactacatactctgtatactgccaggccttccttaggtgaacactctgttaatagcaaggtgagagatgagcatcctcaagtctgcgcaatactagcccgtggcaggtagctcagacgcaggtgccaggggtgaggcgggagggaacccagacagaggctgatgtgtgtgactaaggcagagccgactggggccctgagcccagcgttagaggaagagcaagctaggaagctttcagaaagaaaacaactctgagagcagagggatgagcctggagaacaccctggagaaaggaggatggtaatgtggtggtttggtggcagacacggggaagaagactggcactctcaagccccatgtttgtgcttatggacctgaaccctggactgccaaggtgggcaaggcaggggagggacctcgggagacaggagatgtggctggtgaggctggcaggatccaagatgctcagggcttagaaaccatgttgaagattctgtatggtttccagggagttggcatgaggggagggactggatgtctggcttgtgaaggattgcatgccgctccctggagtggaaactgaggcttaggctgctgcggtccatgctggggatgatgggacctggtcagggaaaggacagcagggcgaggactccgtgctggaagagggagcccagcaacagaggtgggaggagaaggggagaagtgaggtgactgggtgggctctgtgtagcctctgagagcccaagagaggagatggggtgggggtgcaagcctgggcctgaatccaagaagcaccttccaggaggtcaccagccaccagactaacaggggacttggatcccactcagggctgctgtattctcatcaatccatatgtgggcaactggtgttctgcccggggcagcgagcgtgttcagaactgggggaaaaaaaaaaaaaaaaaaacctaaaacaagctgcaaaaattagtagacttcaaatccaaaaaaatatatgagaagaaatgtaaatttatgaaaatgagcaacgtacctgacccttctcatgtaaattgtagactgctgcttcactggacttcatagctcaggcttctgtgaactgtctctgatgtggccaccccccagggccccggccttcctgttttgaggagcctgcccttcctttccagctggtgcctggggtgaaggaagacattttgcttttcctgtcccttgccctgagggaattagccctttgcaacccccatgcacggttggttagcacaccagggtggacggtgggggagacaggctgaaggtattgaagagaaaagaatgagaagaggtggaaaggatgcttgagaggggcggggaggcaggcagcagctgaccccgcgaaaagcatggggtcttcagaacttgaaggttgtccagtcgtcagaaacaccaacctgtataggtgcagccgtgcagtgtcgaggctgggcattgccaggttccttgctttggggtgcactccttctgtgttttctcacttgttaagcgaggaagtttggaggcccatggctctgagggctgtatgagtgccagctcctgagggactgtcatctcactgggaggatgatcgccttctatgactcccagctctcagcccagggctgggtgggtgtgtggctgtgtgaatcctacattctgtgattttaagatgctgggactctgggagcccaagatgcggacattctgtgcacgcaaggattctagaatctgatgatttgatgattcaatgatgctaaatggggctgctgggaagagctgcagccacctgccttgttaatgtcaatgttcagttattaaaaacataacaagacacaatggagacagatagcttggggagggatggcagctccaccccccaagggaaggaggggaggagggggtgccttgacatcacaggagatggtgacccttttagcctggtcacatgggctcgcccctgccacagcagacttggtgcgtgttcatgtgagggacctgccactttctaagcttgtatgccatagcagtcagtcccatcacccactgcctgcatcccccaaagagcaccattcttcctagccctcgaggtgtcttcatagagctgtagatggatgtagacagaaggaggggcctgctcaccccttttctcaacagctgcctgaggggaaaacaggacgtgagtacttcctggacgcgggcgtggagatgcaggaacctttgccagtgagggctggggacccagagagtaaccggaggatagtctctgtgttccctacagacccagctcttatcctgaggcttagggggcctagaagagctgatggagtctggcctgagtctcaggcacaccgtgcagtttgtcacaaaaccagccctgtagtctagtacctcactgccttttgagtcctgcttgtgcctcattacccaggccaggaaaggaaccctggctcaaagggaagatcttgccttttagagcctaaccttggtgaaccccgcagaagcctgtcaaggctgcatgtccagaattccccagcctagtgggctgccaaatcaaaactagtccattacccagcaggtctgacctagggctccctgattcccccggtgcacctcattgccacccagcctttcccttctcctgggatctctgcgacacaggattggaggaaggactcaagttcaagggcagagtccctgtctgccaccctccagccttctcctcccacaggctagaaagcaggtgggagacagctgttctcctcatccacaaggctccattgtatactccctcctgtctcggtctcaagagtagggtctcctgcagggaaccctctgcagctgactggctctcagagccttcctgtggttccccagccaggccttcccctctgctcttccacccctgttctctcatactctctcttggccaggagccccaggcactctcccatccccataggtctctatttctggttgtacaggtgtgactctctcaaaagccagcctagaaaaagtcctagaagatcaagtcgaacccttttcctctgatgaaggtgctgcttcagagagggaaaggtcctgactaaagtgacacagtaggctgtggcagatctctgtgctgtgcccctctcctctaggtcatgggcacaccttgcccttcgcctctggtgtccagggtttgagaattgaccatgatagacacagaatacacaggagcctcctgaagcccagctagcctctcttaccccacagctccaagctgctgtctgtcttctttgctcagccccgtcttctccactgtctctgatgtctagatagccattccatttggcaaactttgaccttgggactcaacttggacctccatgtctggtatgggcacccgtgcatacagacacacagacatgtgcaaagatatcacaagcacaaacaaatcccatccaggttaaaactggaccagatataaaggaggtcactgtggttgctacagtcttctctttgctgtaacccccccgccccccgtgcatctcgtgtgaagcccttcagggtcctgcagatgggatccacctcgctagttcctcagtgacagctggggacatgccttcctccacagtgagatccctcccttcagtcttcaggagcaactcagcttcctgtggctgggtgggaaagccaagaggctccccagaggacagtgggacaatgaggaggaactgacagataagactttgcatcttctcaaagcgggccccaccccaccctgactgccccacctggcaacttgggcatagccctgtcctgttcccctttagaactaaagtttttgtgtgccctctggcacagaggtcaaagaatcgagagcactgataccccgtggtagtctttttgactgaatccagagtggtcaggttcttaagttactggcgatatatatggacaggtaaatccgtattctcaggcatgggggcagggaagtgtgtgatgcagcagggattggcattagaactggggaaggcctgtgaatgcccaactgagattctcccctcatccagttccctatacttggggtcaagtagaggggatcggaagagagagagagattcggtgtctgaactggagcagccctcgttaggagtctctgagggtggtagaggctctcttccactctgtgttgtcctgggagaggagggcattcaggactgtggggacgaggaggcagatgttctgtgcacaaaggggatgtcctctagggtcagatacttatctcagccctcgctcgtcatttcctctgcaggacaaggcagagttagcagggtcattgcacacagggaagggacagactggagccaacaaatgccagcccctatagcagctagcacaggtgaccttgtcgtgccctgggttatgatcggatccctgtagaggtctaaccactcagctacacttgtctggggagatgggcactcctagactgtcactctgtgcacagacattcaggaccagctgaacatgtagcaaaccaggaaaccccaccggacataggggacatgtgagacaaacagacacctgacacagtcactccataagcatccacataccaggtgcagccaccgtcacctcccccattacccccatgagggccagagactcctatagccacaggcaggtgtccagtgcctgggtggggaagagagggatgccaggcagggaacttagctcttccccatgccagactgtgtctcccccatcctacagagcgagcgcctcaggctgtttatttcctttcggggatgggtgttttgtccccctccccctctccccaccctgtccccaccacaggcttccgaagctgccaaatcaaatcagtccctgcaccctcgccaggctggcatggaggccagcagctgacgggaatgaagccaggctcagaatatcccaccgcctgtccgatgctgggacatgcttgggaggtggggaggtggggggggggcaggagtctgcagctggcccaggacaatgcttgccagagaagctggggcttctccaagttgccgagtggtggacctctgagaatcagtgagcaggtcgctggtctgtcaggcctgaagcagcactgttagcagcactctgggggtggtggaggtggcgctgggagaactgggtggaggtccagttgaggcccagaggtctcagtgccagattggtgatagctgtttgcacacacgtcacaagctcttgggattttcagcatctctggactttgagcgccaaggcccagcccactctggagagtcactgactacttcaggtgggtgttctgattccattttacagataaggaaactgaggtttaggaaggcctgagaaagtttcctggagagagaagtagaagtggagggacctcaggatgagtagaactgtgttcatttctataacttgggaactctaggcaaaaaggcaaaatgtgtctctgttctcagagttgagaaaaagcagacagaggtgcccagggatcaagaagggtgttgcagggagagccgggcacaagcagggagggcagactggggagaatgggagaaggcctggtaggcctcagcccttggccttcttgtctctgcagccagccaggacccccttgcacagaagccagaacccccagggagtagagacgaccgactggaggtgagagctcagtgggcaccgggggtggggtgcaggatttggaggctggagctgcacccccccgctcaccctctccagcctaagggcacacacgccaagacccgtcttcttactccatgcccagcttggggtcaggctctctgtcctcacctgagctggaagccacttctgactcctctctggttctccatgtccttccgagtccttgttcactgcagagctcctctcccatccccacccatgcactggccgtgcccccgacatgcattggctgcttgctcccaattgtccccaccttcaccgtgattgctgaaaggatctttctaacacccaaatttgaacctgtctactcacacactctccatggtccccatcctcctgaccttccaaagccccggccgaccacaatctcccccgtccgttcttgcttcaccaaacacctgctgctgacatcctgaacagtcctgggttctgcactagcccccctcctccaggataacctcctcccactctccatcaactccagccccagccggctcacgcctcctcctctgagctctcccacctggcggttgggtgctagggcaacctgttgtctttgcccactgtgtgccgtaagaaccctgctttcttcatactgtgactctcagtgtatgcctggcttgcccctgcactacgagctccctaagcctggaatctgtgtttctcattccctacctccactgatggagagacaccagcccagttccaactgtcttttgggggggagggtgccttgatttaaccttccatgttcaacgggtaacaacaatgggggtaaactgtgggtctggaagattgaaacagagtggtgtgtgtgtgtgcatgcgtgtgcgtgcatgtgcactggttcctgtgtctgccactgtgcccaagaaacctgaggggaagacagtgttgccagtgtcagccccgtggtgccaagccctgtgagcacgtgccctgtacagctcttagcataagctaaggacagctgtgtttgggggaagtcaagactcagagcgggtgctgggggtgggtcagggtaaagctgaggctagatgccttcctgtccattcattaagttgagaaagagatgtccaccagggtttggggcaggggctcaacatggctttcctactgtagcatgaggccttgcagtgggactgggttctgatgctaggcgctggccaagggaagggggagggactggagcgtcattattaatttatttattgccgtggcattccccatgggtgggagctcccaccagagctgggacagatggtgttcctgggagccagcagtgtctcagcagcctcggccacccgccagagaagactgcatttgtcaccagcccaggaagccacaaggggagggatttggagaagctgagaccctctagggttgtggaggctgaaggagcctggctccaggttctgtgtctctgtgtgcagactctgttcctcacccattagccctcctgtctgcaattcacatccggtcccttccccattccaccagtagcatcctctccatgaggcctcccctgagcaagcctttgttctctgctgtcatctctctccctttcctgttgggtcctgtttccctctcactctgattaaggatttcagactggggctgtctcagctctgttctacccacaacccttcactcatctccaaggatggtcatcatcagctctgccatctgggagaacctgctctggtctgggtctgccatgcagccatcctgaacccatgttcctcctctgtaagcagagatgagatctcccgatggataaagttcaggtcggcgcgcttagtagaacaaaggccctgggttccatcctgagcactgcacacatcaggctcagtggtcagcttgggatacaaagtactttgtcttcaaaacccaaaataacactaaacaagcaagcaacgacaaaaaagcccaaacaaacaaaaaagatctcccactgtcactgggacagaaatgcatcgttatcagcataagcctgagagaagctgcagggttcatgtgaggcccagacccaggcctgtgccacagcaggttataggaagagctttcttgctcagtgatttgtatagttgggacgaaattatcccccggccctagcacacacacaaggcagtgcacacagtaggactgaaatgaggcttgtaaagttctgtgggctcaggacattcttctggcactggcttggtagcagcaatagtcaccatgctgtcagcagcttctacccagcaggtactggctcagcatactctttagggatggctccctggcctctggccagtgggagggaggggcctttccggctaatcctgagatccagaccctgggacgacatcatactcagtagagacagttcaggttggtgaactaagcacaccaagctaacatctccgagctgggaccagggactagatggggtcctgagagctccagccagggtgaagacagcagcaggtgcaggagacaaggcaggcatggaacaaatgcacagctgccgataccaagctccccagtgcacgcacggtccagccgctgcacctccgtggctgcctttggagaaaatcaagactatatcccttggcatggcactgctccccaggcccactgggttctctcacatccacttattgttcttgaacagtcagtgcttcagtccggtggctttgctccatcttcagtccccccagccgcatgcctcgctagctcatactgactcctccgggttaaacgtgagacgtttcccacctcatcttcgcgcctccctgggcactcacagctctatgtctccctgcacgggcattggacaacttgttacatcacacagagtcagtggggcctggtacacagtagttgcttaacaaagacttctctcatggatgagcatacccgtgtatagggttagagtaggtaagaaggaggctcagtcggtggattagggcagtcatggaggcttctgagagacttcacaaagacataaaggatggagagagtcaagaccagagatcagctgggttgccagaatccacggggtcagctcccaacagaaccaatgaagggtaccaaggaccaggaacacccagatagaagtatctgaaactcagccctaagggtccccaggaggtgggaaggtgtggtttgagagctagagtgtgaagtaaacgctccatggtggagaaggggctcatgcactggctcactggttcactgtgggcagatctgggagccatgcaaagcaaggctggtgctgtggaggagcaaggcttgagtgagctcagatgagcaatgggacaggactgcaggtcagtggagcataggtcctgggcactggggtgagcctgaagggccacagtgaagccatttgccgggcctagttgagcattcccgatcaagcactcctcctgccagctgttcctgctgcatcctgaaatctcacatcagtagcaagtggcctcagtgctgccctgtggcccctgaaggagcgactgccaacaagtcagctatagcatctggcatccatgggggctccaaggccctgccatctgtgtgtgcccacctgtcaggctgcacaggcctggggcataaagagccttgggaccagagaagaggtctcagctgtcaccctagcctgtctctctgtctgcccatccatctgtccacaccccgactggtgagaaaacagtgggaatggccccacaggcaggtccttccatcagaaaagcacagtcagaaggaagaggtgtcagaggaagaagatgaaagccgagataaggccaggctgggggcaagcttaggctcagagaaacaacgggaatggctgagagacacacagcaggtccacgggggtgttggggcagatgctaggggccaggcttgagcatgagagcgagtggaacactgtcccctcccccgctctgtcctgcttggcccttggctgtaaacactctgagaacaagttccgtttcccgggaaatatttatctcgggccgtgtggggagcgtgtgcgttggcctccttgtgtccttcctgcaggttggcccgggcaagaggtgaggggccttggcaagcaggagggacaatctgtagggccgtaggaaaagccaggaaggagggggccgtaccctgagttccctgactggagcctgaatcagaaccgtgctggcctgggagggagggacctgttttctctaaattccacagaccgacctctgctctctcatcctgtcttcatccttgtcagccctgacgctgccaggttcctgtctgtctctaagacactttgctcctgtctggttcctcaactctaagccttttctttttcttctaccccatttcccagatcttggggccttccttaggggtggcttcctctaggacagcttttctaactctctgaccttctgaccttttgtcatctgccctccttctccttcctctgtcaggcttccagactaagacctgctggtcttgtctaaagtcaatcagacaatgtttgttgtagcctgtcaggagtctcactaggaagcacagggctaggcactctatcaacggtgcctatgtggtacctagtgagtatctcctgtgcccatctaatgggaccagcccaagcccaggcactaggacaatttgagtatgttaaggggagtccaggaaaagtcccatgagaccacatagaataagcaggagcccaaagtgttcgctgactggctacaagctgtatgtcccagacagggcccagcccgactggaccctgacaacaggaaacctctgaaggaacatgccttagctgaggtctctgagcacaacaacaggaaacagtgttgacacgaggcagcagctctgtgactatgcccagcaaaggggtgggtgtgggtgctgcttcggtgacactgagacataggtggtgggacaatgggtattctaaggggtgtggacattggatctgtgacatgtgatattactaagtatatggacgtgatcgatcatgggattctgtgtagagagcgaatgagtcgctgagtactcattgtgtggcactctgagatactaagtgtgtgagaccttgtgtatgactccgaggataatgatgggtacataacaggtgtgacatcatgagaatcaaatacataaacctgaggaaatgacactgtgtggtaataggtgtggtcctgagcttgtggccgtgaggcccagtgtgtgccccaagaatatgatatgataaagccgaatgtgtgaataaggatgtgacaggaggtgacatcaagtgtgtgaaaatgattatgatgcatgcagccctcagcctggtgttgcatgtgtgatgtgtaacggtcatgacaaaatgaaatgtgaaccctcaatgctgagtgtgactatgctgtgggaggaggcagggaagtggaacagtacaagaggcagttggaaagatgcccaagtgctgtatgctgtgtggtgagtggagtggcccagcaggggaggccctgggagtctcctgaaacaagcctttgagagggctgtaggctgaaatgattgaatgcattgatgactttggaggtgagagagaaggcagagactgtcatcgtatgggcgtgagaggataataagaatccctgaagtgggctggcaagacagcgtagctggcaaagtgcttaaccagtatgaggatctacatttgatccttccacactgggaaaaaaaaaaaaaaaaggtatggcagcctgcatctgtgatgttgttcctgggaaggcagacaggagaaacgctggggcttgctcaccagacagccaggctgaacgagggcccagggccacggtcagtaagagaccctggtagaagagctaatgtggagagtggttggtgaagacacccgaggctaactctgacttccatgcaggctctgcatgctggcgtgaacactgagactcagctatgcagaggagggatggggttgctaaacggaaggcagggtcgaggaagaggagacatttttcttgtggaacttttaaattttgttctttttttttttttgagacaggatctcattatgtagccatggctggcctggaactcacaatgtagaccaggctgacctggaactcacaatgtagaccaggctggcctcaatcttacacgggttctccagcctatgtctcttcttcctgagtgctgggattaagtgtatttaccactatacctgcctccaaataaaatgctttaagcacaataccataaagaagaatacagcacactgtccagtcacccagtggtcaccacttagtcatgtgcagctcacgtttactctcatcaactttgtagcccctcttcatttttgttttcaattttcttaagttgaaaaaccatttcattgcagtaaaatatgcacagggaagttttctgtccttaaacatattcacactggggaggcaaaggaaggtacatctctgaattccaggccagcttggtctgcagagcaagttccagggcagtcagggctacccagagaaaccccgtctcaacaaacaaacaaactaactaactaacaaacaacaaaattgcttacattgtttctgaaacaagctccaaactctttctatttcccaaacaaactctacctgtggaaaagccttctgcccgccccagctcctggcaagctcctgccactttctatctagtctctgggggcctcatctaattggaatcatgcagtgtttgtcttttgggcaactggctttctctcgctgaacatattgtcctagaggtccatccgtgttggaacacgtgacaaggctttcttcctcttatggccaactgattccagtgcataccttcttgcttgtctgtttgcccacttatggccactcgtgtcattttccactgtctaggtgctgtgatatggctcctctgaacacggttgtgcaaagatcccttcaatactctgccctcgatgaccttggctatatagcagtaatactcttgctggaccatgtagtaaagatccacatttgattcatatggtttctttttctttttctttttttttagtttctttttttaaaaaaagaattaccttttattcagtgtgtgtgcatgtgtacttgtgcttgtgtgtgcgcatatacaccatagcacacacatggaggtcagaagacagcttgcaggagtcaattctctcctctgccatgtggatgccaggaatcaacttagggttggtggcaagcaccaacctgtttgcaggcctgtttgcattgccatttgtccctgaatggccttgaatgcgtgatcttcttgccttggcccactgggtcctggagttacaggtgtgcactagcatgcttggctgtgttattggttttaggaatagccacatcatgtctccctgcatcagtttctggtcctccccacggtatataagggtgtctgtctctccacaccttagccagtccaggctcttttctgatttctctggtaacagcctttaggatgggtgtgacgtggcctctcgctgtagctttgattttcttttctacacaattagaggtgttgcgcatccttccacacagccagcctctgtgtatctagtgtgtgtcttctctagggaaacgtctactcaagtcctttgtttatgctttaggttggattgtttgctttctgtgtcttttgggtcacgggatttccttatgtggtaaatctttactagatacaaaatttgcaagtattttcctctcattatgtgggtcattatgctgaaacatttttattttatttcatttaacttagattctgtcttgcccttttcaacccttctacccagtgttccccctgctactttcaaatcacacttattcctttatttattcttttatttatttgggggggggctgagaggccctgaggtggcaatgaaatgaaacagtgtggcacagagccagcatggaaacctatcctagagccgtgacagggtgcaacactggcccgatgtgatgtgtgacacagagaatgtgagacatccccagcggaggtgacaggaatgaatcactgtgtgacagtcaaggtgggacactgtggacactggagcgaccctgtgtcaatgactgtgtgggacctgctgtgagaaggtcgcagtgatttgtgtccatgtgtgatatcttggggtgatgtgtgtggcacagggcataactctgtgggagtgagagggactggagatgctttgtgagtgactgtgtctggggtcagtcgcagtcatacttgctgacgtcagagatgggggatagatgacattgtagtatggacaaaagacattctcaactgggatagaaatagtgtctgtgaccaggtgagaggagccctccctgctccagatacccgggaaggaatcacaggagaggctacctcaccctggtagaaggcttcagaagctgaccacacccaccaaaggcagtgctgtaggttctcactgaagctcaccattttatttgttgagcctcagtttcccccaagtaccacataaggctgttgatgggattataggaagtaatctcccataccaggtaaaggttctgcctcttgggggcacgtctccctcaaacctggaccttcaagggagctgatgggagcacccaagggagcacctgtgagagatgtgctctcatgccctcagcccttttgtctttccctgttcactttttcctgtccctggctcagcgttgtggcttttatttgttcctgcattcctttcttccagactcctgctgtactcaccagcccatgagcctccagcacaggttcctgaggcctcattcaattaagaccgatgcaatttgctcatggaaggaaagaaaaaaaacataatttggttaatcacaccagtaggggatctggacctgctggggaaagcggggaagggtaggagactcatacaaacagctgaggacataggtgtccactgcttgtcccaggaccctgactactcctttagtttcttttaggaatcaacagagtccaaagcttgggtcatccaaaacctagctagaggctatgatacaggagtctgttcctgaccctcccacatacacactggtgtccctagttgagtttctacctgactctgggcctgcttcctagtacatgagagttgggttgagctgtctcagagcccccaggctgggctaaatgggcccagtatctcagctgcaattcgtgcccctcatggctcctgtaggacattcttcctgggccatggagatggagggttcaatgttgggtcaaggtgggagagtcctaggagttagggaatggagggagggttgtcctgcaggcctcatctaaaatgtagcattctaattcaagtcagagtccctctagtccccaggctgtcctggaggtgggacagggagaaaagggcctgcaatttgcttgttttctccaaggtcagtgcatcttagccatacatattatctcttggcctccagaggagctgagactggaactggggccctctctcctcatgcagacttgcctttctcgacttgcccaaaggtggtccagccacctacagtccactgagacaaaccttggtagattctagctctggggaaggtactgtttgctgatcagaccattgaagccagggaggatgtttggttggttggttgtgtggctgttttgttgttgctttttaagatctgttgagcacgtgtggcatgtgctggagcagagaggtgggtcctgctctcaggaaggcgatggaggaggggagccgtgcacatggcagagactctgactctggagatgccaacactcagcgacagacttatatgctcatttagacacaggaccagacaccagggcattcatgatctcccagacagccacacactcatgaacatagcagactcagtcaaccttaaagatacacatagggccacatggatacagcggatacatggatacatgcactttgctcttctacagttttccacagaagcatagaccacatactttcacaccacagatgtttctctcatgacccaagggacatattccgctatggtcatgtgatggtccttagggacacactattatggatggcatgtgtttaggtcaccagtaaagtaagagctcccagctctccaaagaatgaggggtaaaaaaaaaagccagttctgatgaatgtacccagagtttcacaacaagaaaatagtctcaaatgctgttaagagtctcctttgcaaaataaaacttgttttgcattacccagagggtctgaggctctgggaggagggtattgtctttcagagacccctggctcacccaactctggtgtgtatggaactgtgtaagcatgtgtgtgtgtgtgtgtgtgtgtgtgtgtgtacatgtatgtctggccccagcttccaggccctgaggatatgaggagggagagtgggagaatttctgcagaatccggatgtttgttctctagcttctgggccctccaaaggcaaataaatagctttggatgccagcctgctgctgggtggggctggatgagtgcatgaagagcctgcttttgtccctggaaccccaccagctgggatcctgtacatcaatgcacagtgacgaaggtcctggccagtttctgctgtgcctctctctggggattggttctctcagctgaaaaatggaggtagggaggaggtgagtcccttggagattgagagagacaatgacacttgggatctagaacaaatgaaaataggatgggggtgtggagacctggaggggataataagagtacagatgcaatacatggggcccccggagcctacaaggtttccccagcaacttcatggttccctggaggatgtgctgggtccctgaggcctagcccctgccctgctatatgtaaggagcagggagagaagagatagagatgagagccagggaaccagacaggctcctgaaccaggccagggctgggcctgaaaggtcacaagagaagagaggatactggggtgtaggaaatggggggacaagagtgccaatctgaaagggataaagagggtcatgggtgaaagtcacccattgagcaaaggcctgagtttgaagagactgggcagagaaataactcaaaacgtcagtgtcctctggtctggatgctgctctggagctgccatgggaaagttgccaacagctcctcccaatctaggaacccagacctcagaggaacagggaacagggccactccacaggggagtgggaactcgtgggtcacacttatgttttagcaaagtgctgcacagggtgagggagcccagagagaaacacaaagacaggagcatgcctgagatgaaccctctccagaagattcctcacaccagcccccccccggcacccccccccccccagtaaagaagggctatttttaggaacaataaaagtgctcacacattccagcaggggcagagagagtgaaaagaagggcaggagtcagcgtagaggaggaatctctcctccctaggtttccttaaagggtttccttgtatgttgggggtcttccccggctggtcctggcctcgacagtcctgtctcctatccccttctgactctcacgtgtttccttgtttctgaattggtctctgtccctgtatgtctcatactcccattctcctgggatttggggaacagttgggacgagccaagttgtgaggatggagccaaatacagtcagaggaggaagcaacatgaggctgtggaatcgacatacaccaaagagacacaccaagacaagcagacacagaggtccctggggaggtactgggagggctggggacactcaggaccaaccaccaggcaggtaccatgggacacttagttctctgcccagcacccctggtcagccctcccttcctgcccttctgtaagccatacatcgccctgtgtcaagtcagtgccatttagcatttattatctattgtgggcacaggagggaaggggacaatggaagagcgggagacaagaggctccacccaggcctagagagagacacccagtcccattccaacattggagagatgacaagtctatcccttggccaaagcaggacttgagaagtccaaagccacaggagagagggcctcgccccatgcctttaggggagaacctggctatttttttttttttttgtctcctctgaccttccatacaccccataccaaactgggcatccaatgtcatgacacctgaggtctaaagacgttggtctcataggaattcccaggaggactggggtggagacaggtgttccccatgtagatgacgtccttgaataagaggtgctgctcacctgctcttcctgggaccctaggcttttcccacttggagatgatcctgaagagcagaaggtctcctggcttgccagataccttgaaaatgctgtcaaaagttctcagggaaaagcatcctctcattccgtgggctgtttgtctacgtctctcatcacgccagacttgggatacagagaccgccattgtctccccacctgggacctccaggaactccacttctctgctcaggaggtcgctggcctccaccatttctgggctctcattggagactagatgatgctaagagcagaagagctatgggacaatcaggatgctgtcctttcccccaaaagctcctggcctgatgggggagccagagagggcagtgtggcaaggtgatgacacacagcaccgggaaggagcatccatcaagttgtgagggtccgagtgagcagaccatcactggctctctcacccacccactcttgtctgaccatatcttttcctttggcatacttcccttcctgacactggtccagctagtcactcgacattcctttctcctgagtggaccattatgtctgacttgcagaggcttctaggcttgctgggtcaagctctggtcctatctccaaggccacatgagaggtggggtcgtagacattcaggctcatagaaaccggagcaggaggccagccagttcaccgagaccctttctcggggtattgattcccagagtctcttctttcttgtacaccctggggaacagtgtacccaagcttccttgatgccaaaacatctccccagacacagctctgagtcacagatactcaccacagtccccagtgactgtcccactgtattcaattcaactctcatggtcacagaggcaggaaggttagagaccacaggaaaccaagatgacgggaattgtgaggagactatggtgacatgtatgggagctgggccttactggttagaaacctgagggctatggggacagagtggtcctactgtgtggaggaggcaactgaagatgggtagggtgaggagaagtcaaagtctgacccaactcaactcatcttaaagcttccaggccagggccatcacctcctcccgatactgggctcttgtctccctcctctttccatttccctaatctttcccttctagactggagagtagactgtcagtctgagaggactaacaacccctgccttcccacctggctgcttctcctccttcccactctctatcaccacacttggccctggatggctttaaaggggtcagtacagtgggagtgcctggggtagaagttcagcctggttggggaggagtgggaggtccagggggggaccagctatggtaagggatgagagaagccaacagttgtcccaagggtccccctcagggagtggaggttcccctgggaggcgccaggacaggcgcaggtgtattctacagtgcacgtgtctccagtgtggctcggaggctggagacgcggccctgttggagtaacaactgaagccagagtcttcgaagggtggtgggctaagggggaagagggcatggtgggcaaaagaaagggggtgggggagagagaaaaggaggacaagggggccccttccctgtagtacttggctcttgagctgcaggtggctccttccacgtgcccctgtgtcaccaactcaacgatggccacagctccttttctcctttctcacccttatgcctcctctccttggggatctttcttgtggagtctcttcatgtgggggtagcatccagctgtccccatggctaccctcactggagaaaggatctaccttccctacatcccggtctttacacccctgtgcctctaaagtggggtgagtgaaaggcacgtctcaggccagcagcagctagaaattggggagttggtagtgcaaattcatcaacctcttcccagaccagctgatgcagaaattctggggtggggacagcactgtgtatttcaacagtcctccaggtgactctgggccatgccgtactttggaaaccactgagggacatctgcaaccacaatcagtacctgagaaaggtaccttcccttccccatagccagagtcactcagggcttatgaggtggctcacttggcatctgggttgcccaacatcacctagtctctttcctttccttttgcttctggcccagctcagccttgctactgggaagtcgtggatgcaagtgttagcacacacaagcagctcttgtaatattttcaggtgacaggtctgttagaaacagctctttgggcaggtggcaggcgtgggcggtggggagggaaaggagccaccttctcctgcttcctctgttttctgccttgtgtctgggcagctgtgaagagccagagaggaaaactgggcttctggacttgggcttgggctagggactttcctattctgagtttcaaggagtcctcttaaatagttatactaagtaacctagctctggctaatggaggtgtgccctgggcatggagatagatgcactccccattctccaggaaagattaggaaatgtgtgcattgctctccagaacaagaggatggagacagagaggggggcaggtggcatctgctccaggctcctggttttccctaccgtgaccactttctggcacctctattcatggctgcattctgtctgttgatgttctccccccatgttctcaggatgatttcttggagatctgggggaggagtgggcaggagagacaggagtgatgggggtggggatatgcaggaaagagaaggagggtgggcagagaagccttcccggagagagagccaggatgtggaggtggaaatgacatggcaagacaggagagcagtgtgtgacagatggacatcgcctagggtatgatggggagaggcagagaagcactcggagggaccagaagagcctgacccagagggatggaaaaaagcagacaggcagaggagctcccagggaatctccctttggaggaagatatcagattccagtctgtgaggtcagcccctaacctcaggccaggaggagacacagagcaagatggatcggcagaaatggttccagggtacagtttggttcttactctggagtcccatgttattactttcttgtagggagtccaggtgccagcagcagggcgagcagatggcaggtttgtgagttaggaaagtcatggagggttatagatgcagaataagacagcatcttctgtcagtgaccccttactcaaggccatctgtccctaaggatggccccaaaggagagaagaccaaaatttctggtttcatatgatcttaggaaggagttagaagcaattcaatctgggccctccgctctccccagtcgaacacacaaatgctgattcaggcccaggtttcagaaaactggcaaccgcccaggtttcagagaaaccctggttcctacagcattgtcccctttcatggtatctagggagaaagaccagcacacaggaatggcgctgtctgcggtgctgatggcagtctcagcccacagcagcaggtagagagccgcaggtaagggagctgcagagagcaaaagaactctgtccattcttccacctactgtccacagactaccactgaccctccaccttttctcctacccacccacccacccacctacccacccacctacccacctgcctcccctccatttcctatctctttacccatttgtccacccacccacccannnnnnnnnnnnnnnnnnnnnnnnnnnnnnnnnnnnnnnnnnnnnnnnnnnnnnnnnnnnnnnnnnnnnnnnnnnnnnnnnnnnnnnnnnnnnnnnnnnnnnnnnnnnnnnnnnnnnnnnnnnnnnnnnnnnnnnnnnnnnnnnnnnnnnnnnnnnnnnnnnnnnnnnnnnnnnnnnnnnnnnnnnnnnnnnnnnnnnnnnnnnnnnnnnnnnnnnnnnnnnnnnnnnnnnnnnnnnnnnnnnnnnnnnnnnnnnnnnnnnnnnnnnnnnnnnnnnnnnnnnnnnnnnnnnnnnnnnnnnnnnnnnnnnnnnnnnnnnnnnnnnnnnnnnnnnnnnnnnnnnnnnnnnnnnnnnnnnnnnnnnnnnnnnnnnnnnnnnnnnnnnnnnnnnnnnnnnnnnnnnnnnnnnnnnnnnnnnnnnnnnnnnnnnnnnnnnnnnnnnnnnnnnnnnnnnnnnnnnnnnnnnnnnnnnnnnnnnnnnnnnnnnnnnnnnnnnnnnnnnnnnnnnnnnnnnnnnnnnnnnnnnnnatctgccatctaactgctctaatcatccatctatccattgatttttctcatctgctcatctgttcacatacccaccatcttcccattttttcagtcttctatctactcattttctacccacttgcctatctactcatccatcaacccatccatccatccatccatccatccatccatccatccatccagtcatgcacccatctacccacccacctattttcctaattactcactcatctacccacccacccattccatgcatccctccatccacctacccagtcaccctcatcaaattagtccataaaaccacagaactagaggtgtcgcagagtggaaagactcttttacattcaggaggaaaacaaggttcagaagagaaaggggtgtgttcaaggccacatggagcttctgtcgtcaatctgggacagggctggaaatcattgctcttgtctatacgccacaggttctcccctggggtctgggaaattgcctggttgttatgctgatattttgatatttactctggtgtttgttcacaaaagctgcaaggacaggaaatgtgacagcctccacccacaatgagcaaggactcttgtgtatatgcacacgtgctatgttcccccacccccttgtgtgtgtgtgtgtgtgtgtgtgtgtgtgtgtgtgtctgcctgcatactcctaaatactagtcctgactgtactcattggacgtatgactgcatttctctgtctgtgcctatatgagccatctacatggaggtgtgagctaaggtgtacacttgacagcctgcctatgtggcacatggttgggagggggcgagggaggacagacaaacaagtgggtaaaaatggctgtttttccctcccttgagagtcctggggtgctaggactgtttgagactggctccctactgtgcctccatttcagaaattgccccatttcctcttcacagctgctccctcccccaaggctgcagttctgtcctgtgcccaggcaggattcgaatgtaactcccctcccccagctggtgtagtggaggttaagttactctcagacccttgtggtggggtgagaggtgggtgttcatttgtgcaattggcatttcagcgagctgtacaggcccctctgagtggcctgtttccttcaatcgttcccacagctaacacctcattcttgagcaggtcagactccaaagcagatggagagatggctgccaagcccggagcctcaactctactagtctgcatcctacttacccgggcaaggatggagaacccctccttgctggtgccccaactctccccaagctatcttacctcattccctctaccaccatcaccaccaccgccattttcttgcccttggcctaaaaaggcacagcaaactgatcaatcagaacaaaggccagacaagtagcaaccaaatggagtaaagggcagctcaaggcatccaccaatcaaagcaaagggcaggttggggagctggccaatcagaacaaaggacacactgacttctctaagcctttggggtgggagatgggagttgggtgctgtatatgctcagataaggaggtttgggtaatctctggcccaccacagatgggccattgtttttctttgagcctcagtttcttcatccctcaaatggggagacagctactgcagcctgtggcttcagaaatttctcttgcatggaaggcttcctgcattgcagtggctgccattcccatttccctaagcacacccatggcagatgtcaccaaagtcagacgctctctgggtccctcttggcaatcctcctgcctcgagacaggaatagaactccatggacaccaagacttggggccttgtccttgaagctccattctagagagtgtgggtcaagaaaaaaatgtgggggggggattttctgggtatggaatcttccctctgtggtctttagccttaggcttggaagcacatagaagcctgtgacagtgctgatgtgggggtctctggtctgctacatgagaaagtagctgttgccatgagaacctagaagggtttgacatcatactgggtgtcttcaaggatatggggctctatgtaaaggcagcactgatgcctgagggttgcaagcaggcaaacttagggattgtgttgtctggaatcaactgcttccagggtccacagtggatagacatcaaccatgaccaagatgcagtacaccctgacaggtgggagagaccaaagcaaggtctgggcagggcagggaaggcaatgcctgcgattctccctcccactgggaaaacagcacgtgtgtgtgtgtgtgtgtgtgtgtgtgtgtgtgtgtgtgtgtgtgtgtgtgtgtgtgtgtgtctgtagccaaggagacttggcagtggcatttggagctgacacctggacaaaccccaggcttcacgcagacaccagctcaggactgtcctcggcaggctttctgtcaggtagcatctggctcattcttgaccacccttggggaaggtgagccagtacccccaccccttcacctagtggcctcagcctttgcagtgtggttgtgctgggaagaggtccctaatatcccattagatgatgccagtttcctgtaaaatcctttgggaccactggccattcagggaccacagagtttaattctccattctggggtgtctgaggatgtgaagttagtgacagagaagctttaggctgggcctccctgagctacccagttttagccacatgctaggtttggctttctaactcttaccttgaaaggagcatatcatttggataaatctcatcttgttcgtatttgggacacagaggaattgaggatggcttaaccagattacaaaagtgaggactttgcataccccctatttgggctaacaactgcctatgaatataactctggtcttgcagcagtttagtctttaccagcattctatgcattctgtggggtcctccggcagcctcagctcaacatcgtcttcataggaatggggcccacaaagacccacagggaagacgtcaggaaggacttccaagggttggggagagggcacagctgagtgggtggtgagtcaccattctgccttggccttgctcccctgttccgttacctttctctttgatcccctgtggctctggccaagttaatagagcaagaagaagagacctttgttgtctcagttccggctctccaaggacgagctctattcccgggaggggaaggctaggaggcagtcaaggctgactttgccttcccagcctgcagtggcctgagtctgtggtgcctaccttttgtgctcagctgaccccaacccccatgcttccttttgtgctcaactgatcccaacccccatgcttgctgctttccaccctaactcggctgaaattggggtatggccacagttcccccaatgtagagatgccagagttgttgctgtcctaaggacaggaaacctgtgttgactcttgactgactttataactctctgtgagcccttcactatgcctctggcccatttccaagcctcagtctccccatatgcaaggtgaggggacttgggcagtctttggccttaatattgctggagtctgctgctctaagctcaagtgtctaagcctcaccccacagtccccgggcccagggcagaaagaaccacttatactctttcttttcttccaggatgctttgctgagcctaggcgccgttatcgacattgctggcctgcgacaggctgccagggatgccctctcagccgtgctccccaaagtggtaagctgtcttcccttcctgctcccccgtgcttctcagactttgtccagctctgagctcaccgtgacagacatatgtatagcaggagagaatgaggatagacatcaagaactcctggatgtcagaccttggaggccctagaggactcactctacatgtgtgaatctagtattggattaaaggaggaggctgggggctggaaagatggctcagcagttaagagcactgactgttctcccttaagttgtgagttcaatttccagcaaccacatggtggcttacagccatctatgtaattcaatgccttcttctgtctggcatgcaggtgtacatgcagacagagcactcctacatataataaatctttaaaaaaaaaaaaacaagtacagggctggagagttagcagtctttaaatctctctcttgtcccatcacaacactatgaatgtgatgataggtcaaggggcaagcagggtcacctgaaccctgagtgccttgttcggggtgttatatacctcccttgcccttggcacttctagctccagtcgccgttgctcattctttaagcaggaggctgatgagccagctcgtaggagtcagagcagcagagccacagctgtgccagacggagggatgcagggaactttgaaaaacaggttttgtatcaatataagaagcatggaagacttcctggaggaggaaatgtctaaactaagtccccttgaacatcctctccctgctccacacaccagccgaggcagctttggcttcaggaagcatgaccaactcaggatgcagtcttcccaccccactagagcctattgtccctggctccgagtgatggatgaccctccagaggcccagagagggagggtatttcaccaaggacacacagcatgacagggacaaatggggcttggcatgtatgcacccctattccctgtcctcagccctgacttccccaaacctcctagaagttcagcgcccaggaggagggctaatgactgagctttattgagcgtgaaattggtaggaagtgggtggtgtgttggcgcccaaaaataaatcctttgggagagggttatgactgagacaacatctgccctggggtggaggaacatctggatggtgagggtgagggaagctggcaggtcagagactgtggacctgccctgcaactgcaagtcttgaggcgtgtgtgtgtgtgtgtgtgtgtgtgtgtgtgtgtgtgtgttttgtgtgttgaagggagggggtgagtgactggcttggtgcccagctaactacagcctgaagcccagggctgagatgacagctgaggtccaagaggcagtgagacgctactcaagagaccattgatgggctggggagcccaggtcttggggagcctcctcttgactgtggggaggactgggccctgggaggtggggcttggaggaggaggagggctgcagcacctggcttcctcatcagcacccattgtggcaggcagccccagtgcagatggtgctgatgtgtacgaaacgaaaagcaaccctcctacccagtaaactcggctaaatttaaccaggatggctgagtgtgagggtggaaggcgcggacatgcggaagtgaagggtggctcctgcccccgccaccctaagactgcccacctttctgtgtggggaggacagactcttagacactgagtgccctgctaggctctgaacctgtctgaaccaaaaaaacccaactcgaaccaaaacaaagaaaaaaaaaaaacccaaaaaagccaaaacccaaaccccccagagctcctgatcggtaaacgaggagggggtagctctctcgaagtggctttgttcctagattttggctcagaggctgggcatagtggctctagattatgatcccaaagcagactgtcacaaatcctcagccagttttagccacacagtgagtccgaggccaacctgagcaacatgagaaagcttgtctcaaaaaacgaaaataaaaaaacctgaaacaaaacccaattcaagcttagccccctttcacgggggccaaaggggctctgggccctcccagaggctgtttctatcttccttggtctgtagtccctatctcacgtcaggacaactgaacccagttcagtgtcacgggaggtcatggcaggaaatcccctgtgtaatatccaaaggccactaaagcagttggcagggttgtggcttctcggtctgctgaggatcccacacttcctgggaaagagccttcagcagctccccctgaagccctccctgccaccctcagcagagagggttccccagcctcctgggagaggagagtgtggccatccaacagtcatggggattggccaagacctctaagagtccccatgttgggaagtagatctttgtgagacagcagcgtctgccaggacaaggcttgcaattgagactgatctagggagggaagattgctgaagcaaaaatctgacaagcttccagccagtgcttccgactcaccgtgggcaatggttgatgtaaaatgtgaacttaccctgcgtctgctcccagctgtttctaaggccctccagcctcacccacagtcctgtaccccctcaccccactgtcagttcggaaatgctccttgctctctgtgccacttggcctacctccactggtcagttctgagcctcacccacacaccaagtgcggccagtcatagctaaaagactacttcttctgggaagccctccagagccccacagaatacaggcagacagccctggctatagtttcttggcttggatcaccggggtattggaaggagggtgcatcctaagccagtgtcgcctgcatgccataccaagtatggtttgccaaatgcctgagctggagttcaaggcttgggtgcgattggctcacaccttggattgaggtggtcggtaaggagagtaacagattcctggatctctgcctgcccagaaccccttcccaaaccaccaagctctgtatcccaggcccccatggcctcgccatgagcagactagggctggacagtctctctacagggtctcacatgtacctttgattctaggagactgtctacacctacctgctagatggggagtctagactggtgtgtgaggacccccctcatgagctgccacaggaaggaaaaattcggtaagtctttcttggcctgtcctttgccccctggcatctgccaagaggcctcagggttgaggaaccttccaatatcatctggtccacccccaacttcagtctccctgcccaagtgggtctactgcgaagtaatatcccctcctatgtcggggatgtatagagtggggtgggttctctcttcatagagtcttttacatagatttttttttcttttaatacaaagtctcacggtgtagcccaggctaagtttgaacttacagtgatcctcctgcttcagtctcccaagcgctggaattatagatgagatccaccatgtccagctcccgtagagttcttctgggttgttgcagcttctcagagtggagtggagggggtgggtagaagggggcttcagcatctctcagttcctaccccagggggccatgagcactacctataaggcttgggcttaggatctcagtgtacctgggcttcaggaacacacagtgacaacttcctgtacataagactagaagttactggatctctactacctaagttcaaatcccacctcctccctgtgtaccagctgtgtaacctagggaaatcaggcatcctctgtcgtgtgattccgtttcgctttgctttttggtgacacggtgatgacagcagtgtttatggggatgttgggaggattcaatgattgtgtgtggtctgctgtgactatcagaacccagagcgcagcacccgatggtccctggtacctctgagcccagtgagttcagctggaaaggatacattgagagacatgttcaagaccacaaggcagctgtgaggcccaaaacacttctcagtggggctggggaagtgacagcctctgtctgggtgacccatcctggttatctaaagacaacgggagcactgggtaaggagcagaaggcatcgtgggtgcagtgcactgaagtcaatttcagaaagctgggctgtttcggtccagcctgcagctcttttggtagtgccagagctgctatcctggcaactcttagtcatagaagtcctgggagaagtctgtctggaaatgccagcctcatggtccttgataccctgggttctaggatggtggtcccaccactagcacagacagcttccttcccctttttctgccacagttctgggaggtgggagacaccttccctttgagattctgctcatgacttctcctcagaggaagtgagcagagccacagtcccctgtagcctgggccctatctaggggattttgctttggacatggtgacaatagtggtacttccatcatcatttggaggcgccaccacctcctgctttttagcagtactggcaatcaaacccagggcctcatgcatgcggggctctactgagctacatcctccaatacccatgcgtatatgtttatttcgtgacagggtctcactacattgtccaggctagcctggaattactctgtggcccaagctagccttacactttttttttcctccggcctcagcctcttgagtagctataccaccactaggccagatcttctgaatcgtaaagataaaaaaagctgggccgggcggtggtggcacgtgctctttaatcccagcacccgggaggcagaagcaggcaaatttctgtgagtttgaggcctggctctagaacagctaagactccacagagaaaccatgtctcaaaaaccaaccaaaccaaaccaaaaaagctgtaatgtgtgttgctccccccccccccccagagttcttcgtttgttattggcttgcctcctccaggaagtctcccagtagtcaggggagcatccctgggggttgggaagaatgcaccgaatggcaggctcaggggacaggacaggttggagcctcccgtggagcttgctctctctagtgctccaggcaggccctccttccttggggagctggtggtatctgcagggcacagcttggaagggctccgacactctacattagcagtcggttcagcatcctctccatattcagtaaagcctttggaaaagacaattaaaagtaaatgctcaaatgcaattagcccagaactacttggagatgggaggctagtgcctactgggacagaaaaaaaaacagggattccagaaggcagaaagagcaagagggcaggggattggcatctcagggcacagatcttagagagcagtcaggccagtaaggactagggctagggtctcaggctggcacccttttttctaatctgttctgcctgcccatacctgtgtctgatgtatgggacctgagtgagctcaggtctatcactaggactgatgggcccaagggtgttatgggccctgttctcaagttttccctgcagaatgaagtgtgagacccagacatgtggtaggcagataggcctggattctagcctagcggcatgcctgcctactcctcagcccaaaggaagactaccctttgttgaccttgagggaatgaatttccttttgacctcagtctctttttctgtgaaatgggtgggactggggacaggcttctctcaagtgtgaccatcgagacatagtggaggcacctgcctgtgtgcagctacctgggcagcggtgggggaggggtgatccggcaggaagctgagctttttggtggttgctggtgactgctagctggcagagagcagcaggtgtggctggaggctggattgtaaaggcagataaggctgaggtggtagacagaaaatgagtgaaggtggtgttagggagaggcagggtggagcctttctgactctacccactccgagggcatgctcagttaaggaggaaaagtgtagttcgtctttgtgtctccctaggcttgttctctttgctccccagcttaatccttccctgctcatcttctgtgggtcagcagcacccatttcatgagacatgcacaagggattccctgccgatgagaaagagccaagcttcacaaaagggggctggtcgccatggcatccccagggagattctgtctacagaagagtttgggactggcaagcaggacgcttgggcttcagggcgttgttgccatgatgacaatcctattgctttctcccgggcctctattttcccctctgtacaatgaccaggttggtccagccctgaattttactggctttgacagggattctggcccggaaaggaaagaacccccgaggctccccttcccaatctcctagcctgtctgagaccccaaccaggcatccccaaacctcagatcccccgctgccaagtatgggagccttaggccttccagctatcatttgggcatagccttggctaccgtcgcagggcacttcctcaaggcaaacctgtttttttctcatgacagaatccaattgtccatctggtttgtcttggagaacacagtgactgtccgttcccatttctggagtctcattctggcagaggagagccaggtgctggcctacatcattatttgtcttcaagagagagatgaaaggtcatagaaattagtgcaagactcagagagggatggagggatagtgaagagatggaggatcagtgaggtgatggggttcagttgggggggggtcagtgaaatgatggggtttagttaggagatggagttcagtggtggaattgggttcagtgagtgggatttagtgagggattggggtccagtgaggggtggcattcattgagggccttcagtgagggggttcagtgaagggatgaatttcggtgagatggccaaggggacagtcagtcatggcagagaaggcatggcagcgggtcacaccatatccactgtctgtaagcagagaagagcgaatacttgtacccagctagcgttcttctttttattcagcatgagatcccagcccacggaatgtgctacccacatttagaatgagtcttcctatattaattaacctaatccagaacatgcctcacatgcatgctcagagacttgtctccaaggtgattccagaccctgtcaagctgacaatcaatatataccaccacagaggctgagtgagggggtggggatcagtgaggggtggaagctgagtgacgtgacggcatggagaacaagtggggctccgtggggtgggctggggtgacagagacttagtgaggaccacggcaaggagcggggcccagtggggatgaactgtcagtaaagagaagggatcagggagttgaatgggtcagggagaagttgggatttgtaggaaagggctgagagtgaacccagtatgaggctgcggggagggatttgtttagggctggggcttagcgggacttagaaaaggatggtgttcagtgaggaacaggtatgggtaggtctcagtaaaggaggagaccagagaaggatgcaggagctccgggaggtggaaagggcctggacacgtggccctttctaagctattgaccttggccacacacagcttccccctctattctctctccattaaacaaatagttgttaaaggaacggaactgtcataaactccacgcccgttcctctgtgcgctctgggcccatctgtcttttccttcagtggggcaggccatgaccaccttggcaccaagactgggcatacaagtctgggcagcagggctggggaggggattgagtcccttgccctctgtcctcagaatcagtctggaagatagcaggaaggaggtaggaagagctctgggctctagccatagtcaagcctctcccaaagtagtggggagcccccatctcagctgccttatttatagtctgtgggcatttgtggatcattcaagcagtgcacattctgggaaggatgtgaccaagaaagtaggcgccccaggagtgtgtgtagcatgcccttgtctgagactgtgttctgtgacgggaccagagaggacagaactcagagcaagatgccaaaacttccttagagttggggatttggggaggccctgtgcttgctgaggacctggttcaagtcaaggctgcactttactatctcagcctgtctctcctctggtcccaaggccactgggactagatttccagtgtcagatattctttctctagtgagaattctacccaggtagacagctcgatgaatctgaaacagaattcaaccatgtcttttcctgctcaaatttctgtcagggtttcctctgtctcagaatcaaacccatctccccacggccctgggctctccatggctttgtgttgcaccgtccagccatacctgccttcttgtggctgcactttccagcaggcacatgttactctcccctttgagtcatatgctcagttccctctgcctgctcatctagtctatctgtctgtctgacctctgtgtgtccttcaggacccaggcatctcctttctgaccccacttccaccccaatgagaatgaactggacatgcttttcacccttttatcttggctctggcacctaactctattgtgaatcttcgtgtctgtctctacatgatgctaggatccctgagtcaggtatgagtctcacccctcatgtcagctctctctgctgaagctgagccagaagggccatataggagacagtagtgtatatcgatcgccgaggcttcttgtctaggaagtagattctttttttttttttttttttttatttttaggaagtaggattcttgttctgttagagaggacagttagaaacccaggtgggaaaccagtggctggggtagagaatcaccactgtggctgggcagtggcttgagagtagagagcagggtgcagctgtgagcgacacatcggaaacaacccatcaattactgaagggagctaaggagaaagaggcagctaggacagtctacagatgagtcacaggagttttgacagggaaggaactagaggcaatgcatccaggctgaaatatctttactgcactttagggacatccagggtgtccctggtacctccaggtgaccttggagtttctggtgtctggagctgtgaaccagagacttatgaggccatgtgcacaggatcctgggggcaggtgcagctgggtctgggggtaggaagtgagatagtatggatttcagagtttactgaccaccagcgtagggagcatcatcccactgtagcttccggcatgtcgaggtcaactagcatggtggggtttgagaccaaaaatcccccagccttcataaacttggtcaagaggaaagatggctcccattgcccttctgccatcctgacttcaagcagtttgaacagtccatgctctaaatgtgaagggtgacagatgagagacagtcctggttcttgtagattctgaattggccggaagggcagggaaggaatgccttctgtgtggttcacagtgctgtgtgaccttgaaagagatgctcaacctctttggtcctttttttttctccagcagctgtgacctcctgacttggtgacttgcaggccacccctccctcttcctcatctaatctgtgctgtattcctccagtgaccccgattgcatgctccatagtcccggcttgtcttctatccaggccaggcagttcttataaacacaatacgtggaagttgcgtgagagatgaggaacccagggagattaatcagcagggagtgacatttggtgaaaaatcaggtgcttaattaggcaggaaaagcaagaggcccaggggaaggtggtgtttgtggagggcagagagaaatcttcttcacataaccaaactctctagcctcagtttctagcctccacatgagcccgtgccctgcttgagactcacacaccacatgcctctggcattgtccaagcacagttattaaacctaaatctggtaccagctgcccgggttcgaagcttcactctacttcttattagctgtgtgaccacagataggttgcttaacctgtctgtactttagcgtctgcttcaaaatgatgatggcaataaattttaatctctagcgatgttaaggattctgagtcaatatgggatgttaatcttcattgccaaattgtttggagttgggatcacctaggaaacgctggtcgatgtctctgtacaggtgtttccagagagctttagcagggagagaaagtctattctgaatgtgtgttctggggcccagcatccaactttctctgctccctaactacgaatgcaatgtgaccggttatctcacattcctcctgtaataaatagagctgctttctctcacctgccccagccatgacagctacgccacgacactgtgtgcccagacaagcccttccttctttaagttgttttgtatgtatattttgtcatagaaaggaaaaaggttaatacagaaattggtaccagaagtggggtcattgctgtaataaacctgactatgtggtttgaaggtctttagaactaagtgccctgtggggaggattgggatattttgggggctggggggttaggaaagctctagagtgccacaaagggagcttaacgggccattcttgtgtacctgcggaagaccagaattctagtataaatgttatcagtatgattctgtctcacaagatttcaactaggagtgaggaacctattgggaatgggacaaaaaggtatttgtttaatatactgcaaataatctgaaaacatccaggttgtgtcatagttattgctcatcacagttatagagatttataatgaaaattcaaagcagaaacgtgcagcttatcaagagaatacagttgtgaatgtgaatgtgaatacagttgaagttgtagacatagtggatgttgacaggtttctacacatttaagagatttgcaccactaaacagaaatgttttgcttcgcactgagccaataggaaatgtggtctgagggctgagctgtatctattgaaagctctagctattaaaaatgcggattcacctgaagaaaaagtgattgaactgagactgctactgggggttctcggctcaaaacaactgactagggagacatctttttctagtggagtcaccacagcgcacagaggttagttaccacagctgtggtagcaacgggcccgtctatgtcatcaggcgatatcagaatttcaaagtggcatccctattgaatctatttggcacatgtaaaatataagagtcatgggaccatgtaggcttgagccaaggttctagaaagtctgtaggttcaggaaatgcttttcagggtcagattccctgcaaggaggtcccaggaggccactgcgtgaggttccaaagtgaagcccgcattttaaggagacctcaggatgttgaagatgtgaggattatctaccaagaaaagcaccaggcatgaagttgaggcagtgcaagaaagaggatattcttgctacaggtggccgggctggagacgtgggcacccatatagtatcacaaagagccacagacactggatctttgaggcctgctgcttgctttgctgagtatctagtctcattttgatttgacctttgcttgttgtgtgtccttagtccttcctataaaatgggaaggattattctgtgtcactgcgtattggaagtatgtgagttgctatttgattttacactggtgtgcagttcagaggttgccttgatccttggctgagagttcagagtttgagcttttgaataatgttaagagttttgaggactcttacatataaagtgcatatatttcccattgtgaggtggcctctgaggaccagaggaagaatgctacgatttacagtgatgtgttgggtagctgggggcttgggatggttaatcttcattgtcagtatcacctgggagatttggcatcacccaggagacacacctcttatgtgtctgtgagatgtttaattagagggaagacccacctggagcatggaccatgccaccccctggtctagggtctaaagtcagtttaaggaaggagcaaatgagaagccaagatgaccacctgtttcatccttctgcttcctgactatggatgcgctgtgaccaactgccacacacttccatggccacacccagagctgctctcactgtcttgccttccctctcacaatggactgaaccctcaaaccatgaaccaaaggaatcccttccttccttccttccttccttgagttgccttcatcaggggtttccttacagcatcaagaagagtaactcacacatcatctatgcaagttgcacagtacatatagctgtgttggttggtgcagggaatgcccagtgactataactaggctgtctcctgccatgtctccctctcatgattagcactaaaacttgttgaacagatgtgagacgtgtcctctccttcgcctcctgggatgctcagagaaggtagattgctcacctaaggccaagtagaaaggctagggtttgacttgacatcgctcactgtgagtgagcctggtgtttctctttctatttccagaggatccaccctgggctgtgtgcatatgtcttccacatgtccaccagccagaggcatggaaggctagtctgtggctccctgcctttttacacagggcacgggccaggcaggctccgggaagggtcccgctctcattttgaccttcctcatgtctgtctccaggcaaatcatctagaacagtggttctcaaccttgctaatgttgtagccctttaacagagttcctcatgttgtggtgaccccccaaccataaaattattttcatcgctacttcataactgtaatttttctgctgttacgaagtgtaatttaaatgcctgtgttttctgatgatcttaagggactcctgtgaaagggtcatttgagctctgaaaggagtcttgacccacaggttgagaacttctaatctagactctgacatgtgtgcagggttcagcctgtttgtatcaccaggctgatggaagtgggcccaacccctctttgatccagggcctgagagatgagcccatgtcttattttcagagaagctgtgatctctcagaagcggctgagttgcaatgggctgggaccttcggacctactgggaaagcccttggccaggctggtggctccactggctcctgacatgcaaggtaaaggctagagactggatgggaatagggaggctgtggctctgtttccaggtcatgtctgctttctacccatcctcctctgcctcttccttgtgctctctgtctccagctgtttctcctctaattttctctctaacatgctactaatctccccaagcctaatttcctgactgtaaaatgggacaacagtgcctttcttgagggggtgttttgaaggcacagatgagatggctgtgtaaagggtctcagtgactgttggctgctgtagctgtgtgcttgtgcctgttgccagatggggctggagttgtcatgttctctgtcactgtctgtgtgtctttctcgtcctctccatgtcccctgtccgccatgtgtctttctgcctcgtgtctcagtctctctaggtctctgtcctctgtctcgatgtggaaagtgcacaagactgggagtcaggagacctgacttgctgagtgatcttgggcaagtcacttcatctttctggacctcagcttcctacctatagaaccaggatcctcagcccgccctccctccctcnnnnnnnnnnnnnnnnnnnnnnnnnnnnnnnnnnnnnnnnnnnccttccctccctccctccctccctccctccctcccagggtttctgggagaatcacgagaatgttgtgaagtgaggggatgtccttctgactaggggttgtcactatgattgtctctatcactgacttgggtctgctctctgtctcactgggcctctgggtctctgtgtctttgtcctggcctctctgtctgcatctttgtctccttccctgggtccttactcagtatctctgggcctcactgggcctgcaggaccacctcattgccttctcctcccctcagtgctggtcatacccctgctggacaaggagactggaagtgtggcagctgtcatcttggtaagaggctgcccaagtggctgggttgtgggtaggatggggaagaggaaaacagggcaggggcgggggggggggggggggacgactgtggttggagcctctgtgtgtgtgtgtgtgtgtgtgtgtgtgtgtgtgtgtgtgtgtgtgtgtgtgaggagtgtgaaggtgcattaccactggagtagactggaggcaaatgaggacttgaccagagcctgggccatcttcgtagtccaatgctgaacctcatccaagaactggtccattgggtgatccaagtttcatctgaactcagccctcatcagtttcctcttggaaaactctggatgtgttataggacagggacacattgaggtgattgtgattaacagacactgaaagagcacagaaagggacatgaggctgtccacactagagacatttaggcagtttaggtatctgagatgctggagctaggggcttaaagaaaggtgagtgtccccagcggagatgcctgggtgacaagcagcaaccaagacgcttctcgaagccgcaagccagagggaagagaaggggccttcatcagaagtgaagacacatgggaactcaagaggtttgtttcctcgggttcctggatgctctctactgcccctcccggggtccccaggctttgctcgagaaggttctattcctcttctaatctctttcccatatggagatggatgtcaaaatccttgtcctgtcccaggaaaaggcttgcaccccaagccacagcaactggtgatctgccagcatcagagtggtagttccccagacaaataaattaggctccaagggactcctcctgatctcattaacagggaattagaggtttcggaggcgcctgacctttcctgagctgcagggcgggcagtgggattggagggggcagccacccactggggtgaggtgcctgcctggcttggctccctgacaccaggccccatctgcctgagggggaaagcccagaatcatccttactgatccccagtcccagttattcccctggtgaggagatctgctgtggacagaactctcatacccgacttcttgccctgtttcttgggtagcctgtcttggagctggcagactgaggacaggccagggcaagtgtaaaaactggggtagggagacagtggcttcagtccaccttctctgtagacagaacagatctagaggtgccaggctccttgcaagccctgtcctcactttgagacggtgaagattcagatgggaaggaaagtatttcccccaaggtgaagacattgcggaagttgttcatcttggcaacagaaggttggttgccacacttgccttggctagtgtcaagcaggggtctgggcttcagctttctggagagaggaaaccccagtgttgtcttaactcagccagtgctgccttctgggtgctggggccagccattttgacttcttggagcttgttgtctggggacaggcagggacaccttcaggccaccaggagccaaacaaagtaactgcagccagcaagtgccctggagcagcaaggggtggccccccagtggagagagcctttgagtgaggctttggggtaaaggtaggaggtgggaaggctgaggaaggaaagggcagtaggaacagcatgagcaaaggcagcaggagaggaggcgagagcagagaggggatggagtggggagaggagtgtgaaccagcgaggctgaagtgtgagatgtgtaccaccaaggaagatgttacctggggctcagaagtttctgacagacatttcctcatctgctcaaggatcccgacaagagcgaaaagctcttgaaaggactttagagcatatcactgtccaattctctaagcctgaatttccccagtcaggtagaaacacttcttaggacgcctgctccccaaggcacacacatctgacagctgctccctgggtcacaggatctttcatctctccggaggcagcacaggcagccatggggtacccagctgctacccagtcctgaaggtagaggggacaaaggaagagggaggaccataagtcatcagctccttccttgataactccaaacttttatctgggtctctgctgtcggtgtctattgtctacacatgcatgcatgcaagcaggcaggcatgcacgcacccacgcacacattcatccaagacctacttcctactatggagcactgcgctatgttctgggaacacagaaatgaccaagctaggtcatcagctcccgccttcagaccatttgtctggagggcatgaaacaggtggtacatgtaagggaggattgcagccgctcacaagctgtagccagcagaccgggtagtcctgtgaggagcactgggttagatggagctgcagtcagcaaaggacctgctgagcaacgtgccatccaggtgcacagctgagtgccggagttctcaactttcccagctcagttcaaggcgccttgattgcacagtctttgtgtggaaagcctcactctgtttcccagttctgggagaataagtctctttgaagagtgggcggctcttggtctctggcatatgatgctttgcgcctgctccctgtcccctagccctgcctgttagctccttgcatggagtagggtgttcatgacattagtcatgctgaacttgatgagggtgggcctggtagtctggccaagtttttcattctttctaaaccctggtgcccaccgattagcatttcccaccgaaccccagacacccaccttaacattagcatttacaagggtaaatgttaccacatgggagtgtgttggggggatgaactggtttgtgttatgaaatgtcggaagtatgggtgtggctcttgggtgtatgaactaatttcctgagtgtgtacatgtggatggtgcaggcagtggtggtgtgtgtgtgtttccatggggcagtgaatgcaagtgtgtacatgtgaaggggcctaaggttcttgcagcaagtacctgtgtgtgcctgagcatgtgctgactggctggactgaggcagcccagcagtgcatgctgggatgagggaacatcacagtttcttcttttccctcagcaatttcagcctcacagttctgcttctgggtccaggcctttgggaaaccaaggagttggttcccccactgctcccagctctagaggggtcccacctgctcctctccctgagagatggggctctcctctacatcctaaccagaaaaggccagcacagttatgtaaacagcatgcagcttcaactcagtcctaaccctcccacctccagtctcctccaggtcttcctggctctagtcttgcttcctgtcatttaccttccgtcccatagatgacagctatcagatctaaagtttaccacagcatcctaaatcccaagttctaggcccttccctcagtgactccatggactttactccctatcccagggacctcatcttcctgtaaacctcccacttggctcctaatcaggacagccttctatctacagcgcccccttctgcttgtacttccagcgcaggaagccccccagatcccattccctctaagagtcacagtctgtctatgtaccccgaccccctcaggtataaggtcccacacccccttccacgcgtaccccgactcatcccgctcctggccagcctgtgagcttcctgctggtctcctcctcctcatctgttcctggcaggggacccagcgcagggaggcaggcaggggctgctgggtgagggaagcaggatgaagcccacaccccctgcgagcactgtgggagccccacaggtggcgaacagctttgagtaagctaaggaagttgagacagcaggtggggaggaagccttgttggcgggccaccatgggtccctaggctgtcatctctgcttttttccatccccgtttctccacatttccctcttaaacacccaagagtgctagaggaagagcatgaaagatggctgaagtgagccctggtgactaactagcacagggacacaggacaggggaggataaccgcgtggtaagaatgaatctagagagtcaacatggaagcgggaaggggaggggtggatagagatgtcctaacgctgctactttctgcttgatgattttcggaaggtcccccacgtctggcctccctggctcatctgtaaggggaagattgcatctccccatggtgagaaccatgtgtaaggcaaaaagcactccctccctcagcccattcatctgtgcacagcttcctggcaggtgtcagtcatgcctgggctcccttctttaccccagatgtaagggcaactcaaaccccactcagaacggatggagctggaggctaaagccaattccacaaatcctctaatcagggcctgaagcgctccgtgtgtggacgatggagaagggtctgaggtccgccttcctgactctgtatacctggactgggctgtctgtggcacagtttgctccaggaacggaacagtaagcgtggaaagtgatgggacagacaggaaagttccactcttatcacctgccctggacgtcttcctcgggaaagtcaccttcagagctagctgcctggcttacatggaggtcatagactgtattggtggcaactggtgttgagctggccacgggaggacatgcaagtgaagacagactggggaaggtcacatctggtcgcttctcccttctctccaggtgcactgtggccagctgagtgacagtgaggaacagagcctgcaggtggtagagaagcacgtgagtcgggtaggatcgtggtaacacaggggctgctgaggatccttaccagagcttgtaggaaagacgatctggccagagagctggacaggcctggcttctggttccagcgtgaccaccttgagcaagcagtttcacaactgaagatggggtaacatagcgctaacttagctgggttagtgatgagtcaaagaccctgtgtataactgaggctcttttctgcctaatgtttcaggagtctgtgatcttaatcagggtggtgttagacaggaaatctgaccctcttttgaagagtctgcgagcgggggtccgggggcagctatacttagccgtggaagaagcgaggctctaaggacagtgggagctcctaggaagtggagggaccagcgggttgaattgtttggaaccagaacagggataggcaatgaacattatgggggacccaagagggatttgtttgagctaaggaggggagtcaggtagtgacactgaacggcaaggtcatgctgaccactcggccgtcccctaggctctggtagccctgcggagggtgcaggccctgcagcagcgcaggcctgaagctgttcagaacacgtcagtggatgcctctgaagatcaaaaggatgagaaggggtacaccgaccatgaccgaaagatcctgcaactgtgtggtgagggccaaactcgggcaggtctataggatagggtcgatcctggaggggcagggccaggtctctggagtgggcgggacctgagaggtgagttataacacaaggcagaacccagataacacttggaaagcatgtgggtgttctgggtggtcttgtggagcctgaggcgaggtaggggcggagcctgagtgtcaggggtggagccttaagcaaggcaggggtagagcctgaggagaagcaggggtggagcctgaggagaggcaggggtggagcctgaggagagatggggcggagcctgaggagagacaggggcggagcctgaggagagacaggggcggtgcctgaggagaggcaggggtggagcctgaggagagacaggggtggagcctgaggagagacaggggcggagcctgaggagaggcaggggtggagcctggaagcagcccccaggcaaggcagagccctctctgatttcagccttgttcttgcaggggaactctttgacttggatgctacttctctgcagctcaaagtccttcaatatgtgagtccctgagcatctatctcctcttccaccctctctctctccaaagaccaacagacccttgaccccatcacctctgttcagattgggacaccccaccctctcttctcttctacaatcctgaaaaacccagagaggctagcgggtgttccagccccgccctcagcctggctctgtctgtccccctgcagctgcagcaggagacacaggccactcactgctgcctcctgctggtgtcggaggacaatctacagctttcctgcaaggtgagggttcaagtccacggtgaggcggggcaacccgtgtctgcctttcctcccataaacctgtctccattcctgggtcccacaggtcattggagacaaagtgctgggagaagaggtcagctttccagtgagttccatctccatcctcagcattggagcctgcagggaccaggaaggcctagcaactggggccacctagatgtcttggtgggagcagtccaggtcgtgagagctacttagaagaattacgaaggagccctgtctctcatgatcagactctagtagaagcaagctcgtagaggaagccttagatgagacaggcttgagtgtttctagacacgaacctgttagaatctcttgagatcagtgagactctttggggtctgcttatcactctctagttagggaaaaccctcaagttcactattgattaccaagtcgtccctctccaaccccccccccccacttctctcctctgcttctcagcatcagctccatccattcctgaactgttcaaagggtttgttgaaacttccagacttggaaggcaaggatgggttgacccagggagagctgggccaacggggtctctcttcactttccagttgaccatgggacgtctggggcaggtggtggaagacaagcagtgtatccagttgaaggacctaacctctgtaagccatggccatgctgagccaagggagagggagggggaaaccctttgctcaagccccagtgtctttggaatggggtagcctagagatggggagacaagacccagacttggtgacaccctgtcctcgtgccataacgggcttcggagtgtggtgagagctagggaagaggcacactgcccctcctcactgttccttcatctctgcaggacgatgtgcaacagctgcaaaacatgttgggttgtgagctgcaggctatgctgtgtgtccctgtcatcagccgagccactgaccaggtggtggccctggcttgcgccttcaacaagcttggaggagatttgtgagtttgagagtgggggtgtcatggcactatggcaatagccccaggttctagggggtctgaagtgggaggatcacgggagcctagaagttccaggccagcctgagcaacatgtacataagcctgcctcaaataaacagtggcctgaggaggaacccacattttggtctgagggcagtcagagctttccctagagctctgtgcctgaagggggagaaggcatggtgtgtagtcccagtgtgaagagtttcattagctggcagataggagcttcctggtagcatgcaggaaaggagaaaggggccgagaaggccatcttccctgtcctctctgctgacccccagcccgacttccagcttcacagatgaggatgaacacgtgatccaacactgcttccactacacaggcacggtgctcaccagcaccttggccttccagaaggagcagaagctcaagtgtgagtgccaggtgagtgcctgccttgagcttttcccaagaacctgcgcgcgccagccccagaaggctatccacgagggtgatgctgcctgggttatctaggccagtggcagcactgtggctgggtaacctagtgacctggaagtcccttaaagagagagaggtcagtatttccctgggctctaggcattgtctgtgattgccctctagtgtctaacacgggcactaccacaacatctgggcagccagaggcaaaggtggcagccgtttgagacccaagaacttcactattcttccccagctccttcacttagtacccaaagggtttcattaggcacgtcagttgccagcctgctctaggagcacttgggaagggatgagaacatcccgggccatctttacgatcttcacttcctccttcccaggctcttctccaagtggcaaagaacctcttcacccacctgggtgagtgatgtgtctcccacacaaggcgtttggggaggaggagatgtggaagagatgcttgcctggcattcctcaggtctcacatgcttctccttccccctcctccagatgatgtctctgtcctgctacaggagatcatcacggaagccagaaacctcagcaacgcagagatgtgagcagaagtggggtggtgcgggaggggaagtctcagccctcaccgcctctgccccctccctaccttcttatctgacatttccttctgcctgggcccttgtttcagccaggacagcgctaactttgcttgccatgggtttctatgaaacctagtaggaatttaaaacaatacaatacaaaacaaataaaaggcagatggagagatgtttggaattgtccagctccgaggagagtgtctcactttaggacactttccagggtctcagtaatcgctacactagccatatgtggtggttcgagaggcgtcagaaccccacgaaccaacctcttctctccacagctgctcggtgttcctgctggatcagaacgagctggtggccaaggtgttcgatggtggcgttgtggacgatgaggtgagggagtatggagggtgtccgggagtaagcaagaggacctgggggaaaagccacatttgaaaagtgtctatacggcaggctaacttcttgctttctattccatccctgtttgggcagagttacgagatccgcatcccggcggaccaaggcatcgcgggccacgtggcgactacgggccagatcctgaacatcccagatgcatatgcccatccgcttttctatcgcggcgtagatgacagcactggcttccgcacgcgcaacattctctgcttccctatcaagaatgagaaccagggtgcctactcgtggtggccaggggcggggcctgaaggggctgtacgggggtggagccggggcggggactaggggaaagtggttctagggtcggaacctaaagagccagggattgtctagtcttgagccatttcttccagaggagttaggggaaggcaggtctcactggaccccttcaccagcgattcccattttctctctcttcccagaggtcattggtgtggctgagctagtgaacaagatcaatgggccatggttcagcaagtttgatgaggacctggccacagccttctccatctactgtggcatcagcatcgcccacgtgagggagcgctactggggcagggagggtgtccttcttctatcccccacatctgctttcttcgctctggcctgtctatgctcagggctccgatcccagcgagcgggatgctatgcagcccaccatacatgctggctgcctctagtcgttcagcatgcaaagctggggatactatttctggtcctgtccaaccagcttctgaggatcatgaaagagaaaggaaaagaaacaaaacaaatcaaaaccccacctagttctgctgggctagatgggtatatatatggtagtacgtgatagtatgggcctataaccttaggatttgagagggagtagcaggagggtggagttcaaaaccttggctacctagcaagttggaggccagcctgagctacatgagagacactgtctaaacaaacaaaaaccctaacacacacatagaaaaccctcttggtaagattccctacccaccccagcaactccaatctactagtccgtatctttgtagcaaacgttggatctttctctccatacttttggcatctctagcctgaaaatccaacctaagtacccgagttaatccctgctttctgatcttctcctccaagggctaccaagttcaggggacaaagtgcctcaggtgttaagaaactggggaaggccagtaagagagctgggattagcatcggggtggggcctgaacactgggctattgctaatggcttatactgggcccccaacgggagaggaaggagaacttctgcagcctgacccgtttgtaccagttccaggcattctgaggatgtcacagccttcagctccagccccatcttttccattttctctcctcagtctctcctatacaaaaaggtgaatgaagcccaataccgcagccacctggccaatgagatgatgatgtatcatatgaaggtgaggcttgcttggagcttctgtacatcttagggtctgggagcacctgctccacatgtcttctctgactcccagaatcctctgcaacccaggtccaggctaagcttggctattgctggctcttgagactgggaaaacagacccacaccaatacctggcctctgctctacctagagggcttccccaacttacccataatcctctctcaagcttttttcttagcctgatgtgaaggcagccaacaggctttcactcaggagaaaatttggttcggacagctacccccaccccacatccagagagtatgcccgacttgggtaatccctgaaagctgaaaaccttgctcagggctttcccctgccactgtctggatgcagtggccgtgcacccctgcatgatcttaattactggtaccccagtcccattaccaggcctggatcagaagagctacctcaagtcttagcttagagcatatgacaatcactgttcactgggtcatctcctctcatctgtgtcccaaactttgggaacaggcacaaagcagtggtatgtgggattgcgattagatactagaaggctttccccgagagacaaactgatagacttggtgtctgtgaaaggctaccaggcattggagtatcacaaacaggcattcttttttttttaaaaaagaaagattttatttatttatcatatgtaactgcactgtagctgtcttcagacactccagaagagagcatcaaatctcattaaagatgattgtgagccaccatgtggttgctgggatttgaactcaggaccactggaagagcagtcaatgctcttaacctccgagccatctctccagcccacacaccagcattctttatctttgcctagaattgtcagacatggatgtggtcatccgggcataggcagggggcacaggcatgtgggctgcagtgctgtggtgatctttccagtggcatatatagagagttagtatccagcttggtgtatgctggacaagggataccgcatctgcatggaaatttgatgggagagcaccagagagggaggaggccatcttctcatgcctggcttgcctgctctaggtctctgatgatgaatacaccaagcttctccacgatggcatccaacctgtggccgccattgactccaactttgccaactttacctacacgcctcggtctctgcctgaggacgacacttctatggtaagctgacccttcccagtctagctgggtcatgggggtggagggtgggaagtatagatatcagttagatgtgcataagaactctcgggtgaggcaggaactccaaggatggttatggaatctccttcagagttaggccaggtatgcctttcaccattatggggtcacagggtagcctaggggacagcagtgggctggatggtgccccaaagctgcccgttcctctaagatcatatgtgggcttgcttccaagaagtcttagcttttgggccccttaaactttgggtagttcacagtttgccgcatgcccgttcacctatttaattgtcctttagtttaggtttagaattctaagactctaaattttggggtatgaggcatcaagagaggtggagatagataggtcccacatcttgatagtgacagtctctctgactttctctctctctgcttttcaggccatcctgagcatgctgcaagacatgaacttcatcaataactacaaaattgactgcccaactctggcccggtatgtgccccgcactgcccttggagcagagccccagtttccccttcctgttgtccttaaacctcaagtccattcccccaagcattcttgaggggggagactggatttacagtgatggggagggctctgtgaatcaggatccattctcagacactggatcgtggataaagaaagacaagaaaatgtgacgggcaatctagagggcttcctgaaggaggagaggctgaggcccctcccctgttttggctcctccaccagattctgcctgatggtgaagaaaggctaccgggatccaccctaccacaactggatgcacgccttctctgtctctcatttttgctacctgctctacaagaatctggagctctccaactacctcgagtaagtggccgcccctcccacatcttccaatgatgaggtcccactcatgcggcaggtcctctacctggccactcatcctgtccttttcactggggggggggtgtgctgtacagcccccaccttccataaggggtctgctcagccatagagaatgacagacctgcttccccgagggctgccacactccaaaggagagcggcttaccggaaccttttgaccgggtggctcctgggcatctcacccagctgtctgtcctctgatgcacccagggaggaagccttggtgacatttctcttttctgctccctacctagggacatcgagatctttgcattgtttatttcctgcatgtgtcatgacctggaccacagaggcacaaacaactccttccaggtggcctcggtgagagcctgccctcctcacagtgggggcccttggccttgcccttctcagcctgagaagagatggcagctggggcaagagaagagagcagtaccctcagtgggaggggctccctctgatccccataggaggggtaactagagcttttatggacttttccagaaatctgtgctggccgcactctacagctcagagggctctgtcatggaggtaaatttccatcctgcccagcctctgttctgaatccccaaagctagtcttgcaagctagactgttctcaaaccatgctctctagtcaggctgcgggagttgtgcctcgtgggcttcagtttcctgaaacaggcacagatttggggtgagactacatctgctgggtcagcctgaaccacgtttgcaaaaccggtggggacagggcaggcccgcccgccccctcaaacctgcccctttaggccaagccaattctaatccccttagtttagccttagattgtgggatggggcttggggttgagggtcgctggtctgctctccgtcagcctcttgggtcagggatgagatcggagacatctgaatttcctgtgccttgtgcaggtcttggttcagggtgggagccacatcttcaaggtcaccttgccccaggctgtctcccacagctccccctcctgaggttgcccctaatagcatacccaacccatagagatatgcttctgctcgctgtctcccaggaggcctggtggcagccatagtcctgccctttgtcccttgggatgagcttgctcctcccccgagtgacagcccttcactgttgggagacagggccttgcccttgcctcctcactgcctccccttgtcagcaaacaaatattttctgcatgaattagtgtccaggacatcaggggatggtttcagaattcttccagcctgtgaagccagccctctgagcataccttattgggtcccttcctgtgacagctaagggatctgagtcatgcagctggctggggacttgcccagggccatagagggctcaaatagagcactctcaaagggaatagggctcctaactctcctttctgtctgctcgactgagcttgggggccagtccctgcctgtctttcctgcctctctgatgcctctggtgaggggcgcactttgacccagtggaacccgtctctcatctccctacagaggcaccactttgctcaagccattgctatcctcaacacccacggctgcaatatctttgaccacttctctcggaaggtgatggagccgtgcgcggggggggggggggggtgcttggtgggaaccatgaacaggctaaacagaggggggtgagaactccctcggagtggattggatgtgtgcaacagggaccatgacagccctcccctgacactctccaggactatcagcgcatgctggacctgatgagggacatcatcttggctacagacctggcacaccacctccgcatcttcaaggacctgcagaagatggctgaaggtgccgcacacattgctggggagagatgggtggttttggtttaacatggagatctgcccacctgaacatctgaagtggctttgtcctgtccttggcccattcctggctatggtgtccctgcaggcagacctactactggtcaccttccattgggtgtgctttgttcccatgggatgctgtagacccactttgggacaggctgtggggtcctcgttctcagaagggacaagggacctgggccctcctgcttgactccattgtcccccaacagtgggttatgaccgaaacaacaggcaacaccacaggcttcttctgtgcctcctcatgacctcctgtgacctctctgaccagacaaagggctggaagaccaccagaaagattgcagtaagaaccagccctccaacctgagaaagcacaagctatgctctcaacccagctctgtgtgcccccaccagctctgtgtgcccccaccagctctgtgtgcccccaccagctctgtgtgcccccaccagctctgtgtgcccccaccagctctgtgtgcccccaccagctctgtgtgccaccaccagctctgtgtgccaccaccagctctgtgcacccccacagtagcctgaacagctctctgtgctggatttagcctggttgtattttggggagtcagaaacccagagtgcctcagagcaacagatgaaatggcccagatgtgcactgaactcacccagggtcacgtaacaaattagaggcttctgggaagtgggcagaatgcagactctgtactgtaccatctcctgttaagctagcgagggtaggccctgggtgggactgagacatcgggcctcagtttgccactgtgggaatggattctggtggacagatgccactcacaggaggtgacgtcactgttgccttctaggagctgatctacaaagagttcttctcccagggagacttggtatgtgtcccgtggcctcagggtaatggtgtgtgcagagggaggggtgttcctgacatgaggctgggaaggtttgggttagctggttctacctggtacctgatggaggagcaggaggggcaggcctgatgatctggtgtctataggagaaggccatgggcaaccgaccgatggagatgatggaccgtgagaaggcctacatccctgagcttcagatcagctttatggagcacattgccatgcctatctacaagtgagcttgcggggcaccgctggaccgagtatagagagggcggggcagcctgtatctgcctcagcgttagaaagagggctgtctctgtatcctcagaccctggtgggaaggggtctttactctgtgccaaccccaggcttcatatccttacagaagtgctctttgggagtgggcatcatcttttttgctgcctgtgctgtttcctggcctgtgaccccatccctcctacccccaggcttttacaagacctgttccccaaggcggcagagctgtatgaacgtgtggcctccaaccgtgagcactggaccaaggtgtcccacaagttcaccatccgaggcctccccagtaacaactcgctggatttcctggacgaggaatacgaggtccccgatttggacggcaccagagctcctgtcaatggctgctgcagcctcgagggctgagggatcccctctagggaccctccctgcctggccctcctttcacaactctctaccagtctgtttgatgcattgggaaccagagccatgggtcctgggttctaggccaggatgtcccctgtgacccggcacatgccacccttcctgggcttcttcatctttctcatctgcagaaggcaagcaagattaccagtcccacacagactttgccatttgtacacaagagcacagtagtgaccaggggcagtggtatgggtctcttctgcacctctgactatccatgcccagtcctgcccaagccgctccatctcttaagcagcgtcacagaacgtcctgtgaccccgttagagccctactaggtcagtacccttgttttcctggaggaatcccaggtctctggagactccacgatcctcacctcatggaaggaggagagactgctgatcgagcagaggatataaaacaagtcaccagctggaagtaccctgagggtgcctctgtgcttttggtaggattgggacccttggaggaagctaactgccaggttgctcagtgctctgcaggaggaagtgctccagcagagaggctgggaataatgggcaggaagaattgtcaagccaggagacagtcctgtacacacccacacccttcaggcagtgtgacctgaagcaagtccctttctctagctaggcaagacagaatcattagacagcctagtctctcttcagatcaaagtctccatagttgtgtggagtccgtgagtggccgggcatgctctgctgccctaaggcacagagagcctaacttttctttcctctgagtgtatccccttggtctgagcccctctcccattcctgccaccagagaggggcctggcctctccccacagggcttctctcctcttcaaggccatatccatatgtgccccccggggcctcaggagactctcccagggctgggcctcttgggtgagtggccactagcttctcttctgttttgttccctatgtgtcgtgggtgggggagggggccacctgccttacctactctgagttgcctttagagagatgcattttttctaggactctgtgcacctgttgtgtgtggtcccgtgggctgagtgctttgtacatgagaataaatctatttctttctaccaaccctcccacaggaggttgtctgtggactctgtacattaggtagatgggaaacagtttgcacaggagagtgtccctagaatctctctgactaacaaatccttttcccctagtccctactccctcttctgcgacacccctgttctggggggcagggtgtgtcataggcctgttgagatcatacctgggccatatatgggggctacggattgtcggcacacaggaggttcaggtatggaacagtgagaaaacatcagttgacagactgtggacttgagagaaagacctgagagtcagaagcaaccagggaagccacttgggggaggtgacctgtggctccttctatacctctgcatgctaatctgccgcagtcatgatacccagatggccagcactttgacttcagagcctctttagctgtggggttgtctgggtaaccatcaatcccacatccttgttgctcccgagtgtgtggaaggggtccccatgtgtgtgaatctccatgctagatttgatgacggtttgtgtctgtgggccttgctggatgaagagtggacctgagagatgctggcttgcacaatagtgccctgtggttgcacagaggtctggaaaacacactggggagctggggtccctgtatcccatgaatgtttgctcattcctaccctacccctagtgtgggggaaggagctctggcatgactgtcagggtgatcaggatagcctgaggatgtcagggatgatgaccaggtccaggctctgtgggggaaaggctctctctgcaaggagcctgcaggcatctctcataaggtcatgcaacacaaagccagccccatcggcctcttgtaactgtcctgtcttccagacctaaccgttccaaatggcattttatccaaacatcacaagattccgtggcatagacgccactggcccattatgtagccgattggtccaaggtttggaaagtgctttgccagggctaggctgtgagccagcccagcatgtctggctcctctccaaggcctctccttctatagaatagagaaggctgtcccggaggacagaagctccatctgcaggtggagcagttctgttgtggatgcttaagggtgacaagcaaggggttgggccccagagaaggagctgggataagaggactgtgtgcacacgcatcctgggagtgagtgagctgattcggcagtgagtctccgaggcaacaatgacatctggtaataaaagccacttttagaggggctcagcctttttaaaagggggttgtgatgagtgtggcgtcctggttgggtgacccaagggtggtccatggcagtcaaatggagtgaaggtaatagggtgagagggggcacaaagaggctggtttacagccatgttgcaaccttctggtggtggcaaggagataggtgtagaggtggtgccagatccaaggagacaagcattgagaggaactggattccccagggagatcctggctgccattgctccagagcccaggctctggcagggtcaggaagatgggaaggtagcttgggtatggggagctgggagggatatttttgccaaattcacactggagggtcctctcctgaagcaccaagagctgtcactacagaggcacctggccttgtagtcctcacagccccccagggctttcccttctctcagggcaggacaggcatcgggatttctcccaggtgtcagttctctccagaattagaaaggaggccccttgctggaatgggaaggaactggaaaggagactgtgccacttcacaaggggagccacgtgtgagtgtaatctcagtgcacacggcacagctagggtgctctgaagggaaacatcagggtgagtgagagtgagtccctgtgggaagcagagggcaccatcatgtttggagactggtgggtcaggtgtgacaaccaatgtaatggtggctcctgacaacatggctgcccttctcaatcgctaagtcatctagggagaaactacagaaacgtgtgagaagtgtgggactgtaggagccaaggacagcctctccaggatgcaccgggtgtgaggagagaacaaagggagaagcaaggatggaggagagcactcacatgcatgctcctggccaccgccaccattactgcctgccctgccagctgtgcatacatcctgggagaggcctcctcatggtgctgcccagagagctccagtctggaaatccacagcatactaaccgtggttgtgggggagnnnnnnnnnnnnnnnnnnnnnnnnnnnnnnnnnnnnnnnnnnnnnnnnnnnnnnnnnnnnnnnnnnnnnnnnnnnnnnnnnnnnnnnnnnnnnnnnnnnnnnnnnnnnnnnnnnnnnnnnnnnnnnnnnnnnnnncccacccccgccttaaaatcaagacccccccccccaacacacacagaatacagcttacccccagggttcttctcctcaatgggtgcccccaaggcaaacacctgctcatgggtcaaaagagtacaccggttcaaagaaagatggaaaaccagacaacacagagaaatgagaggcagactggctggaacagatgggccctgctctaaaataaatgctttaaatttacttaaggagataagggaagataatagcaacatgaagttagagcaagaaatcattataaatgagccaagtagaaatgtcaggcatgaaaaaagaaaacgtttggattagggaaagctatcggtgagaaggctgtggtggcgagaatggtgaagtttgccatcagctaggccagctcctatcaaaggcagcgtgtgggggagggaccaggagccagtgtggcagggatgataggagctgtagaagttggaagtccctgcatccggatgacaagcatttcagatgaggggagagggaatgtagaaagctggtggtagaactgggcttcggggctcatgcctgggattccagaggccaaggcaggaaggactgtgagttcaaggcaaacccaagatacaaaacaagttccgggccagtttggatgacatacaagagcttgtctaaaaaatatgagttaaaaagactggatgcgaatatactttaaaaaaaaaagacccaagggaaacgaagacctaagattaatgggatccgagtgtatccaccagcgaacatgaagagaaaaactgaacaaccagatacatcagttgaggattttctgatcactaatacagagaaaatcaagaaaatgtccagaagcaagactgaatcaggttgtcagaattctcaacaccgtccaacgctggttggaatgcaaaatggcggagccaaagcacggctgcgcgcatcctgcacagtttgcggtacgcgccagcttcctgcgcgcacagatggagagactagctagccgcacggcaccaaagaggattcataggccacagtgtttgctgatcacaaaataataaatgaaatgttaataggtatgataatcaaaatgaaatactacatttctgtaggtttgggagctaaatgccatgttattaagtctcttgtcagttaagaaaaagtattccttatttttattgtaaggttgttagaattagatggtgaaaaccctttaccacatcacaatatggccgaagcagtacttagtgaaatttacatctttaaggtcatttattagaaaagagaactaatttttaaagatgagtgaaataagcgagctaagcattcgactccaaaggctgagactaaaggagacaaggaaacacggggcagagacgtcagtgacagcgaagactggcaaagccatcagcttggtccttagaaaaaattagtaagactgatatttcgtaaaaacactcaagaaggagggggctggagatggctccatggggaaggccagtagttgctcctgcacaggaccgacatttggttcccagtatctcagccacccacaactccagttccgggggtggggggcggcatagtgccccctcctggcttctgtgggtactgtaagcatgtggtccatagacatacatgcaggcaaaacacccatacatataaaatagaaataattaaatcttagaagaaagaaagatgagaatatactaagtataggggaggggtggaaacacagaaaatagttacagatgcaaaaggataaaaaaatcataataacagatggtaacaaatagccataactttagaacctggatgagacagaactttcttttgctctactcctgatttcacaggtacatttgtttattgttggccttatttcctggtggaacaaaatattattcatgaagtctgcacttatgccaatatcatgaactcttttccttctaagtagttagtgctttatttatttatttttatttatttatttatattttgttctttctttgggggggggcaggcttgcactatatagccacggctagccttgaactcactatgtagaccaatggtcttaaactcctagagatctgcctgcctcttcctcctgagttctgggactaaaggcatgtgctgccacaaagctccatgttccagttaagttctttggtccatctgacactggctttatgaaggcaacaggtaaggactcagacttgcatgtgtagaactatccttttacttctggaataaaggtacttgattgtggtttaaaacaaaacctagacagagtgaatacatttctagaagaatatataactcaccgaatatatgattcaaatatataaatatgtattaaagggatgaaattataactcatagtatcctctgaaaacctcctctgagggcttcacctttccctgaggagctcttggcaatttatgttgccaggggaagggatgtcactttctctattgctgtagtcattggtaggtcatccatgctctggtaaatagcctcctaaacacagttatgcatataaccttaattagactcagtgaatctctctctctctctctctctctctctctctctctctgtgtgtnnnnnnnnnnnnnnnnnnnnaggggaggggaggggtgaatatgaccagaatacattgtacacagcgaaaccggcaaaacaataacaaaaacaacagcaaaaccaaaacactcccaccccgttatagatagactcactagtgtttaaaagaattgttagtttccaattcataaaaaccactcctgagacaggtggcatcggcacatgcctttaatcccagcacttggaaggcagcggtaggcagatttctgggagttccaggccagcctggtctacagagtgagttctaggacagacaggaccgttatacagagaagccttgtctcaaaaaacaaaaacaagacaaataaacaaacacaaatcttttaaaaggtacaggtaacttatgaaactggcctggttttttatttctaagtgagatagccccaatgcaagagatgataacagatgcgaaccagggagagacagctcagagagcacagtgacgcgtggtggtcacctcagttttgtctatggaccaccaaacttctatgttgaaatggagacacaatggaatcttttaaaatgcatcataaccagatggaaaaaatttccttatgggaatgaaagaatgtttccaccccagaaaacccagaaaagtaattcaccatatcaatgggacttattgagacaaaccatgattacttcaatcagaacagaaagaagcgtttgatctagatggtgcctatttgtgattgaaatggcttcaacatcgtgggatgagatgggaaaccaacttggaaaaatatttcaaaaaaatcttcagcaaacatttgagtcattttcagggccaacacattctgtttatgaaaaaaatataagacagagatgcctgccatcacttggttgatggtcttgattgtcgacttgacaaacatctgggggagagaacccagattgagggtttgctcccatcgttctctcctgtgatcatgtctgccctcattaatgattgatgtggaaaggccagtccgctgtggatggtgccaccctcaagttggtggtcctgggtatataagaaagctgactggtcactggaggaagcaagccaggaaacaggattcgtccatggcttctgcttcaagctcctgtcttgagggcctgccctggctcctatcttagttccttttctattgctgtgctaagagaccatgactgagataacttagagaaggaagtgtttaatgggagctcacagttagggagagagtgagcccttcatggtaaggagcacggcagcaggcagccatggtcctggagcaatagctgggagcttacatctggaccacaagcagatggggggtgagacactgacaatggtgtggactattgaaacctcaaagcccacactcagtcataaaccccctccgagaagggcacacctcctaatccttcccaaataggtccaccaactggtagccaagcattcagacctctgaccgtgtaggggccattctcattcaaaccacctcagcttctcttaataacggactgtagcccataagccaaataaacactttcttcctccaagctgattttggtcatggtgttaatcacagtcacagaaatgcaaactagaacagtgagcaatactgcgtaactcagaaagcctggctaatgctgtaatgagaagacataagatgtgcacatctggactatgaagggaaacttgttcttcaaaggtgatgctactctttaagtagaaagcaaacaggtcgatagatgagaggtagatctaaaagagctcactggtgtttctgaaatgcaagcatcgatagcacttccatagcaacaacattagtgttttgagagcccagcaaggcagagtgaaattacacttgtaatttcagcacttgggggaccgaggcacaagggtcatgagttcaaggctagctgggacagggacaacacagtgagatccaattcaaagtgttctctctctctctctctctctctctctctctctctctgtgtgtgtgggggtgggtgggtgcctggagatgctaaagaagatgactaggatacacacacacacacacacacacacacacacactggagaagaaacttagccatagagtacttgtctaccacacatagaacctgggttttatgctctgcactgtaaaagaaatagccaatatgtttagagggtcataggcccgagtggggaagcagccactgttgttttgttaaatggacacgatgtgcccatcaaattgccttctggataagtgtttatgcccatgggtgagtgctgctgtcggctttggtcagagaagctttgttttgcagtgggcagccataaatgcagaagctcataactggtggaagcagcgagaataaatgatggttggatgctcagcagtaaatgggacatctatatcatctctgatgcccaaagaacgtggcaggagagggagcagaaagtgtattccagtcagaggaagcagcaaggggacggggaatgtggacttctgcataactcggccattgcactgttgaatcggtagccgctgttgttacctgcactagattgaatccagtaacattacaaaggcaggggctttccaggccctaccctgtcctgaggatttataagaagttcctggttgctcaaagaagagacattttctgcatggggtagccactggtaaggtgcccatgtgcctgtgaagagctcctcctccggctcctctgggcaatcctattgaaattcactggttatttaagagagagaggagagagagagagagagagagagagagagagagagagagagagagcgagcgagcaatgagtgcggaatatgattgatatacatcacatacgtgtatgcaaatgtcataatgcaatctactatgtacaattcatgaatattcataaaatgatgaaaaacaaaaaagtgaagtccagaattgaaagacaaaagtaaagagtgcagtcatcttaaatggtactgatgtaaactgggcttggtggcgcatgcctttaatcccagcacttgggaggcagaggcaggtggatttctgagttcgaggtcagcctggtctacaaagtgagttccaggacagccacagctacacagagaaaccctgtctcaaaaaaccaaaacaaattaaaatatataaaaaaaataaaataaaatggtattgatgtaagaaaagcttctgggccaacagaagaggaatagggcgctcagaggagaacatgtgacacttaggaacaccacgttgttacccaacaaaggtggaagctgcatctaggagaaagtgtgggtgtctggaaactcccctgtgatgcagaggaagagaacgctggatcccaatgtacgtcacacgcacaggaggaggatgcgtggattaggctaaaggtaaaaggtgaaaatggacctggagaggaggcagccaggctaggcagtgcccatctgtgatcccagcactcgggaaatggaaacaggaacactaggcattcaaggccagccttggctacagagtgagctcctgtctagcccggagtgtgtgagaatcaatccgaaaaaaaaaaaaaagctagtaaaaagtaaacagaagaaaacgcagagtgattctgtgtgcatagaggacaagccataagcaaaaccataggaaatccaattacacaggaactgtagctttcagatgtcttatctgtgacatgtgtcccagacaaagagctggtggattggggaaaattgtttgcaatgtttaagattgacaaggtgctaatatctaggatacataagaaattcttgcaagaaagcatcaacctcaatagaaaaaaaaataaaaagaagaaatccctggaacaagatatttatggaaaaagcagctcaaaagcatttagaaaatcttctccagctccttggttaccagagaaacagaaagggcaacaacaaaccattttatacctggtagactggcaggaaccagacagtcaaatgatgacgtcacctgcaggtgggaagtaggaaggtagaatttgagactgcccacaggagtgtgggctaatgtttgtatagacaccaacctggcagctgttattcaaatgagacacatgcatgtgcatagtggtatatgtgtgccctataactttcagggccacttctgggtgttcacttaattcttaactgttggaccaaggatgctgatactgactgggtgtatagtgagtgcattggtgggaaggcactgtccagtgatatttagtaggtaaggataatatatacatgtacctagcaccatgagtccagagagagagagagagagaaagagaggaagaagaggaggaggaggagaaggaggaggannnnnnnnnnnnnnnnnnnnnnnnnnnnnnnnnnnnnnnnnnnnnnnnnnnnnnnnnnnnnnnnnnnnnnnnnnnnnnnnnnnnnnnnnnnnnnnnnnnnnnnnnnnnnnnnnnnnnnnnnnnnnnnnnnnnnnnnnnnnnnnnnnnnnnnnnnnnnnnnnnnnnnnnnnnnnnnnnnnnnnnnnnnnnnnnnnnnnnnnnnnnnnnnnnnnnnnnnnnnnnnnnnnnnnnnnnnnnnnnnnnnnnnnnnnnnnnnnnnnnnnnnnnnnnnnnnnnnnnnnnnnnnnnnnnnnnnnnnnnnnnnnnnnnnnnnnnnnnnnnnnnnnnnnnnnnnnnnnnnnnnnnnnnnnnnnnnnnnnnnnnnnnnnnnnnnnnnnnnnnnnnnnnnnnnnnnnnnnnnnnnnnnnnnnnnnnnnnnnnnnnnnnnnnnnnnnnnnnnnnnnnnnnnnnnnnnnnnnnnnnnnnnnnnnnnnnnnnnnnnnnnnnnnnnnnnnnnnnnnnnnnnnnnnnnnnnnnnnnnnnnnnnnnnnnnnnnnnnnnnnnnnnnnnnnnnnnnnnnnnnnnnnnnnngaggaggaggaggaggaggaaacaaaagcagggctttgagaatgacaggcagtttagcaggtaaatat

SEQ ID NO: 949 - DNA, 3937 bp, Mus musculus
gagtgcagcgggccgggctggaggggcgggcgggcggctgcgagcatggtcctggtgttgcaccacatcctcatcgctgttgtccaattcctcaggcggggccagcaggtcttcctcaagccggacgagccgccgccgcagccatgcgccgacagcctgcaggatgctttgctgagcctaggcgccgttatcgacattgctggcctgcgacaggctgccagggatgccctctcagccgtgctccccaaagtggagactgtctacacctacctgctagatggggagtctagactggtgtgtgaggacccccctcatgagctgccacaggaaggaaaaattcgagaagctgtgatctctcagaagcggctgagttgcaatgggctgggaccttcggacctactgggaaagcccttggccaggctggtggctccactggctcctgacatgcaagtgctggtcatacccctgctggacaaggagactggaagtgtggcagctgtcatcttggtgcactgtggccagctgagtgacagtgaggaacagagcctgcaggtggtagagaagcacgctctggtagccctgcggagggtgcaggccctgcagcagcgcaggcctgaagctgttcagaacacgtcagtggatgcctctgaagatcaaaaggatgagaaggggtacaccgaccatgaccgaaagatcctgcaactgtgtggggaactctttgacttggatgctacttctctgcagctcaaagtccttcaatatctgcagcaggagacacaggccactcactgctgcctcctgctggtgtcggaggacaatctacagctttcctgcaaggtcattggagacaaagtgctgggagaagaggtcagctttccattgaccatgggacgtctggggcaggtggtggaagacaagcagtgtatccagttgaaggacctaacctctgacgatgtgcaacagctgcaaaacatgttgggttgtgagctgcaggctatgctgtgtgtccctgtcatcagccgagccactgaccaggtggtggccctggcttgcgccttcaacaagcttggaggagatttcccgacttccagcttcacagatgaggatgaacacgtgatccaacactgcttccactacacaggcacggtgctcaccagcaccttggccttccagaaggagcagaagctcaagtgtgagtgccaggctcttctccaagtggcaaagaacctcttcacccacctggatgatgtctctgtcctgctacaggagatcatcacggaagccagaaacctcagcaacgcagagatctgctcggtgttcctgctggatcagaacgagctggtggccaaggtgttcgatggtggcgttgtggacgatgaggtgagggagtatggagggtgtccgggaagttacgagatccgcatcccggcggaccaaggcatcgcgggccacgtggcgactacgggccagatcctgaacatcccagatgcatatgcccatccgcttttctatcgcggcgtagatgacagcactggcttccgcacgcgcaacattctctgcttccctatcaagaatgagaaccaggaggtcattggtgtggctgagctagtgaacaagatcaatgggccatggttcagcaagtttgatgaggacctggccacagccttctccatctactgtggcatcagcatcgcccactctctcctatacaaaaaggtgaatgaagcccaataccgcagccacctggccaatgagatgatgatgtatcatatgaaggtctctgatgatgaatacaccaagcttctccacgatggcatccaacctgtggccgccattgactccaactttgccaactttacctacacgcctcggtctctgcctgaggacgacacttctatggccatcctgagcatgctgcaagacatgaacttcatcaataactacaaaattgactgcccaactctggcccgattctgcctgatggtgaagaaaggctaccgggatccaccctaccacaactggatgcacgccttctctgtctctcatttttgctacctgctctacaagaatctggagctctccaactacctcgaggacatcgagatctttgcattgtttatttcctgcatgtgtcatgacctggaccacagaggcacaaacaactccttccaggtggcctcgaggcaccactttgctcaagccattgctatcctcaacacccacggctgcaatatctttgaccacttctctcggaaggactatcagcgcatgctggacctgatgagggacatcatcttggctacagacctggcacaccacctccgcatcttcaaggacctgcagaagatggctgaagtgggttatgaccgaaacaacaggcaacaccacaggcttcttctgtgcctcctcatgacctcctgtgacctctctgaccagacaaagggctggaagaccaccagaaagattgcagagaaggccatgggcaaccgaccgatggagatgatggaccgtgagaaggcctacatccctgagcttcagatcagctttatggagcacattgccatgcctatctacaagcttttacaagacctgttccccaaggcggcagagctgtatgaacgtgtggcctccaaccgtgagcactggaccaaggtgtcccacaagttcaccatccgaggcctccccagtaacaactcgctggatttcctggacgaggaatacgaggtccccgatttggacggcaccagagctcctgtcaatggctgctgcagcctcgagggctgagggatcccctctagggaccctccctgcctggccctcctttcacaactctctaccagtctgtttgatgcattgggaaccagagccatgggtcctgggttctaggccaggatgtcccctgtgacccggcacatgccacccttcctgggcttcttcatctttctcatctgcagaaggcaagcaagattaccagtcccacacagactttgccatttgtacacaagagcacagtagtgaccaggggcagtggtatgggtctcttctgcacctctgactatccatgcccagtcctgcccaagccgctccatctcttaagcagcgtcacagaacgtcctgtgaccccgttagagccctactaggtcagtacccttgttttcctggaggaatcccaggtctctggagactccacgatcctcacctcatggaaggaggagagactgctgatcgagcagaggatataaaacaagtcaccagctggaagtaccctgagggtgcctctgtgcttttggtaggattgggacccttggaggaagctaactgccaggttgctcagtgctctgcaggaggaagtgctccagcagagaggctgggaataatgggcaggaagaattgtcaagccaggagacagtcctgtacacacccacacccttcaggcagtgtgacctgaagcaagtccctttctctagctaggcaagacagaatcattagacagcctagtctctcttcagatcaaagtctccatagttgtgtggagtccgtgagtggccgggcatgctctgctgccctaaggcacagagagcctaacttttctttcctctgagtgtatccccttggtctgagcccctctcccattcctgccaccagagaggggcctggcctctccccacagggcttctctcctcttcaaggccatatccatatgtgccccccggggcctcaggagactctcccagggctgggcctcttgggtgagtggccactagcttctcttctgttttgttccctatgtgtcgtgggtgggggagggggccacctgccttacctactctgagttgcctttagagagatgcattttttctaggactctgtgcacctgttgtgtgtggtcccgtgggctgagtgctttgtacatgagaataaatctatttctttctac

SEQ ID NO: 950 - protein, 919 aa, Mus musculus
ECSGPGWRGGRAAASMVLVLHHILIAVVQFLRRGQQVFLKPDEPPPQPCADSLQDALLSLGAVIDIAGLRQAARDALSAVLPKVETVYTYLLDGESRLVCEDPFLPQEGKIREAVISQKRLSCNGLGPSDLLGKPLARLVAPLAPDMQVLVIPLLDKETGSVAAVILVHCGQLSDSEEQSLQVVEKHALVRRVQALQQRRPEAVQNTSVDASEDQKDEKGYTDHDRKILQLCGELFDLDATSLQLKVLQYLQQETQATHCCLLLVSEDNLQLSCKVIGDKVLGEEVSFPLTMGRLGQVVEDKQCIQLKDLTSDDVQQLQNMLGCELQAMLCVPVISRATDQVVACAFNKLGGDFPTSSFTDEDEHVIQHCFHYTGTVLTSTLAFQKEQKLKCECQALLQVAKNLFTHLDDVSVLLQEIITEARNLSNAEICSVFLLDQNELVAKVFDGGVVDDEVREYGGCPGSYEIRIPADQGIAGHVATTGQILNIPDAYAHPLFYRGVDDSTGFRTRNILCFPIKNENQEVIGVAELVNKINGPWFSKFDEDLATAFSIYCGISIAHSLLYKKVNEAQYRSHLANEMMMYHMKVSDDEYTKLLHDGIQPVAAIDSNFANFTYTPRSLPEDDTSMAILSMLQDMNFINNYKIDCPTLARFCLMVKKGYRDPPYHNWMHAFSVSHFCYLLYKNLELSNYLEDIEIFALFISCMCHDLDHRGTNNSFQVASRHHFAQAIAILNTHGCNIFDHFSRKDYQRMLDLMRDIILATDLAHHLRIFKDLQKMAEVGYDRNNRQHHRLLLCLLMTSCDLSDQTKGWKTTRKIAEKAMGNRPMEMMDREKAYIPELQISFMEHIAMPIYKLLQDLFPKAAELYERVNREHWTKVSHKFTIRGLPSNNSLDFLDEEYEVPDLDGTRAPVNGCCSLEG

SEQ ID NO: 951 - DNA, 120585 bp, Homo sapiens
  misc_feature (1)...(120585): n = A,T,C or G
tcagtgggcggacaggctgacctccatccttagcctcagccagtggggctgggcagagtgggtggggatgggccatgtgacctccgactcaggcatccagctcagtggggagcctgggtccagcggaagacttggggagctggactccaggttccctctcgctgtctcaggaaggggaggtatatggcaggagactggaaccggttccctgagtcctactgacctatttcacaggctggggctaagccccttgagtctcccacctcctgtgggtcgctctggccagatccacaggtcgaatgtctgacccttctgcctccagccaggacaggttggacccccttatccaagtgctgaggggctggaatccgctcctggatctgaccttgcactgcccagccagccctgaggcccacctgagtgggtgagactggaggcgccccctgctctgctaaggccactgccccagctcagcgtgctggctgcagtcctgcactaggccacaaggcggcagccatggaccactcatcattgctggaatcaaagcagggtctggaggatgcctgagtggtggtcctggcccagacctttctctgctggggtgtgaagcgggacccagttctgcctttggcctgcaggctggtgacattctggaaggcagcaccatacaggaatgtgcattggagtcctgggctctgggaaccaggaagaggagggaacagccttctaccaagtacctgctgtgaatcggcccctgtgccccctgcactgtctgctcttggcaagggggagctaggcccagagaagggaggcaactttcccaaggtcacaccatgctcgtgaagcaggcctgaggtccatttcccctgccctactttggtggggtctccctctttgactcccctcctgattccaacccttttctcctcttagaaatggcctgaggcagggggtctgaactgtcaggagttagtgatggcttaaagtgatttccctctggtaaggggtaggggtgacatccaaacaggagcctcagggcctcagccggaatgaaatatgcctgtgacaacagtgttggatgggttaggggcaggaggctctgctggtccttgtcgcaaggattcctaaaaatggggcctgttgggaccctggatggtttgctcattcacatattatttgaagttgggttgccatggatgagttgaagaccccagacctggacctgcagaggggccaggagcagctcttggaaagggaggggcttcctggacaaggaagtgctcctgagccagctttgaagaccggaggccttgccaggtgtggttggggtagaggttgaaatactgaaatattgggggaggaggacagggcttcaaggaccaacccaaatccaggcctagcccctggggaatacggggagccctgggaaagaaggccgaggcacgtcagagcctggatggtgagggcactgcaggtgaaggggaggctggggggcagaggggagaggggcagggaggtggggtaggatgtctgcctctctcctgcctccttccagcacaaccttcctaccctgcagagttctgaggagtcctggggcttctggagaaggaaatcagtgggacagggaagggcaagagctggggcttctttcctggcctcatgctctggtggcctccaagccacctgcccacagcccgctgtcttggaaagcacgcgtgtgggtgccagtgctcctgtttacaagctgtgtgactttgcctgagttacttaggtctctgatcctcaatgttgtcatctgtactttgcgggtattaatagtagctacctcctagtggtttgggcaattaaatgagctagtaagtgtgaagtgcctagcattgccccttgctaatccccttcccactgcactgtctgcagtttctgagaaggtatcatggcatattctagtcccaatatatttgcactcaacaagcacttattgaacaccaactgtatgcagagcgttactgaacactgagggggagcagatgagtgagtggtgtggaggaaggtagagacctcctggtaggggatattatcaggaaagactggaggaggtgagtctgaaaggagaggcagttctccacaggtggaggagaggaagtggtctgagcacaagacaaggggatgtgaccctgctgtggtcactacctgctgtggctgggacacagtgccctacagcaccctagggcctatcccccttgcgcctgcctctgagatatgaccacatcccagtccagtgggctccttgggatcatcccccatcagaataaggaacagttcctattctcttagccagctctgtgacctaagtgaccctgaccctgctctggggactgtctctcacataagtgcagtggcctgaacctcccagcccttcctccactacgacacctccttcaggaagctcttctgggttgctctcccatcccactgtgcctacttagggtatgcgtatgtgcccaggtcaccacacctagtcagggactcacctagggaagagcagtcggggacagtttccctggccagccagggttggcccagccctagcatgtcccttctcctacaccacttccagcctgtggaaatttccatactttctctgccctggttacagctcctactgctgtatttatcaccctggagacacagtggcacaggcgcacacatgccacacacactcaggcctgcacacacgtgcctgcacacctcagcctgcttctccagatctgcgagtgcatgctgcgcgcacacacacacactcggcacgtggatgagcacacacacacggcacgtggatgaacacccacccacacacagctctctaggaaaattgctccccttccctcctgctcctcctccaccctgtcctcccaccaccacccacttccaaatgctgagaccaaagagatgggctggacggtgcctctcaccacttgtcagcctgggacgccctcctccctttgtgactagcatgccctcctccccctgcccgtctgcctccccagctctctctgcctccctgtcgccctgccacctccctgcgttcctgtgtatctgccctccacacaagtcactctgaggcctctctttgttactcttgactctgaagtggaaactgctcctcccagctctcctgagaggctcaggatggggacctgacctcatagggctgatggaggcatagggacaagtgaaagggaccccaggtcccgaatctcctcagctcctgtcaccttcagtccctcctattgggttaggggagggctgtgtgcctggcaccatggagaccagtgtcatggcaacacagttcgggtgggcacagcttcctcctcctggggtgtggggtccataagaggaggtgccgaggaggtgggccttgtgctggtgcccaccatggctgcctccagctcaccattcccaggacagcccacccccatccccccagccaactttgcttgccactgcagcttccagtgccacaagtcactgatcccatttgggaaatcctctctcaaacaccagctccagagctgggcgccagagagggcaggggcttgcccagggtcacacagcaagtctggccaagctcctgactctcagacctgttttctcctccggtctcccaccttccacccagaaaggggactgggggcagaggggtcagtccaacctcagttcccaccacgatcttcagccagcccttagagttggcagtgggagtgaagatgcaagtgatagtgccgagaaaccatcatggggcgcccaccacctgctgtgccaaggctttgcatgtgtcatcccattttattccaagacccaggaggaagatgactggtaagtggagtagctgggacaggaacacaggtccctctcagatggggcaggtgagtcaaggctcgtgtgtattgctgtctccatcaggcgctcttttaaaagaatggcaaagcttttaatcccatctttattaccggtaagagtgtagggggaggatctggggcatagcctgggtctggccttagggtttctagaaaccaggggatatttttctaagaagatagagaatagagctttcctagtgtggttagacctagggaagacctttcttgcagtgcagcaatgcagaccgacttccaatccctaggtcaagctggagtctagggacagaggggaggagacccctgcctcctgtgcccagcctcaacttgtctcctgaccttcatggagtcacgttgcagctgcctccctcctggcttatgtaataattcaaatatagcagctgcctttatcccactgagtcacaccccctgcatcccccctcaggtgcggggagttatgggggaagaggtggttcagggctgagtgggaggttcggggcctcctggcaaggaagatccctagtgtgctggattggagggtggtggtggtgagggggctggtgctgaggccccaagaagagcagagccttcgccagaatatgaagccacaggggccacttctgccctgacccatccctgctggaattccacattcctgggggccctccccagagtcacaagctatatgtacagccttctcttgtgggctgctgtctcagttggaggaggaaggagaggtggaagagtatgaagagggggaagtagtccggtggggcaatggccaccgtctttggtcctaggctcagcctcgcccttcactcactgggttacctgggcacccctctgacctcagttttcccatctgcacagtgaaggattagattaactggctctagcgtctcattctctctgatttataaccctggagatgatctcaacctgaggctgaaggcacttccgagtgtctggcccagccgcgttccaggctgacttccctccctcttttctctgccatccctcctagaccaatgcagccacccccacccacaagacaaaagaggcaggagagggccctggactcagctggggctgggcggcttctcccttccctgaactcgccatctgttccagccccccagccccctgcctagcagccatgggtaggtcactgccctcacctggggtcaccccttcctccccggagagctctgacagatatcctggaacctgaagtggatccttcatgccccatcctgaatcccaaagccaccttcctgaggtgttgaagaagctgctccaccttggaactactataggggctgtggtggcctttcattcctttatcagcaaaagcttttgtcacttgtgtggtgggggacatgcttagtgtgagaatgcagagacccatgccaggccctacccaaggacatggtgctccttcagccattgtcatcagagccacagaggggagcttcctggcagaggaggagtggggagaagctgtggaatggctccttgagctccccactccaccccttccccatgcctgggctcccattgcaaagacccagatgtgggcttatcctgtcccccagccagagggagtcacccaggggtgttcaggccaaccctttgtgaaatccatgttccaccagttaccagcctttctccggagagctgagggctgtctcacactgggtagtctcagcctgccctggggttgggggggtgctcacagagcagtaagcgtcactgcctgcatccccacacacctgcattatcttgtctgcaagacacgtgtgcccctgagctgagctctgttgtgcaccacccgatttccgtcggcctcctttctgacttttctccatcaacatttcctgcttgggcctgttgcgggctacccaaaggctgtggactggggccgaggtacataggactttggcttgtcttttgagctaacaggatcctgtagaagaaatgagatgagcctgagagggggtcggggggtgagacattagggaagggagaggccaccaagggtctctagcccagaatccaatgccccttcctgcctacctgtccttgtgggtgggaggcagggtgtgtgctgactggcccagcaatggtgggctaggatttgggataggcagagaaaaggaagaggagggggaagtcggcctgggaggagaaacactgtacaaagtcgaggaggagagaaccagagtgtgcttagggaccagacctggccccacctggagcagaggatggtgaggtcagtcagggctggatcacaagggacctcaaatgccaggctgaggagcttggcctttatcctgagggcactggggagccctgcaaaggttttgagagggaattccattaccagatagatgtctttggaagccgcctctaggtgcaaggaggaggtggagtagagaggttgacctggggtaagggttggagcatgaccaggggagggggaaggaagcagggggtggggatggagggagtggatggatctaagagaatctactgtcctttggaacaaacgatacaggaagtgtaggagagggatggggcaaggcgactttgaagtgtccagctcagagattggaagtttgctgatgcctttgggaggccaaggcaggcagatcacgaggtcaggagttgaagaccagcctggccaatatggtgaaaccccgtctctactaaaaatacaaaaattagccgggcgtggtgcgggtgcctgtagtcccagctacttaggaggctgaggcaggagaattgcttgaacccgggaggcagaggttgcagtgagcccagatcgcaccactgcactccccactccaccccttccccatgcctgggtgacagagcgagactccgtctcaaaaacaaaacaaaaacccaaaaaacaaaaaactaagaagtttgctgatgcctttaatagtaacaaaaggtgtattggatgttcaatatttgagggacctacgggttgttcccagaggagatgtccaagagacagcctggacacctggagctccagggagagggatgggcagcaggggacacccggagttgttggtatgctgggagaaggctgcatgctccgtgggagtagggtggagaatgaggagagacagggccgccgtcctgcaaggagcatccatattgagggggcgaagatagggtgcaccagtgagggagacagaggaggggccgtctggaaggtgggagggaaacagccgcgcaggacggggcgggggcgggcgctgagaagaagccgccttcttcggcaaagaggtagctgaagcctgtggagcctgcagtcctctcaaggctatgggggcagcgcggaggccggattccagaactgaatcttcccatcgctttgggcagccaccctacctcccaggagcatccttcctgccatcccacctccagttccccagctaacaaaaaacggtgtttcttgactcccggcagggcggcggggcgggcaggtcttgtgaacacggctcgcagggttcagcaccctggagagaggcctgtggccggggcggggcctgcggcgggggtaggggcgcgcagtcagagcagtcgggcctttggctccgtctgggagcggtcttgcaggcaggcaattggtggaggagggaaaaacaatcttggattttctccagctctctcccctttatgcacctcccccatcccggcactggcctacaggagcccctatcccagcatttggggctattactctcctgacgacttcaggaaatgagatgggaggagaggggcaactatttactgggaacttttcagacattcccaaaacctcacaaccttttgagcttggaattcgtgaccccatatttcagatgaggaaactaaattgaagttcaggaaggtgaaataccttgcctaggcacttggcagagctgggatttgaattccacctgccgggctctaagtcctgagtgcccattagcccttctgagtcctgaatcttgcagtttgttcctgcagactctccacttctgggtggctgtggagtctggtgtggcagtgggatggggaggagaccttcccttccacctgcttgcttgagtgtattcccaggagatttctgaagatgaggccaccaccattgtttctgaagtgggagggcagaaaggaggctgagggccaggtgagacctcgtcacacctgcacccatgcatgcccaggaggaaccctcctttgaactcttctgactcagcttcttgctgccaggttcctccgaccagtgagcaggttcccaggacatgaaggggagctgtgagggagcaggacgccatggtccagggctgcagcttcctgagcccagagaatgccttcctagctgtcaggaatggagcagcgaggccccagtgataggtgaggtggagaagcaagacatgagttctgggctggctcagctgctttacaaccagcctgggcctcgttccctttgagaaaatggtttgcccagagttcagagatctaaaattctatgatgccttctggggccacagtgggaagcaaagactcctcatattttctttcctgacacttcccaggccacaagacaactgctttctgcagcacccagcctgggcaggccatctacacaagctcagtcatttctgaccttgccccctccaccgtgcacccccatgttcttcaacatgggtcaggtttctattcagcctcagggacttctctgcttgaagcctgttgtgtggcggggaggtattctccccacagctcagagagatggggttgctgtggagggtttgctgtagctcctctaccctggaatataccctcttctgccttaaaagacccagcttggaccctctcttccagaaatgcttgctaaccgcccccccaccacccaaactaggtcaggggtccctctgggcttcacagaccctgtgcttctttctgtcacagcctgcaagtctcccctccccactccccagcccgagtgcttctctgagacaagggatagtgtgagccatgagctcagccactggtaggccaatgaataagtaagttaatggtgaagccaggatccaaatccccatttcctgcctcaaggtgtggagctgtttctcctgcatacaatagtagctctgctgtgacaactctctatctgtcctagggcctaaaatgcctctatttcactaggttatagctttatcctagggagtcctctttggaagcagggtgggggtgcaacaggccttcccccatgcctgtagtctgtgagcagcgaaggccatgtggggcaggctgtggcctaggtctccacagatcctggtagaagtccatgctcacgcatcagctccaagtcccagctaaaccaagccaccaagaggtgggccctgtgacaaggctctgagtccaaaggccatcagtaaagccccctaagtcttccgtggacccagctccaggctgggatgcacgctaggagatgatacacaccgggtgagggagcccagaggagagggcagctagctgtgcatggaggcctgatctctcagacttgagggcacaagcgtgtcccctcatcctgaaggcttctgcgatggggcagcagagggtctgggtctgctgcccctcaagtccccagccccatcctagcccatgaggattgtaaatccctcgtcctctcccctctctcctctgtcagccactcccctttccccctaccccactctctttctatttctgcctctgattttttttccttttctgcctttgttcctctgtgtgtgtgtttctctatgcctctctggtctctttgtacttccatcttgatctcgctaaggctctgatccctctctcctctccctcttcatgtgttactgtcccccttcctgtctctgtttatctctcagtctctctgtctgtgagtcttttttcctctctcccagtcagactctctctctacccctccctctctccctctctccctctctgtctgggcctctctctgttcctcctccctcctccctcccccttctgcattatcagacctgctccaacctcctcccagagccagccgagcagcagaggcagtggcagcgggagaggcgggagcagcggggcagcagagctggattggggtgttgagtccaggctgagtagggggcagcccactgctcttggtccctgtgcctgctgggggtgccctgccctgaactccaggcagcggggacagggcgaggtgccaccttagtctggctggggaggcggacgatgaggagtgatggggcaggcatgcggccactccatcctctgcaggagccagcagtacccggcagcgcgaccggctgagccgtgagtatagtgaggggctggggtggtgagcggctgtgagaggtgccacagacagggtcctgggagtccctccaaggagctggggttggcatggagctgagccacgtggaaggatcgatcctgttcctgggcacccctcctccccgcgttgccagactgcagcctggggtgggggcaggttacctctgagcagaatgagggtgtctaacgtcaacctagtaggtgatgaggctggggtcccatggaaggggctgctggttggaggaggggctgataatgaacctgaaccggttcttcaagggctgagggtgtatgtggggagggggaggtctgccaagtagttgggaggagctctcggggctgcaataggctggttcaggaccctggagagggagagtgtcttggcccaccaaggctatgtgtgtgtgaaggaggtggggagggggaaagatggagaaaatatgaataagagtggccctggagcaagagagggttagaggtaaccaccttccatggaattgggaattggggttcagggacaccactttatgaaactttaccccaaagcgtctgtcccaggatagggttctacggagccagatggaatatggtgccagcctcgtgtgtgtccacgtgcaggggggtgcatgtgcaagtgagtggggggcgccgtggcgacacccctctactaagggctgccgaggtggtaggcagggtatgtgtgtgtgtgtgtgtgtgtatacatgtggaatgtaagggacatgttgggtgtagaggggcctgtagagctctagggtccttggtggttggatgtaaagcagcctgtcagagtttgtgatcatccctgtgtgagtgagagtttattcgcatgtgtctgagtgtgagtgcaggttggtctgcatatgtatgtaggtgtgtctattaggttgagtttgtatattatgtgtgttgtgtctgcaaaatagagtgaatcagtgtgcattttttatctgttccatgtgcatttatgtgtgtgtatttgttagtgtgtgaataatagcattgctgtgtgtggaggtggatgtggctgtgtgcgtataagtattctggtgtgggtgtgtgatcatggtgctagtgtgtatatcggtgcttctgtggctggtgtgtgtgtgtatctatatgtgtgtattcatctgagtgtgtgtgggtggctgtttccttcccctggcaattgaggatacagctgggacaccatggcccactgatgcagggcagggaggggctgaatgtatgaccgcctctttgaactcaggacaattcattctacaccctgtgggaaagatgcagaaaagaaataggcaataatgactctgccctctggggcttcctaagcttcttagacataaaatagcttgagaataattaagcagtagagatcaacgtcatgctaacaggtgggggtggggtgggaactgcataagcaaaggccctgggctgggcatgtcctggagcagtgaagacactgtatagagtggggggcaggcaggacccacattcaatagaactttaagatccaggactcttaggctttatccagagagccctggggagcccagaaaggttttatataggggagagacatgatcagatttgggttctagaaacctgccctgggccaggcatggtggctcatgcctgtaatcccatcactttgggaggcagaagcaggtggatcacttgaggccaggagtttgagacgagactggccaacatggtgaaacccagtgtctattagaaatacaataaaattagctgggtgtggtggcacacgcctgtagtcccagctacttagaaggctgaggcatgagaatatgagaatcgcttgaacttgggaggtggaggttgcagtgagctgagattgccttactgcactttagcctgggggtgacaaagtgagactctgtctcaaaaaaagaaaaaaaaaaagaagaagaaaaataaagaaacctgcctcggtggcattgtctgggttgaactggaagagagaggtggggccaggaggctagagtggaggccaagccaatacaggggtcagtgagttctggagctttttgagaacttgggaaaggctggatagatgagaacagggaagggaatgtctaggtggctcaggcttggactggggtcaggggtgtagtgcagacatctcagtaagtcaggatctcatgagggaaaaggctcatggaaggctcaggaaagctgggcgtgggtgggctgaggtagtgggagagatctttgtagtgtttctagctaggatgcagagggtcagagatcatggagccatctcttgccagacagggaaactgagactatggcttcatcactatcctttggctgcaaggctggggctcaacctcttcatcagacctgaccctcaatatcattctccttcaggccctgcccggaacctcttggttgctgagcttggtcagctcagtgagggttaattgtctttatgctccctgcacccccaccccccgcagtcattccccctgcccaccaagcagctcctgccactcttcctgcttcccactccagcctcctgtccccagggactgctgatggcttggctgggatctagccaaatggtggggggtgggggcgggggtggggggaagagctcccagcagtcctttaccccttggtcttaatggactgggagtctcaccctcagccatgctgctgtcaggccaggcctgcgctccccgggcttctgctgcttgggcctatgaaatctcccgactcagcatgattccattgctgcattcattcattcaaccactcaacaggaacttctcagtagctgcttggtgcccacttggcttgtcaccggggacacagagcagacactgactgagtccctgttctcagggagtgcccagtctgatgaaggagaaagaaatggaaagctgcaaccctacagggtgagcagtgctgtgtaggaggtggggggcccacagcaagcctgggcttcagaggaagagacatttgagccggaccttgaaggatgggtaggaatcacccaggcagggaagagcagagggaacagtttgtgaaggtgggtaggaaaggcacagggctaggcacctgactcagtgcagcctctgggtgggagaagacagtaagggcgtttgggtcattttctagcagttgttttagtactctctacaacttgccctgcagatctatccagcctgctgtttgcatacccccggacataggatgttcatctcttccctcctgggcagcccttcccttgtggtggttatatctgtcctgggtcttctccgcagggcccagcaactccaggctacccagcctggccttatgtcctttctccgtcctgtgtcactgtcccctgaagtagggccaggctggggcacaatgatccaggagtggcaagaacacatctaggcagagagtgggagaaatgcgcagcctttattaacaaaaatctgagatgggtgcaggccctgactcctctccaaaaataatgataaagaagcaggcatggccaaataagggagtgaggacagacagcaggaagaacttcctaccaatgcagaagggctgtgagtctcttggttttatgagagtgggctgtacgtgtgaaagggagggtctcagaggacaagagggggaattggaggcagaggcactgtcagcctctgactctcccataggtgagtgagtgaagtcatccagggagagggaacagaggagggagatcaggactcatcattcattcattcagcagccgttcactggccctaccaaacatgacacccctgggggcagatggacagagccagtgaccacgtggatggaagctccgagtctttcctacctgtgttaatgtcgcaggaaggtatttaggaggaggggccattggggctggccttataaggaagagccacttcaggctgagttgagggacagcactaggaagatggaagagcatttgcaaaggcctcaaggtaagggcaagcaggattttgttcacttagcactataggagttcagagtggcctaggcatgaagtgccaggctggggggaagccctgggccgtggtggagcaggagaggagtggggaattgagcctagactgtaggaagcactttcttccgtgaaggtgtctccaacaggcttgatgtgtaggcattattgtaagtttgcaacttcttggtctctcctggtgctcgtgaccagagcttgctgagggacccagccttgcttgagaaaggggtgttcagtgaacaaaagagaccctggaaatgagagagaagcagtggctgaagaatgtgggccccttccagaaagtggcgtgcaaacaaatacaaagcaatatgcaaatcagctggctagggcttggcagctttggttggaagaaatgagccatcaccccttattatgccggcctcctaccccctctgccccagcctccaggacagccggaacagccttgtctgctccttggagcgccccagcttttctgagacacaggattgtggcctccagggtggtggccgtgggctccctgtcagcaccctcgtcctcctgggaagtcgatatatttagtaacagaaatgttttcacacatttatctcctattgttcagctgcttgctccctgggaaaggccaggtccccagtgatgtgacccacttcttgaagtccctgaagtcacccttctcactgcccccccaccccgaaaaacaggaggcaactggggcttggtgcagcagaacagatttgagtcaaatatctgggaggacttcccaacagtgtggttgctgagatgtgtggaccctggatttctgggctttcattctttggatggttgccttgggcgcagaggaggctttgaagatagagcagagaaggtggcagacaggcttatgctcaaatttcagcatactgaaagatgtactgttactctgtagctgtgtggtcctgggcaagttacttaacttctctgaaccttgtgtgaatagtggggtggagataattatcctttcttggcaggatgattctgaagaatctggaagtgcagagcttagcccctggcatgcggcaggtgctcacaaaggttagctactgtcattatgaaccacccacgatcagccacactttcagaaagatttagcggggcctggagagggagagaccagagctaggagctcagggctgtcatcgtgtgggagggaccaggaggcctgaaacagagctgtggttgtggctacggtgagaagcacaaagctctgtgggagggaccgaggtttctcagagaagtgtggccacctcattaagttgttctgactggtctgagaccaatccccagataatacaatggaagaaagggcttggtgaagaaggggttaagtctgtggccacacccatgcagtctgtgagccattctgggagctgtagtctgttgtgaatttgcagtaagcatagtttgtactgcctcttttgatccaaatccacaccctgctgccaaggctggccgagggccggccctggtgggtgctgggctgtgtggagcccaaaggtgaagcagcatcgacctcttccctcagggaccccctggcttgctatgtgttggggggtgcaggtaggagcagggatagaagtattaagccataattacgacttctcacatgttcacacagaagtttacagcttcctgagcactgtttccacacctgtgatctcatttaatcctcaccacaaacccaagagactgctgttttctggatgaagaaacagaggatccaggaggggaaatcgcttgcccacaggtattcagccagtggagccagacctggggcacaaatctgtctgcttccagagctcctgctctttccatacattactgttccagatggcagacaggcaagatgtggacaactaaagttggatgtgagacatctcggcagaggaacagctgagcagagagctgctgattccaggctgagagtttggactttgtgttgtggcccaccaggatccacccaagggttttctgattagagctgagctttgagagaattggtcttgcagcttaggctgaatggattgaactggagaaaccaaagtcagactgaggcttctaaatcccatccttggtgcacccagcactttgctgctgtccctcctccatgcttcttctcagtttcttccttctcctctccttcatcttcttccctcaccctttttttttttttttaatagagacagtgtcttgctggctggagtacagtggtgccataatagctcactgcagcctcaaattcctgggctgaagctatcctcctgcctgggcctcccaaagtgctgggattacaggtgtgagccactgcacccagctcatcttcctctttctctcctactcctctctgcctcaggctgaggagtgatgacttttataccatagagctgtgctgtaatatcacatgtctccagaagggggtgctgtcacatacagtccattccagcctgaatcttcgttgtgtttgaagggccagtagaagtgttggacaagtggcagagatgaaggatggagagaaggatagcccattgttctccacctccattgagcccaggacatgagggccctgctgaaatggcactgggaggaatgaaggctgaggagaggttggaccccaaccagaagggacagacatactgagttaagccagaggaaattttctcctcatggttctgggacaggctaagatttggaaatgcatctagaatgacattgcagttggggtctgggtttcttttgggtcatgacttgcttgatactgaggtgctggggatattgcttgtgtctcagtgtgtgtatgtgtacctgaatgtgagcttccagttgtgcatatgtgtatgctgatctgagagggtgagaatgtgtgggtcagtgttcgtataaaagtgtgaacatactcacatgtgtgagcatgtgagtgtccttttttttagtttagttttgagacagggtctcacactctcacccagactggagtgcagtggcgtgatctcggctcaccgcaacctccgcatcccaggctcaagctattctcctgcctcagcctcctgagtagctgggactacaggcatgcaccaccacacctgcataatttttgtatttttagtagagatggggtttcaccatgttggccaggctggtcttgaactcctgacctcaaatgatccacccaccttggcctcccaaagtactgggattacaggcatgagccactgcacccggctgtgactgtccatctttatgtctgattttggtaaacagttatatgcatgtgactgtggcttgtgtgtgtgtacatgtatgtagagtgccatatacatatgttctagtgaaaccgtatgtgtgttccctgtgtatacagatgcctgtgtctcaatgtgagcacagggatgaggggatatgtgtgtgtgaaggcccagacacctgctgtgctaacctttaaggccgcgcctaatgtctggctattcaatactttttctcctgggtcgcgctttcctgtaggtagagacccttgaagggctgggcttccttcaggggactctgggccagagtcaggctttgtgttcagtctcaggttgggccagccagggtcctagtctatcggattgggcagctagacatggctgggaagtgtctaggttccattctccccaggaactcttaatggtcacacttaaagagtttcagggactcccagcacggtcctcttgtactgatgcaactactgaagttcagagaggtgcagtgattaacccaaggtcacccagcaggacccaggatgagatgatagggcttgcagcagagaggggagtgtctgacctggaaggctgccctccctccagcccctagagcaggtggggagctcagaggagagccaagtctgtggtgtgaagccacctcctgcacctggctatttccatgcctcctgggcctcagaggctgcctttgaagtttttaccagagcttctgcatgctgtgagattcctcctggggacgtgtgaagtcgactgttccatggagcatggagactcgatggagaggagcccagtggtgaagtgaggccagaggaggggcttcctctggaagcctcaatttcttctttgcagtagttgctttttttttcgtgttttttttttgttgttgttttttaggttttcaccgttctaacattcaaggctttctctgttatctctctttgagctcttagtactgagacagtgctggggtttggggcagtcctggaggcctatctgggctcaaagtgagggtggcagggcagtcccttagggaaagggctgcgtgggagacagggatgagcttcctgcccatagtggggaggcatgagcaggggctggacagcctggttagcaaggctgtatacaaggtacctaccctagtgaggaagttggttgcagattatcttgagtcccttcaagctgtagctgccatggggggccagagaagaacgtgcctcagctctcttgggcctggggaggattgagtccacagagtgctcctggtgtcctgggcagtggaaggtgcaaggttagactgtgcacctggaagcagagagatcccattccctggagaactgaagggaaatttgtcttcctggaggtttggggctggaggcaggggctggatgggaggacactctggggtggagtgggggtgggatggggaggactgggcaagtccgaggcggctctgctgttcagcacccgcaggaaggagcagggaggcatatcctgaatcatgcagggctctagggtgggaggcccatggttgtggggctcaaacatgggctctggttggggcagaggagaggcttcctggggttggggtctgggcaggaattggggtagaaaaggagagaagcagcaattgggtaccacctccttcccaggtcaggtaattcggagttgtcttaaaactctcagtgggccaggcatagtggctcgcgcctgtaacccaagcactttgggaggctgaggtgggtggatcacctgaggttgggagttcaagaccagcctggccaacctggagaaactctgtctttactaaaaatacagaattagctgggcgtggtggtggatgcctgtaatcccagctactcggggggctgaggcaggagaattgcttgaacccaggaggcggaggttgcagtgagcctagattgtgccattgcattccagcctaggcaacaagagcaaaactctgcctcaaacaaagaaacaaacaaaacctctcagtgaggggggatctggggtccagatggagagaactaatgtttacagagtgacctttaagttttaaaaatgattatttaaggaggcgattaaacaaatcgcctccttaaataatccttccagggaggccgggcacggtggctcacacctgtaatcccagtactttgggaggctgaggtgggcggatcacgaggtcaggagatcgagaccatcctggctaacacggtgaaaccccgtctctactaaaaatacaaaaaattaaccgggcgtggtggggggcgcctgtagtcccagctactcgggaggctgaggcaggataatggcatgaactcaggaggcggagcttgcagtgagccgagattgtgccactgcactccagcctgagggacagagcaagactccgtctcaaaaaaaaaaaaaaaaaaaaaaaaaatccttcaaggggctagccctattttgtagaggggaaacagatgacaaacttaaatggtttaactgaagacagttagtgaagcaagtattatggagatggggaaggcttaagggaaccagcaggacatgtcaagttactcaggactggcatccaaggggccaggggcgttggcagaggggggccgaggagagtgccccagctccatgagccagagccctggagatggggctgccctgcaggagctgtggctgcagccactgcttgtcgaaggaggcaggtgggtgagggggtgaatacccaccatgagcctgcatgcttctcaccctttgctctcctgccagtaccctgaccctcactggcagaatttctctggatgccagggggcaagggagccctggatgaagctgccacttagaagtcggcctctggggcacacaacccagcagcaaaagttagagattggatgtggagggacaaagagatgatgggaaaccgaagaacagagagggcatggacttgcccaaggtcacacagcctgttgatatcagaattggagtcagaagccaggctctgcctctgaacactcacttttttgtttgtttggttttcttttttttctttctttttttttttttttgagacagtcttgctctgtcgcccaggctggagtgcagtggtgcgatcttgtctcactgcaacctccacctcctgggttcaagtgattgtcctgcctcagcctcccaagtagctgggatcacaggcacctgccagcatgcccggctaatttttgtacttttggtagagacggggtttcaccatattggccaggctggtctcgaactcctgccctcaggtgatctgcccgccttgacctcccaaagtgctgggattacaggcgtgaaccactgcacctggcctgaacactcactttgtcacattcactgaggtctcctgagtggactcatatgcgcattatctactctctggctgagagctgcttcctgccgtgatcaccgcgctctgtatctgggcagcacaggggctgctgaagaatgtcattctcagaacgcagtgtgccctggagccccccaagccacctgttcattcatcccaactggccttgagggtgccctggtgtgccctgcctgtgcttgtcaccctggccatggagatggacccaaaagcccttgctctccgcttcattagagacaggcacacccagacgcaggcaatcaattttgtcgggtgagtgctgggaccgctgatgaggacccttcctgaggaggcgatgctgggtcttagccttaaagaacaactgagagttttccaggtggaggagaaaaggaagggtattccaggcaaaaatccccgtaagagcaaaggtgtgagcagcaagaaatcaagggtggcaggttcatggctcctgggctggaggaagggcctggcggtggagaggaagggagtgaaggcccagctcacaaagggaagcagaggaaagtttaagcagggtcaggccatggttagctttggggttaggaagctccaaatgatgggtgaagtaggggggctagacccaggtgagaggcagtattgcggttggccaaggacatgtgagttgcataaatgggccagaggaggggtgacagccgctacttcccggctcacctgcctgagctaaggccctagttcctcagtgtctgcccaccaatgcaggtgtgtggcagctctagaccctcctctagggacatccctccctgcctcatgctgcctgtggctttcactctctggagcactcatccatggcacccataagccaccccctcagacaatggcccctaaagcaaaactgtgtcaccgttgcatatctcttgataacactctgacccctccactgccaaatctgataaaagaactccctttgaagaccttcctcctggagtcggatctcagtccttcttgctgtccagagcctgggccttgggcctccctgggaggcgagtcagtgagggcagcccccttatggtgctgggagttgagggaccttggcccagccaactcatccctgttgtgtcagcctctctgggcctgggcagccaactcattttcagtgctaattagcatctcccctgcagctttctgccccactctaagtgcttgacaatcattaggtgttactgtgtgcaactggatcccagctccggcacctccctgccccagcttctcctccagaccccagctgcctgagataagggacctggccacaaacatacaacacaccgaaacccggacacaatctaggcatagggacttgaacaccaacataaatatacaaagaggaaaaacccaataacacagaagaactccccataccaggaagcagaccatagcacagacagagacccacagtacacacacaacacagacaccaacagatgctgaaaagcagacacaggatcattccaaaaagtgacccagaaacgaaaacagaacaaatgggaacatcaatgcacatgacacaggtatacacatctagatatgcaacacaggtacgattcagcacatgtgtggcgcatcgcagggaagcacttgcacttgaagtatacacagatgccaagatagtcagagggagccgcctgtggttccccacctgtgcagcgtctctcgcctctgggctgccgcacatgctgttgcccggaattcccttccccaaggccctcctctttttacctggctaattcctgtcattcttcagatcttctaggaagacttctgcctccttgataggggcctttccatactccccagccttggagtgcttcctgccacatggcatcactgactgttttccaatgagtttctgtcaagttttgggatgaaggattttgcctgtgctcgttgaggtggtgactgtgggtgtgagtgggtgattagggccaaaaaacccccccaaaaaactggacagaggcaaatttggggggaaatgagttaggaatagctgtgaggagccccagctactcagggcctcagaagatatttatttctgtatttatttatttattgagacagagtcttgctctgtcacccaggctggagggcagtggcgctatcctggcccactgcaacctccacctcccaggttcaggcgattctccttcctcagcctcccgagtagctgggattacaggtgcgcaccaccatgcctggctaatttttctatttttagcagagacggggtttcaccatgttggccaggctggtcttcaacttctgagctcaggtgatcctcctgcctcggcctcccaaagtgctgagattacaggtgtgagccactgcacccgacctcagaagacattgaaacccacagagaggacacagccagatgccctctgcctcattttctcagaccctgcctgatttctcttatgtttcttctaggcttgctccctgacccagttccctccttcccagagctggccttgccccttgccacctctcggagctcacacatactcactcaccttctctgcttggctgtgccctacccctacttctacgtgcagtgaaatccttgttattcaaggcctgaggtcagtgggcacatcatccatgcctggcgtcctaacccgtgccactgagtatcgtgaagggaggtagtggagggacgtgcttgggagcacaagccttgaggactgtctcttggttcagatctctgctcctctacttcttagctgcaggattgtgcaagttctgccacctttgttccctcatctgtagaaaggagaggataatagagcccacctcattagggcagccatgaggattaaatgagacacagtgtgtaatgtacctggctccctctccaggttgcgtgagagcagggagaaagctaatgagatcaaggatgtgcaaatgcactcagaaggtgcctagtgagtccttgctaactggcacttagtgaaacaaacacctcctgtgtgagcacctaatatgtgcctctgtagtgggctctgtgacccgcccctccttagtttctgcatggctgccagttctgcacagctgttactgctgtgggggcttagaaggtgggggtatgactactttttctgaatttatttttaattttttacatctgttttatggaggcataatttacatacagtaaaatcaccaatttaaagtgtataatgagttttgataaatatatatggtcataaccaccatgacaattaagaaaagaatatttttatcctggcaaacttcccttgtgccctttgtagtcagtccctttgagggggacttcttataggagtgtgagaagtactgggttttccttgggctgcaaacctgggcacatggagtgggggtgcctccaacatgctggaagttgccagggaactgctgaccctctctgggccttggttcctggcagaggcagtgcagccaggcaggggaagggatgcttaggccttggtctcctgagggcaagccttggatgtgagggttggatcggctggaagtggtggcttcagaaacccatagagtgggtgacagggtagggacttggtgtttccacaaacccgcccctcctttgaccaggtgtgccctgtggtcctggtggaaatggctatatattgtccagactgtagcaggggctggccaagatggtccactcctctccccatcctcctccaaccagaggccataaaccccactctatagattaacaattccctgaaaagaagggggtcacttttgttccccagttctagaactaaatattaaagcaattatgtaactagcaataaattacttaaagtagtgactcactcagcttaattagagcgcaagcagggagggattaaggtatttttagagcacacacctcactctctcctgtgggggaggcctctgtgcaaggtgggggtggaaaaaaggctgggaactcatgggagcaccccaggtgtctgcaaggagatgaaagctgatcctccgccccactgaggtcctaaggaagaaaggccgagtcagagctgcagcaggagggattcggatcagactcaagaacacttcccagtggtgcttatttgagaactgggacggcaacactagattgtaaactctgtgagggcagggattaggtctgtgaccgcctcctcacccagcgggagaccaagaatgagacttgggagtcagacacaactgggtgtgactcctgcctttgcgggttgccagcacgtgggcttgggcaggttcctttatcaccagaagctttgccgtctcctccactataaagtgggcacaataacatccacctgcatgcatattataaggattgagtgggttaaaatgtgcaaagcaagactttgtgctcagctgggcacagcggctcacacctgtaatcccagtactttgggaggctgagacagagtgcttcagcccagtagttttgagaccagcctgggaaacatagggagaccctgtctcttaaaagaaaaaaaaaattagaagactcggtgctgactctgctagaccaaaagcccacaaaggcagggattaggtttggtttgtgttgttcattgttgtatctcaagcttcattcataggactgcacaaagtaggtgttcagtaaatgctttgttgtgtgactgcgtgttaattttgttcccattctcctgctccaaaaaaaagttcattttcctgaggttgtgagtgaagaaaataggcagtgtgggctgggtgtggtgtctcatgcctgtaatccccagcactttgggaagctgaggcgggaggatcacttgaggccaggagttcaagaccagcctgggtaacttagcgagatcccatctctacttcaaaaaaatttaaaacagaaaaaatctagggtgtgtgggggggcaggtggggaggttgcaggggtgcctcacaggtgggagtctggcatttctcctccaggctgaggaggtggtgacttccagggaaagtcctgggagggatcagaaccacagctccagcctgcttggatgagggtggtcttctggctgccaggagggtagctaggtgggaagatctgcccttgtttcctccataacctggggtgggaggaggaggagctcccagcccaatctgatgggggagaccagaaccctcacccaccattgctggcagttcagagaaggcagcgataagtcggggtggggcatcctgaaaggcttcccagaggattggatgggaggattagctgagaagacatccggcatccgtaaaatggagtaatgattctgaccctgcaggttttctgggaggattaaatgagttacattttaaagatgcctggtacatgcctgccaggagaaggcacaacatatgaactccctccctcttccctccacccctcctcagctcctgtgacatcaggagggacatgccctgccctgctcacagaggctgggtgggaggctcccatcatggccttcactgaggctgcctctgcagttggaccaagctggacacacagtaggtgcacataacagatgggggcaggtctgtgcttgttttaccagggtgttgggaggctgagggaagggcacagctggattggggtgatggagttcaatccctgctcctcccccagatccaagatcctaagacgcctatgtccagtggctgctctgatcagctctgaccagctctcctcacacctcataggccttccagggttcaggtgatgaattagtgatgacagcatccagcatcgctatgacaaccacatggcactcttagcctccagtcagggctcagccgcagaggccagagacccctttggctctgggcctttgtactggcgtgtgtgagcggggctggggcctgagggagatggaggagtgggaggggcaggggccggggcatggggctgcatctggcatggactggagttcattcagattgttccatccagagggaccttggggacagttgtttctctccttccttccccctttcttttcattcctccatccctcctctttcccctcctcccacttcttctgagccttgttcctgtttgaggccctgggctgccaacccttttcccctcctctgggaataaagccaggctcagccctcaccccggggagctgagtgaggtgggggacagccaccttctggtctaggcctcagggaaggtgtgtggggaccactgatggcttggtgagagggcctgacccagctgggccaggggctgtgcaagtggctgctgaccctgatgagtggggaggaggttttcagtagagaggcagggtcagagatgaagcagcgtgggatgggggagcgacagatgttcagagtggcctaagtgtgagatgcggagcagagaacgtgggaggaatcgaggctcgagaaggactgggagagagtggatgcagtgaggagtttgaagtttgtccctgggggaagaggagccctgaagatttttgttgttgcttctttgatttttaaatgggagggttcattttagagatggggaaacaggcccagggtgggaaagtgacttgctcaagcttaagtcactagagacagactgagagtacaggctctgcttgggtcctgctggactctagctgggacctcttgccccagacttgctggccaggattttcccaggtaatcactacctccgagaaaggcgaggagagcccatgggtgactttgccctcagtttgaatgaaatttgcatcagcaagggctatgccgatagtcctttctgctcgtgtctggcctgtttgggggtgggagtggggtggaggtgagcatccagggaaggatctgggaagtcaggggcttgccagggccagcaaggcattagggtcagagatggattcaaacttgggtctttggagacccagcccagactctgtgctccatctccttcctccgtctctcaggagcctttggctgagttaggcacctacaggaggcaagggcccccccgagcccctcacattctcctcagggctccttctggccctggggcctgatattgggcctgctgtgctggaacttatccaggcagaataaacctttagccccattgtcctgatgaagaaactgaggtcccgaggtaacagtgactcattcagggttacaacaggtcagtggctgggctgggcctagcgtctggccctcagcttgtctacatggcccccctcgtggctctcccctcgcctctcgcaccccactgtgcagcatggttgggcctgccagccttgatggatggctctgcagctcaacctccctcccattcctctccggatgccgggccgtgagcctcctaatcaccagtcctgcctggtggccgccaagccatccatctccccacacagccttgcccagcacaggtgattttgtttggggagaaggggggcacagcaggtcttcctctgaggctgagccaagagtttggctgcagcccccactctggggtgcccgagggttagggaatagcctgcactcccttgctggagtgtcagaaatccctcctgaatctccctagggcacgtgcacatgcacacacaggcacacacactcacagtaacactaataaaagctctcgtgtagcaaaagaatattgtatggcaagtattgttgcagagccatatgtatcatctcattcatcactccactgtagagatacagaaactcaggctcagagaggttaagtgacttgcataggctccatatccaggaaatggaggagctgggatttgaacccacatccttatggctcacatcttgcattcacaactcctgctctactgactcacctgtgcacacacacacacatgcacacacacacacgtgcgtgcacacacacacacaggcactcacttgcatgcatgagcacgagccaccattttggctcttgtaccatccatctacctgggccaggttcttgaggagtgaggagaatgctgggctgcagagggcatgaggggtcactgctcattgtccccaggctgccccaagctcattgtccccaggctgtctcaccctggctgtggcactggctggctggggagctgcagggaggcagcagcctccaggcagtggaaaggggaggctgggagacagtcgatcgatcatccctgcagtgcctccttccaggaactggggcccaggggagtgtggcgccacgggtcgatgttctgggcagcagcacagtctctgagtgcgtacagggtgtgtgtggggcgaggctggtgtgcagctgcccgccttcccctggctcccttcccctgctcctgccttcctcctgccattcacctgccagccccacaccttcccctgattcccccactgtccccaacctgggcactacagaggctgagaatcaaactcccagttcccaggcacctgtgtgcctgctgctaccatcccgccctgccctagaggcaggtctcgggtgggtgctgcaagagtcaccctatggtggttggggatgggtgggtagggggaccgggggctggagctgtggggatgtgaggcaagcccacctcagagcctttggagacctcgacagacaaaacgatgagttaagaaatgtaaaggggcacatagtgggtgctgaattcatcttgtctcgttcctccagtaagagtctggagaaaccaagagcagctgggtgcctctgagggcacaggagctcccagggctggctggcaggtgcagctaacagtgttagcaatcccaaggacaggtagcttggggcggaggagagcatgctgtcacccatcctgatgaggggagagatgtctggtgctaggagcagtggtggccggaggagggctggggacccaccccaggccaccccacactctccctctgggaggggctcctgagcaggcctggtcaccttgcttcttggctgcttcttccccggcggaggagcctcccccaggctctcccacctgcactggcctcaagagagctgggattgagccccagttcaggcacctgctggctggcggaggttagggcaaatcactttcctcagccctctcatccgtgacaggctctggtgagggttaaatgagatgttgcccgtcaagtgcctgccacttccctgacgccgagcagctaggctgctctgggttctctagcacctgcctcccctggtcccagcgctgggtgggcggctgtgttctaccggtcactggtgggtcctcagggccccgacacagggcctgctattgggaaagagggaagtaaacatcccagggctggagctctgcccactatggaggtgttccatcttaggctctgtaatctcctcattcactctggtatggggacaaatgtgcctctctgcactaactgagcccccatgggcaactaggagtggtgtcacttggggtggaggtgggcaaggatctctggactgggatttccaagccctgacttcctgttatttcaggcactacctcattgttccatcttgggcaagacctgtccccttgagggtaagagacacatgtgacctctgacctccagagtctctcttctgagcttctgtgcccagatgattctgtgttctaggggacaggcgaggctggggggtgacccccatgccactgatgggcagactaaggagcaggggcccaggactggggccagctcaggactctggtggcctcggtgcccttgacctggtattgctgccgttttgccccactgctgtctgtctccgcgtccgagtcaccacctgtccctctccagtcctctcctctcttcctttattactatctctatattgcctcctgcctcaggcttatctcctcctgtcatgcctctatccacctctgtcactcccctgcgactctgcctcactccctggcacaccctctccctccctgggagtcgggagtggagcctcgctgggaatcaggacccccctgcctctggtctctgtctaagcagtctctgcgattctggccagctcttatctttttccaccttcccgaatctctcttgctgtctgatggtgtctctgcctttcactgtctctgaactccctttgtttttctctatatgcttctctctgctcttatctctgggcctctgtctctcagggcctgactggtcttgacctctttgcctccttcttcccctcgagagcccagccaggcagcaggtccagccctccagcccagagaacagatggagtccaccctccctctctcttgctggctgcctcggaagccccaaacaatggcctccgccctgcaccgtgccttgttgctaggccttgggctggcagcacctggcttccatagcgacgggtgcttagaaacagaatgccacatctcccagtcccaccacaggagcctttgccgattgagcgagtgccttttgatcaatcaggaagtgtggccaggctctaggttgcctccaacttgaggaggcaagagaggaggggactgtggtctctgccttctggagctggggggactgctgggctgggaggagttgctcaagtacagccctgaagccaaggaaggactgggggaggccctgggctcttttccccaagtcagcctgctgcaagaggcacaagcttgggagctggaaggggctgtgttgaaattgctgttccatcatttctagctgcatgactttggacgaatgacctcaggtcccagggcctcagtttcatcaactgtaaaattgggctaataatatcatgaagattaaatgagagaatagatctggcacttagtaggtggtcatcaatggccattcccctcccttcccctttaaagttgtttaaaatttaattgacagagaggagaaggagggttcttcaggcctgtggaatggtgtaagcaaaggggtggaggctggcatgcacctcacatatgctggagtatttagggaggaccaggggccatatctggaaatggttctgccagaagcagccaggccaagctgggtgccatgtcatgcacctgtaattccagctactagggaggctgaggcaggaggatcacttgagccctggagttccagatcagcctgggcaacatagtgagaccccatctcaaaaaaacaaaacacaacaggcaggctgatgggcccatggagaagggactctgtctcctgggaggtatattcttgccaggtgcaaagggatgggcttgactaatttctcctctagcatttggggctgctgggtagggagctacattggggtccccttgcttattctcatgctgctccctacttctgccctgtcacttggtcccaggagaggggctcccactggttccttttccctgccaggcctgcccaccaaggccaccatggccacacagcctgaatcctggggccagcaagtgtccatggaaggccccactctgtcatcgtagagatcaggaaacaggctcagaagtaggagggcttcctggtcctagggcccagctcttccctcttttcaggcctgtcttctgcactaaggacttcaggccaccagggaaggtggggagggaggaaaggagatgagatagacttgggcgggggcctgaggacagagtttcatgtcacttgggcagccaggaaagggttaaagatcccttatcccaagccatgggcactggcactgccagaggatgctgaggcctgctggggcataaggacaacaagcaacatccttttctgagctgttgggagtgccaagctctctgttaaatacttttgagcctcttctcatgtattcacagccacctttcaaggaaggccagttgatccccagtttagaagtgagaaaacggggtctccaggaggcacttgtctaaggtgacacagctggagagttggagatggtggttagaccgagtcacccccccagaccctggcctctccctgcgtgccccttccaggacacccatcactcccttgacaccccttgggagtgggtgttcatttccttgggctctcccaatcccagtccttggtatccccaactgcaggcagacacaggtgcttgctgctgtgccctcccctttacctggcatcacagagactcaagcccactgaccattaggctctcaggggcatagaaaccaggtgctggagtcttagagtcctgcaatcaggcatctcaggcagtcaggacattagaatgttagaatcttgggcttctacattctcaagaccccaggttctcgcattcacagaatgtaagaaaaacagactttttgaatgatggggtgttataacagaagctttgattttctaagaacatgaagctctgggagttcttggagccttgaagccatagactggggcctccctgtgtgatggtttctgagttagcagggagtgttcagagtatggggccttggtccctgttgcttagaccttcttgccttggtatctctgatgggctcagctcttagtagcctttgtgtatgtgtgtgtgtgtgtgtgtgtgtgtgtgtgtgtgtgtgtgtgtgtgtgtgtagtggggactggggtcaggggtcagggactgactctaacctgaggcacccctggagtggggccagcccaggaatagcaggtggaggaaagccgggcagcctcagggctgcagctgtctggtggtacagggcagggctctgggtggctgcctttggcagaggaccagcctgcctccttcgtcccctacccagcctgctaccaggatcaggaggaggcatctccatgggactcctagggctggagtcagagcagcccctccaggttctgcagcctggacggtaggaggtgccactaaggggaggagattggggaaggattgggacctttatctgcggtgaggtggggcacggggggatgagagatatagtgggagtctttgaagggtgtgggatcagtgaaggggctggggatttagtgatgggctggggcttaggatggagccaagggctctgtgggtgggagaccttttgagagggtggagactcagagagaaggatgggggctcagcaaggggatgtggctcagtggaggttgctgaagagtttcttggggttggctacacgcggtggctcacgcctgtaatcccagcactttgggaggccaaggcagatggatcacttgaggtcaggacttcaagaccagcctggccaacatggtgaaaccctgcctctaccaaaaaatacaaatattagccgggcgtaatggcaggcgcctgtaatctcagctactcgggaggctgaggcaggagaattgcttgaacctgagaggcggaggttgcagtgagtcgagattgtaccactgcactccagccctgggcgacagagcaagactccatctaaaaaaaaaaaaaaaaaaaagtctcagggctgtctctgcactgctccaggttcctgaggacggcggttggggctgggggagtcttctgtccctggggtaggctgagaagcaagagctccttttcccaactctgcccaaagctggaaaggttgttagagctgctaagaaagctggcatctgcctctccttttgctcatcttcctttctggtttccatgggaatctgtggctcaggatgatcaggggttgacaggatggcgctgtggaaggagtctgtgtcaggcacagccatcccacatgggaaggagccggctggtaagaaagtgagttccctgtccctgggagtgtgcaagcagggtaggggctgaatggctagagtgactccagaaaggggttcagatggggcagaggaagcagtctggaggccacttccctgagacaatcatgttttgtgtgattggctctgggggccccaccagccccaccttccagacgtccctgggcctcacaaagggggttgctgcaccctaggcactgcctctgatccagccccaactcctgtgctctgtgcctggcctatgctgaacacggacatgtgcagctgaatcagattcagtctctgcctagaggagccccagtctgatgggggaggcacacagggacacaaatatagctgggtaagtcctacaaaagggggcatacctggctgggaggcagttccatcactgattcctgtagtctgtagatgtctttttgagcaattcttctgggtcaagacttgttcttatttgctgggataaaacagcagtgagcaaaacagagctgacagcatggtgggaaggttgagctcttccagaccgtgatgagaagtattggtgagtggtggggagagtggccagaaggcagagtgtgggcgcagcatgagaggaggctttgtccagacttaaggacctggaaggccttgaaggccaggaccagggctccaattgtcctgctggcaataggaagccatatgggtgggggtgaggcagaatcagatttaggtgtggaaaagatgactccagccagtgtgggcatcgaagaggaggcacagaagcaggcgtggccacctgtgcctctgtgtaggagctgtgtgagcatgtgcttgaggatgtgtgtctgtgtagaggactggggtgtaggcgtgataggaacatggacgtgtatctatggaaagactccaattgtgcataggggtgtatgtgtgtaagattctgtggcccagggcagcctgtgaaaaggaaggatcttggggtctgtggatgatggggagcagagactaaggcctaaggtatgctggggctcgagccccctggactttatcccctgtgagctggcaggtcttagactagtcctggactagaatcctatgggttcccttcccccagagggtcatggggccagccatctgctgcagacaagacaaacatgcatgcaaatcacatgaaaatggatgaggcctgtggctgacccaccctacagcccccatcccctgggcctgagttcactcagcctgtacccttcctgacccagagctgctgccagggctctgggaacaggccttgcccactaggagctgaaattcacattgtccccagcacctgcccgtggccacatcctctctctgtgagggctacccccacatctggagccatagccagcggacacagagctggatctggactggtggccatgggcagcacctctggcaggtgctgaggtggaggaggcagtatccaggcaggcatccctgggcagaaggtacctctcctgagcagacaggccttcccaggcaccaggcccaaagataggggcaagggctagatcctggtattggaggaccctcaggagaggctgtgtgtgacttgctctctctctgacctgggctagagcataaacacgtgtcacatacttgcacacacattcacacgtgaaagcacgcacatgctattcctggacacttgtgtacacacaccactgcacacatatacctgcatgtgtgaatatacactcacttctgcacacagacacatgcctatctgcatagacacacccgtgccaacccctatagatacacagacatatctgtgtatacacatataagttcagctataccactgcagtatcacacaccctcacaaggatacaaacctgtgctcacactctcttccaccctcacacacatcatgcttacaagcctgtgtgcagccttacacacatgcacacacatacagagcagcctaagggtggctcacccctgcccaggtgaacacctgtgcccactccagggctggagtgttgaggaaagggtctggatggaggcagaacctgcagagatgtcagtttcttccaggaagcatcttggattgtcccttcacagagcccttggaagtggggccctcttttagtccatgggctctagcccaggtcacagagagagcaagtcacacacagcctctcctgagggtcctccaataccaggatccagcccttgtccatatctttgggcctggtgcctgcgtaggaccatctgctcaggagaggtaccttctgcccagggaggcctgcctggatactgcctcctccacctcagcttcctgagcactcaaagagaagcaggccaagcttcacggctgctgagaagtctgagaccagggagggccaaagccttgcctgaggtcacccagcatgtcagggaagggctagggtttgaacctgggcttccaggtgggggtgtaaccatggtccatggcaacaggatagatgcatgtcaggcagcagacaggcccttggaagcaagacatgtggtcatgggggataggaaaagacttacagtctatggagatctgccaggaccaagtgtgtgagatggagagatggtgcttcttcaccagagctcactgggcaccacagggctcccagcttggctggaccatggggactcagggaagaatcagacaggccctgctcttgagggagggctggggataggtgaagaaggaagagggcattatagactggggagatggtgggggctacttctcgttggatggcagttttcttcctgcatcttgaaagatctaactttcaaatttctttaccctcaaaactcggcatggagtacattctcagtaaatatttatggcatgaatgaattaatgaaagtatgatattggcaggcagatatgcctttggaagggtattcaaaatgggagggcaacaggttgggcaaaggcaaagaggtggaagaaaagccagaggttcagggtacagctgagtcaggcatggctggacgggaagtggtaggagaagcagcaggaaaaagtcacgtggggatgagccttgcatcttatactgagtttggatgttgccttggaggccatggggagcccagtgaagattatgagcagagggtgaacatggtcagagtgaacctgccctggctttggggggtcctgggctacatagtagctgcttatccttggtgcaaagagcactgggtttggagtctataggccagggttcacattcctatagtaaccagctgtgccatctcaggtaagcatctacatttctctgagcctcactttccttatttgtaaaatggggctaatgccgtgcctcctgaggctgttggatctggcctgggtgaggaaatgctttgccagcacaaggccctaccaatgagaggtgtcatttttattaggaacaaggcagggctggttcctagacagggcctgaggttgagtgggcccaggacccaggctgacagctgagtcaccttttccaggccaagtggcctctaaggtgggaagacaaaaagagttggctagaggggctgggctatgcattcctaagctggagctgggaggaaagctggggctgggactgggcttcctggtgtccgagatgggcagagggtgcagacaccgggatagtaggaccctcagccactgcattcttggggacaaaagaggagctgggaaatctgatttccttacctggctttgctcaagaagcaaggaatgtatttaaggcacagactggagtgagatggcctgggtttgaattttgactacttacaagctatgtgactgtgggcagtttactttgtgcctgagttttccttatctgtgaagtgtgactaataatagatcccaccctataacattgttgagaagatgaaatgtgaggcacacagtatgtgctcaataaatgcgaaagcctcccagccccagatgtatacactcggccagtaggggccagccctggccctcacctccatgggacagaggtcagccagggaggagatgcatctactccagggttctctgacctggcagcaaattagaatcaccgggggacattcacaaacatctgggatgggggttccagatatcagtatttaaaatgctcccaggcaattctaacatgagtcagggtgagaacccagaacaggatcacagattgtgcagttggagtgaggtagggatctgcgtgtgagtggaggagtccttggagtggggtcactcctagctataagagctcggcaaggcctttaaatgtgccaactcaaggagccttggttgccccctcaggaagggtgctggttggggaatttcaaggattgtgtgagagggtttttctgaaagggctctgcactctaccaagcactggaagaaagcagtgcacttgtttattgagtctagtgtaataacatttcacagatggggaaatagaggcctagagaggtgctgtggcctgctcagaatcccacagcaagtctatggcacagttaggactcaaaccctctgaggaatgcttggatctgaaaggttgacacagaaagactctttgagctgagggacacatagagcacacaccagggaccccagtcattgagctgtagtttgagagattcaagtaagactgaagaaataacttcttggctgggtgcagtggctcacacctgtaatcccaacactttgggaggctgaggtgggtggatcatgaggtcaagagatcgagaccatcctggccaacatggcgaaatcccatctgtactaaaaatataaaaattagctgggcatggtggtgcatgcctgtagtcccatctactcgggaggctgaggcaggagaattgcttgaacccgggaggcggaggttgcagtgagctgagatcgcgccactgcgctccagcctggtgacagagcgagactccgtctcaaaaaaataaaataaaataaaataaaataaaataaaataaaataaaataaataaaataacttctcaagaggtgagtgccatggaggtggtgcctggagttgggagcccaagagatggtggcggtgccaggccagggtcggctgttgaccatggtctgaggtggcctcccctgaagaacaagtaactctggccagtggctgtaacagatacctcccgggcacctgtatctcacccagccttgtccagagcccaggactgagccagtgacacatgctcagaatttaccaagagacttgtgcactgagctcagactcagacctagtccttccaacagcccttacatgggtcatccccttttacggaagagaaaactgaggccaaaaataggaagggaggccctgtgggggccagaacctttacacatcttagcccaggtaattttttctacagtgttaataagtaggatgaattgcccctgtttggaagattcagtaaaatacattgacttggcccagatcacttactctacacctctcctaagtccccagatgtgactcccaggaaagacacaaaaaagggctacccagagggataaggtagtaaccagggaagccctcccagaggaggtgggccttcaaatggcccctaaatgacaggcaggagggaaggatctgggagggtattgggggtggggtggcatgggcaaaggcctggaggtgagagtcagtcagtcattgatgtgagaagagcaagaagtagaaatgtaaggaatggtggggaggggagtcagagctggatgaccaagcaagggttcagctgtagagggtctggcccgccaggctcagggctcgggctttattgtgctggtggtagggagccactgagggtgagtgggggagagcatgccagagcatgcctcagaaagaaaggtgggagaaacgctggcatggagggctgccccctgagttggtggggtggccgggctctgccaaggctatgtgccagctgcctggactgtgtccaggaatgggcacaatgactcaacattgagaaaatcactccccagggagaaagggccctgatgaatcacccagctgaggtggggaggctgggaggctgggaggctgggaggctgggagctcactgagtcaccgtccaagagttggtgaggaggggagctgcagagagaggggccggcagtgcagttgacggggggattcaggtcagaccacattgagggctgtcgggggactctaccttcccgccattcccgggtttggtcctcctggccgtcctgtgagggagatgagaaaactgaggcccaggaagtggggggaggggatccgagcaaggtcatgcggcaagtcgctggcaaaggcctagcgagacccaagcgcaccctccagtccagacacgtcctgccgccccaaccgctttcatgccaagcagaggcctaagaaccgggtcggtccgggcagggagctgaccccggtgacccgctgaatccccggacgcggcccctccgggcagccggcaactgaggccggattgcgccgccgcgatgggacggcagggggcgcaggagcgtcgcggctgccgcaggctcctgaacccagaagccgctctgcggagaaacgcgctcccggagcgcgggtcccaccgcggaactgcggaccgtgtggccctggggcctgcaccctctccggctccggggacggcgacagagacctgcccacccaggcctgggggccccagtcagtggcggccgccgtgtgtgcgctcggtgtctgtgcgcacgtgtctccctcgcagatgggcgactgctccagggcctgtccgtctcacagcgacctccaacattctcccgacttccccctgcctcctaggctgagggagaggagcaagcccgaggctcctgcggtgtccgcggcccctgccccccttccccttccctccccaccccaccccactgcgccggtctctgcctggggctctggccgggccccggaccccagagtggtggcggggaaacagggtgcgatcagacagggtggaggctctgagagcggcccctgcgagatgcgagagaagtggcgacggggcgaggggcagcgagcgcaggctgacagcaggccagctggaagggccgagggaacccagggcgagacagaagcggggtgacagcggccgggtgtccggtggggtcggaggatccgacgggccgagaggtgcggtccgcggtggcggggacataggcggggccggggcgggccgggggcgggcggggggcgggccggggcggggccggggcggacactcgggcggaccaggcgaagctgtcgcggacgcgctgaccgagcgcagcggccgggccggcgggcgggcgggcggctgcgagcatggtcctggtgctgcaccacatcctcatcgctgttgtccaattcctcaggcggggccagcaggtcttcctcaagccggacgagccgccgccgccgccgcagccatgcgccgacagcctgcaggtaggggggcccccgcgctgggcaccaggagaacggggtgtccggcgagcgccgggccgggtctgcccgcccccgaacccttctcagggaggagacccctcctctagttctgaattctactcctgtgctgggacggcagcgcagaccaagagcccttgaagccccagctctcagtccacacgtcaccccagactctgaactcctttcggatccggggctccaccccaagcactgagcttccagtccacggtgggaccgcagtgcacactgagagctgtgcccaagcctcgaattccctttccttagattagtggggaccctgcccacgcctcggaaccttcaccatatatgtggggctcccggcacacctggagcacctgaacccccagctgtcatccaggactccacctcagagccggcctcacccaaagccccaaacctccattccaagcctcaactggacacccgctcagattcccacccaaacatctggacttcagtcctcagcctggaacctaccccagagtccaaatctctccttccatcagggcttcactggctttctctgtgggacccactccccgatcccttccctccctcctgtgttggagatctccgagtctttcctcgtggggggcccctcctcttgttcctctccaggtacagtggtcccactttattctctgggcttctcctctggtttctcttcaagtatttctgggctctctaatttggtctgttgccccatgtgcccacctctcttggtctatcttggtctctctcctgtttctctaggtctccatcttcgttttggggtctctttctgcagccaccccttcctcttgtatctacctctgctttgtggtgaggagggggcaggctcagagagcagggctagtgtccctgggacacccccgccccccatgttctcaggcatggcatggtgtgggctcaggtggaagggcctaaatgtggagtgtgctgccctcaggcgatgcccagggatctgaggtggtggggggatgatgtggtgggcactggcttttgtaacttataaagcccctcatcccagctgccctggtcttgacgggggcggctagggcttgagatagggaagagtaaactgcaatctggtgtcaacctgcggtgggatgtgtccaggctgggtgggtctatagtgtatgtgtttgtgtgagtgttcctgtctgtgtgtagcacgggctgggttgcatgtgttgggtgtgtcttgtgtgtaatcatgtgtgttgtgccgtgtatgaatgtgtcatcgagagtgggattatttgtggggagattatgggaattatgggtctatggcattgtgtgctatgtgtggctggggaggcagtgttgtggctgtggagtggtagctgggtgtgtggctgttgtgtgtgtagagaacttgtgtgtatgtggctgtatgtctgttattgtacagtggagttgttgtagggacagcttgcatacaggattctatatgtagttgtgtgtgttactggctgttgtgtgtggccaggaagggccactgcaggggcctgatggtttccactgggtgtcttgtcagagaggagttggggcagggggtgccgtgtgtgccaatgtgtttgcagcctaggtggctggcttagagtcactatggcacatcctgggattgcttgggtaatatatctattaggacctgagtgctggtgtttgaatgtcatgtgtctgtgtggtggctgctcccgcgattctggacaggaaagggttgcagccagggctgaggggtctgaggtgaggagccagttgacaagtgtgtgagtgtgtgagtgtgtgtgtgtgcgtgcatgtacacgtgcatatgggaatggggtggggtgggaggaggcagtgggccagcagcgctgtctatgctgaggggctgtgtgtgcccacaaacgtgtgacattaggtgtgcacattatctatgcaggttgtgtctgcatgtgtctctgtgtctaggtggcgtgcgtattgaatttaattggatgcatacacctgtggctggggaggtgagaggtgtgtgaggtgcgtggtgggagacggtgtgagtgtggtgtgaagtgagggtgtgtgagctgggtgactttttggtgtgacgtgtgaattatgtgatcttttctccccatgagctgtgtgtgcctgtggtgaggagtgagtggaggatggccagtgagctggcggtgtgtgtgttgggggtgttgaggactgtagaatgtgctgcggtggcagtgtgtgcatgaggtgtgtgtgaggaatgaggtctgtaacatttggggcgtgtggaatatagtgggtgtccccataaatgtctgtggagtgacgcatgtgtgcaaaagggcttggctgccatcctgttcttgctcccctcctgatcaggtccctagagatgccctggaatgttctccatgcccccccaaccccagctgcccctaccctttgcccttcatcctccttgccttgaccaagccctttgttttgggtttccggcggagcaggcgctggacaggcgggcggcaggcaatgtcgtggtctgagaacctttgttctcttagtttgactggtgtttggggccttggtttggaggagggtgtggagaggatgcacgtggcagcaaggtcactgtgtttactacaccacttcgtgctccgcagaggggaggcatacggcgcaggcagtgaggcctgggtggtgtctttggtggcgcctgttggtgtaagaacagcttaggctgggcttggagtttgccagccatgcagtcttagtccatagtggcccagcgcccttcctggctcatgtcagcggggctgagcagccgagcagccaagcactcacttctccaagttcacctgccctcgccccttctctgtgtggctgcagcccctggagacaaccaggaagacctcgatttagttctatttgtgttcactccaggtcagatggaggagaaagagtccccatcctcacagagacacttatctgaaaggagagagctggtcacacctttggggaccctctagactgacgcagtctgtagggggatcgaggtcataccttccagagagagctgtgggaaaaccctactgggctgcctcccagcaggtgcttgagagaagaaacatccaaggttccttgagattggaaggcttagagaagtctgagtcagtcagggaaggggctggggtcgatgccgcagtgtcacataccagaaggttctctgaaatgaataggcttgaactggaccttgaagggggtgttggggtgggcagagaaatgcagcctggggctgaggaaggttctggcctgactggcaaaagggatcttgctggccattccccaggcaacactgtctggctttgggtagccatccctgggcctccagccttctcaagctttcacggtaccttttttatcccattgtctctggctggaattatcttcattgtcgttgacattgtcatcttcatcatcttttaggcagttatttccaaattccagggtcctttcacaaatgtctcatttagcaggttaactcatgcaattgtccaaaagtctttatggaacactgctgtgtaccaggcaggcacagttttaagtgccggggtcatggtggtggccaaactggcctcatggagctcctaccttctgtgtccagccatgctgtcagttgcccacccttctgtgtttcccccagtctggggcgcctggttctgtggggctccgcatgtgcaccctctggtgctggggtctggctcctaccagaatgtgagctctgcagaggctgggcccgggtctctcctctacccaccgtgtgtgtcctgagctgggtctggcagagtccagatgctcacacctatcatcaagtgactggaactgccatgtagggttggcagtccagctctgtctagggaaactggggtccatcggatgaggggactctcatctcatcaggcagcatctcatcaggcccttcttttaccagtagctccagagaccaagaagggtcaggtgactggtgcaggtctcacagcagggtggcgcggctggtgtcagaagacagcacttcttgctgccaggttgggctctggtcctagcaccatgctgctctctggctggcctctgtgctgcctgcggcgggtaaacgattattaatgacccccctggcaaggagacaggaaatgtttcccagccacagctggggacctgctccctgccagccccagctatccatacccgtcctgaccatggcatcggtgctgatgttatcttcattctgcctcagtcttctttactccttctgcccatcccccgacctccctgatcttgacatcctaagggtaaatgacgagaagctacagagctttcttttccatatccctgtccctcaccactttctccaacctgactcatctctaccttcttccttgtcccatgccagccagaagtagctcttcctccaagaaggcttctctgaatgcacagccagctcctccagtgtccactaccctgagcccgaggcactgagtccccctcattgcagactctagtcctccactgatggtttgctctgacagccctagggctggcctgggcacttcccgcagactgtccctaattgctgccttaggactgacatatgaagggtcctcccagatgctacctccaggaagtctccagttccactcagcccagggattcttacctcctttgagcacagtgcccttcctgtctgagtcacacatgtgtacttccaggacttcctaggtggacattagtgaacacctgctatgtgcccagcacagagggtgggaagagatgagcaggatgcaggccttaaaatccccacaccttcctccaagcctgagcaatgttgcatcagccccttggcaggtggcacagacctaggtactagggctgggggaggggaggcggagaaacagggagtgatgttggtagagtgtgtggggagggcaacgagggagataaactcaggggccatggtgatataaagcagggacccctatttcagcccagagtgggagggaggggcatgttggggagcttccaggaggaaacaaatctgaactgagagctaaggtcaagccaggagaaagttctggacagaggggagagaatggttactgtgaaggttcgctggtggcagacagagggaggagagcctgtggcagcaccactccatggagcaggcccctgggtgccagccggctgggtccggggggatggggactggtaaagctggcccagccagatggtgcaggacttgtaagccatgttaaggactgcggacttattctggagggaaattgaccctggggaagagttgagagaacggatatgacagatcagatctgcatgttcaatagctccctggaccatggtgtggagactgaaggggaggctggtgtggtccaggtaagcgggggtgatgaggcctggacagggaaatggctgaagaatggaggggaggggacggagtggccagggctggtggagggagctggacagctgtagacgtgaagggcaagggaggagaatgctgccccacccaggtgtctggatgggttttgtgcagtctctgagatgtataggagggaagacaggggttagtggcagatgcctgggcctgtgtcagggccctttaaggaccaaaaggtcttggaaaagcctcagaggagatcatgagctttgagattaaagggagacctgaagccggcccagggctgctacagcctcacctgtaacatgggaacttgagatctgccctgggcaaagggtgttcagaattcaataatcaaaacaatctgtgaaatgtaatacttaataaaattcaaatccaaaaatgtctgagtacattccaaaatgagtaaaaatgtaaatttatgaaaatgctaaacatgcgtgattgttctaatgtaaattgtaagcctcagctgcttcccagaactttggatctggctcccttgaagctgctgcctctgatgtggctgccccctgcagctccaggaccttcctgttcagctcccttgagagtagccggcagggcccctcctctgcagagcctgtactctggctggtggcttcagggggcaggcattctgcctttcctgtctcccaccctaagggagttggccttgcatgcctcccatccacggttgcctctactgggggctgccactgggagacaggaagggcatgggagtttcgggagctcagggtaagaggggctgagatctcgtggtgtggagggggagcgggaaggtcgggtggccgaaagaatggagagggccgggagtgagagcaaagggagacaggcagagctgaagagcagtatcgccccaacatcaatactggtatttcagaatgggaaagctgttccatttcccgaattatcagaatgctgaggtccgatcttgcagtctctgagctgggcattccttggcccccactctcgggtattcttgcacaagaccatttttctgggctgcattttctcacttgtaaaaggaggaagttgggggtcaatatctccaagcgatatatgagctctagctctaggagtataggattttgagaatctggaattgttagtctgtggggttctaactgggacaattctagcattccttgactctcagctcccagccagggctgtgtggatgcgtggttgtgtgattccgacattctgagactttaagatgctgaggctctaggagctagagatacggacattctgtgaatctaggattctaggatttgatggtttgatgattcaatgattctaaatggggctgctgggaagagctgcaaccacctgccttgttaatgtcaatgttcagttattaaaaacataacaagaagcaatggagacagatagctcagaatggtgggcgctccctccactcccagtgagggaggacagaagaggctgggctggccttagagaatagagaccttttcaacctgggtcacacaggttgtttctcctgtcacaacagaactggtgtgtgtacattcgagagagcttccactcccaaagcttgcagggtaaggggctcatttccttcagcactggcctctattccttaaccatttcagactgggcagagagaggggtaactaccctttcctcccagccctcgaagtctctgggcagaaatggcagcagtggaggaaggagaggtctgctcacccccgccccttccctgacagcctgagggggaaaacaggacatgaatacttcctggacacagacatggaaatgcatgaacccctgccttcgagggccccgcgtccaaaggctcagacaagggcagaggccaggacagccagtggggtcccatcagcaccctctcagtataggctgaggagggaagaccctgttcttgccccaagggtgacagtgagaaggggtcaaggaaaggagtcccaggtcagggactggaagtgctgacaggtcctcccctgtgtgcaaggccacagtccagcctggcagaaggccagcccaattgtccagtgtttcactgcctcctgagtccttcttatgccttggcacccaggccagagttggggaggggtccaggctgcaggggagggtttccttccagagtgcccatccctgatggatccttagaagcccagtacagctgcacagttccaagggcttccgctgcctggtaggttcacagaccaaagctggccctggtcacacagcacaacggggcctgaaatcaggcttcctgattcccagtcctgggtgttcctttttgcccacagcctcccccacttcccctgggacacctgaggggcaggagtggaggtggggctcaggttagggagcagagcctctgtccatcatccctccgtcttcctcttcccacaggccagaagcaggtgtggtggtgacagctgcccccagtcctccacaaggctccattgtccccggcagggagcccctccccagctgcaggccagaagtgtgcctccccgggccctcctgtcgtgactctgccacccgcttcctcctgctgccccttccctcttctcatctccgcttgccctcaggccctccccatccccgtgaggtctcgtctctggcgctctctgggtttaagcctctctccagtgaaagttagatttggaagggccctgggagatcaccaagtccaacccttttattcttcggataaggaggccaggtcagagaggggaaggtcctgtccaaagctgcacagtaggctgaggcagagcccagtgctgtgctcccttcagcgctgggtcatgggtgcacactgcccttggcatcaggcgtccagggtttgagaactgactgtgatgatcagcgctaagcacacaggcacctacagaaatgcggtagggggcttctctcctcagcccttcttcacagccctgagctgccctcccttcctcttctttgcccagctcctctctccttcactatccctgctgtctgctgactcctgcctctggcagacactgtccttgggacacagactagagctcaggcctccaggactgggatgcacacccatgcacccagacacagacacataaacatgtgcaagcgtgtcacggggtccataaatcccagctgaaaactggtcagaccatcaggaggccaccctggaacccagtgtcctcctcttcctgtcaggcctcacacacctcctccaggaagccccttaggacccctgaagaccatcttcatccaactagcccctttgtgacaactgaactctgtgagcctaggttcctcctgtgactcgaagggcaaggctgagtccccccttcagtcctggggccactccttcagtgtcttcaggaggggctcagcttcctgttgctgggtggggagagccctgaggtccccacaggacgtgggacaatggggaggcggtgacagatgagaggctgagtcttccctaaagcagactccaccctcccctgacctccctggctggtggcttggacacagccctggcctggactagggtcctggtctgaccccacaatgcagaggtctgggaatcagaagccctggttctccagcagcagttctctaactggcggctatggagtccaggcctccagggcactggtaggttattggcgggttggtgcagattccagtgtccaggaggggtgagctggcctggggggcctatgtacaggagataggagggtgataaacacaggctaggtgggattacagggagctgggaatacctagctaagaatcccctcatcctaggcactttccccacacttgaaattggctggagggggaaccagaagttaggtggggttggggagggacaggagccagcaccctgcctccacctccgggcagtgcctctgctggggggagggaacctgtcctgggggtggtgggaggtgtgaggggggagctggattctccagtgaaactggccctccctcctctcaggggaggggagggggctgtccctggctgctcagcaggtagcccatctggctgtgggtggaaaagaagactcaggctttgtggataaaagggacagccctgggtcaggcacttatctcaaccctcgtcatttcctctgccggacatgactgggtgagtggggtcattgcacagagggaaggaacaggccagggccagtgcataccaggccctacaggagagtcaggcacatgggtgaccctgccacaccctgggctgcagtcagcccctcatagaggcccagacacacaccacagtcactgccggagatggccacacctagaccatcacaccacacacagacccagtctctccaggtgacactcaggcccagctgcaggcgcagctaagagggaagaccctgcagggcacagggacacgtgggacaaccagacgccctgcttcggccacaccacaagcctccacacaccaggtgcagctcctgtcacccctacggtcaacccaaggagagccagagattccagtagtcgtgggcaggtatccagtgcccaggcgagaagagggggacaccagcagggaacccagaacctcctccatgccagactgtgccctccccccagctcacagaaggagtgcctcaggctgtttatttcctagcagggactagcagggatgggtgtctcatccccctccccctcccagtccccaccacacgattctgaagctgccaaatcaaatcagcccctgcacccgcgccaggctggcatggcggccagcagctgacgggaacgaagccaggctcagaatatcccaccgcctgtccgatgcctgagtaggcttgttgggtgggggtggggaggggcaggagcctggcagccaggccctgggcagtgcccctcagagaggctgggggtttggaatgctgcagggtggtgggcttctggagaatgagtgagcaggtctctgttgtgtctccaggctgctgtggcagtgtctccaccgctagcattccgggaactgtggaagtggtgctggtaggatacaggtcgggggtctgatcccagtccagatgactgggcgccaggctggggtaggggggctcccacatggtctcacattcatttgagactcacagcacccaggttggaagccccttggttgtctgtcagtaaaggcccaactcactgtggaggcccagtgactgtgtgaggtggacattacggatcccattttacagacagagaaactgaggcttagagagggctagtagagctccctggagagaagcagaagtggaggaggcctcagaaagagtaaagaggtggtcatttccactccttaggagccctaggtggaaagaaggaatatggctctgttctcagagtcaaggaacagagaatatggcagagccagaggtgcccatgggaagcagagaacaaggagggagtcttgggagagagcagggtgcaagcaggcaaggctccctggaggagggggccatccgtgggcttgctgggggctaatgggaggacagtctggggagaaggggagaaggcctggccggcctcagcccctgaccttcttgtctctgcagccagcctggacccccttgcaaaggagccaggacccccagggagtagagacgaccgactggaggtgagagctcagtggagggagaagtgggtgggcttgagggggtggggcgcagactgaagatcagtctgagtggtgccctcccccttgggaggacggggaggctggagtcacatcccagccccagccctccagactaggaccacccctatatcaagaccatctcccctcaccctatatatccccagcctggaagtcctcccatgaggattcctcctcccaactcacctggggagtcactacagactcctcccttgtcctccccaccctcacccaacaattcccgttgattctctgccctgagtatttcccgagttcctctcctctccattctgccgcctgcttgggtccaggctccctcaactctcccctgggccactcactggctgcttgctttcagtttcccccatcatccacgtggccaccaggaggatctttctaatgcacagacctgaacttgtcactctcttgccccagaatcctccatgctccccacccccatgccccctccacaaccccagcctggcaatcgttccccttcatccattcctgcctcccccaaactgctcctgctggcctcttccccactcagcttcctaaatccttcggggatcagctctagcctcctttcctctgggaagtcctctctaccccttgaccatgggaccaagctcactcctgctccctcctctgagctctcctgccctggcagtcagatgccagggcgctctgctgtctgtcgcccaccgtgctgtgccacgagcaccctgttttctccatcacgtgactctgtatgtgtgtctgccttgtcttctctgcactgtgagctctttgagcctcgggactgtgctttcttcattcctgaaccttctaccacccttggatgggtaccggtgcagggctcagccagcgcatttcctgccctgcgaggggtgccatccccaccccccgaccatgccttccttccctgtgaggggtgcctcataggactcttcagtgctcaaaggggccttgacgagcaaacaaggtgggctgctgatgttgaagatcggcacagaggagggtgtgtgtgtgtgtgagagagagagagagaactggacccacagccagaacagagtctgcccaggcctggctgagagggagaggaagatgatgcttgtatcagccctcctgtgtgccaggagcctttgacacccaccttgtttaattattacagcacccccatgaggtaggggctgctattattcctatttcacatttggggaagctgaggcccagagggatcattcagcaagtgagttgggacagagctaagattggagcctagatgtgtctcaggctcgaggctcactctttcccggcccctgagtaagatgggaaagaaggtgcccacacagggcctggtgcacaggaggggctcagcacaggttccctgctgggacacagggccaagacctgagaatgtgcctccaagtggggctgggccctgctgctgggagctggcaaagggagctgggaggggagggcctggaaagccacattattaatttatttactgccatggcattccccatggggcggggctccccccagagctgggacagatggtgttcctgggagcctgcagtgtctcagcagcctcggccacccgccaggaaagactggatttgtcatccacccagggagccacaagaagagggggctttggcaaagctgagaccctcctgggcaacggggactgtgccctgagggaaggagtatggctccaggcaccctgctatgcctctggggcagcccccgctgcctaggccatctgcctgccctctgcaggttcaagttctgctctttgtccagctccaccggcctcgtccttcccatgaggcttccctgggtcggccccacctgctcctatccctgtattttctctgcctttccttgagctgggtcctgctgcctcttccctctgaccgaggatctggagccatgagctcctcagccctcagctctgtcctgaccccatccccacactcatccccaaaacagttagtgtctgcctggactcttggcagggcctgctggatttctgggtcctgccagcaccccacccgagtgcccaggcctatactcagcactgctgggaagagatgggctgcctgaggggacgctgccaacatggagagggcaagactggagagagtggggacccgagggcattgctcagaccacaggggcagctggagggaaaagggactgggagcctgaggggccctcctgtcagggtggatctgggaagccaagatggcctcatatagtggacaagccacagggtcagatgagcacgggttcaagtcccaactcccttgcttcctaggtgtgtggccttgtgcctgtcacttaaccagcctgagcatcagtctcctcacctgccaggcgggataagaacgtctatcactgccgggagcggtggctcacgcttgtaatctcagcactttgggaggccaaggcaggtggatcacaaggtcaggagatcgagaccattctggttaacagggtgaaacctgtctctactaaaaatacaaaaaattagccggttgtggtggtgggcgcctgtagtcccagctacttgggaggctgaggcaggagaatggtgtgaacccgggaggcagagcttgcagtgagccgagatcgcgccactgcacttcagcctgggtgacagagtgagactccatctcaaaaaaaaaaaaaaagaacctctatcattcttggatgtaatcactgttattcaacattaccacaatagagctgttgggagaagttacaaagactgtatgtgtggggtgcccggcgcaggcctggcacatggcagatccttggggagagttagcctcctctctgtttccctcaaggatgacatccttagagccaggactaggctgtacccctgtgagacaggatgctctgcagagctgggctgaggcttatggaagttctatgggcatggcacactctcctggcactggctgggcagcagccaagaaagcagagctgccagcacccatccccacccagcaggcgtgtgttcagcacaccctcctgggatggttacctagcccctgtgccagcagctgacttggaggaggggctcttccagctcagcctggcatcctccttcagggccaggcctctgcatcattactgtctctctgaaagtcaggtctggggcagttcaagttggtgaattgagcatgctgagtcaatgccctctttgtgatggctctcagggcccagatggcggcttgggagccttagctgggatgggggcatggggagaggcggacgtggatgagggcactgacatccacaataagtactgaaatgcactgcccaacaccggctcctctattgctgcccttgggacaaagaccacaccccttggcagggcattgctggccttgcctgctgggtcccctcatgtccccttgtgtccccttatgccctgagacagccagcgctacagccacattgttgtgttcactcccagcacacagcagctccccctgcctccctgcctttgctcacactgaccacctgtctggaatacctttcctttctttctccacctactctcttttcaaggcccagatgaaatgtcacctcctttgtgacgttcctcagactggtccctctacctcaggccgagccagtctcctcccttccctgggcactcacagtccccatttccctgagcccacagttgggaaacctgttaccccacggggtgctgtgggtagtgtatccttccccatggggttgtaaacacccaggaggcagaggctgagactgagtctcctttgtctctcttgggcccatgtggtgcttggtataggcctggtatatggtaggtgctcaataaatacttcttgaatgaacaagagtggctgtgagtagggctggagtagttccaagaaggggcacagttgggttgggcggtcttggagacttggaggaggcaaccttagaactttgaaggatggagagggtcaagggcaccaaccgaagaagccagggaccagctaggcagtcagagaggtccatgaggtcagcttctgacagcagcagctaaggacaaccaggaccagaacaggactgggaaaaagcagatagaggaggctggagcaaggactcagccccagaggaggctgcaggaggttggctcatgctcagaacccggctccaaaacactctgcccatgagtgctgggctgaggaaggcttggtgccagagtcagggtgaggctgaggccaccagtgaatatgtgggcccagctgcgggggtagcactaggcaggggcgggagccaggttggagggggtattgccattgccgctgcaggtggagtagggcttcgctggggaaggagcagcttgtgcgagagtgtgggcaggagtgggaggggagaaggctccgagtatacgagcatagcttaccagcaagtcctggggtgaggctggaggggccgcgctgtaggcagcacttttcaggcccttatctaacattctcaagtgagtgctcctagctgccagatgtgctacttcctcctggattctgcacatcaggagccagtggcctctacaatgccccatggccccaagggagtggctgccaacaagttggccttagcatctggcatccatgggggtcctgaggccctgccatctgtctgtgcccctgttgggctgcacaggcccggggcgtgcagggacctgggaccagggaggcggtctcagctgccactctagcctgtctctctgcctgcccatccactgtccacacccctggctgactgagtaaagagagagatgggcatcgcaggtcctgccatcaaagaagcctagtctaaaggaggaggcataaagcaccggggacttatacccagagaagacacatgctgagaccacgccaggctcgcgggcaaggcctaggcccagggagggccagcctcgtcaagggcctggagttgagactcagggaaaggcaggagctggcatagaggcgcaggcaggtccaaggcagtgcccaggccagatgctgcggccccgggctgaggttgctccagccggccccaccccccaccgtcctgcctggcctttggctgtaaacactgagagaacaagttccgtttcccgggaaatatttatctcaggctgtgtgaagagcgtgtgcactggcctccgtgtgtccttcctgcagaccggctggggcaggaggagagggagcttggcagcgcccttgctggggggagtctgtggggctaggagggaagggtgtgccagaggcccctgcctagagcctgaatttgagtgctggctgagggagaggtgggagcagatgggagagaagcctgttttctccaaaccccacaaatgccctccacctctctcatgttcctttcttcttcctggtccatcctgtctcctccaggttccggcctccagcctggtgtcccctcctcaggctgccttttcctcctcctcctccctgtttcctggctcttagccgctccatctgggaagtcttcctcaactttaaaccctcgaacccttgtcctctgccctccatctcccactcctcaggctttcagcagcttcacgtggagcattgggctggtcctgtccacagttgttcagttgctgtaacagcttgtgcaggctgccctggagccctgttctgggaagcacaggtctgggcaccctggggctggggcgaggcccggagctgatctcctctgtccatcccagtagagccagcaccagtgcagacacatgggggatccaggttggtggaccaggggaggatggaaagtcccatggatccagccggaatgttggagtggggaggcagagggcccagggttcctgctggccagcctctgggcttaggggtgtgtatcccagacaggccaggcctgccaggggccctgacaacaggaaatccttgaaggaacaagcagaggctgaggactctgagcacaacaacaggaaacagccgtgacatggggcaacagccctggcgactgtgcccagttggggtggggacgaggggccaagcttgtgggacccagggtgatgccaagagggacactgagacactgtgggacagggggcgttctgcacatgtgacacggagcttatgacgtgtaatatcaagtacgtgaccatgatcatagggtactgtgtggagtgtgggtgagtcactgagtatgtgacactggctgtgaggcactccatgatagcagatgtgtacagtggctgtgccaccaagtgtgtaacactgtgtgatattgattgtgtgatgctgacaccgagtgtgtgacattgcacattgcatgctaccacgtgtgtgacactgaaagtgacagtgagcacatggagggtgtgtctccatgagaatcaaatacagaaacgtgagcaaatgacgctgcagtagcaggtatggtcctgagtctgtggctcgagtgtctgacactgaattgtgacattgagtgtgtcccaagcatatgatctagtgaggctgagtgtgtaaacaaaggcatgacatggagtgatagcaagtgtgtggaagtgggcgtgtgatgctgtgtgatcttgggcctgacattacatgtgtgatgctctgtaatggttgtaacagtatgcaatgtgcacatacagtgctgtgtaggacactgtcatgggaaggcaccgatgggttcaggcgggaaagtaacaccgtccaaaggatggttttaaaagattgctctggccggatgcagtggctcacacctataatcccagcactttgggaggctgagctgggtggatcacctgaggtcaggagttcaagaccagtctggtgaaaccccatctctactaaaaatacaaaaattagccaggcatggtgacaggcgcctgtaatctcagctgctcgggaggttgagacaggagaatcacttgaacccagggggcagaggttgcagtgagccaagattgagccattgcactccagcctgggtgacgagtgaaataccatctcaaaaaaaaaaaaagaaaaagattgctcaggttgcagaatatgtatgtgtgcgagtgtgcatggtgcgtggcaggggaggggagataagttagggggaggcagagagaaggtgggtagagcaactggaggctcctgcagctgcccaggcaggagatggtggtgcctgtgttaatggaatggcagaagagttagagatatggagcaactttggagatatttgaaaacagaaatgacagaacttgctgataaatgagaagatgagcaagagggaaaaccagagaacaatttccagggttctggcttgaagaaccaagcgatggatggtgaagatgtttctgagatgggcaaaggcaagggggagggtcagcactagtggggtgggaggacaaggaggcagaaaccgagtgagctgttttggatgtgttaagggaagcatccaggtgaaggtgtgcagtgggcagcggggccaggctagggatacatctgggagtcgacaggcatggggggtttgttaaggtcgtggacctggctgggataatggagagagggagcttggcaacagaagaggtggggactgaggaccgagccttaaactctgaatattccattgtctagaggccggggaggtgagaaggagcagcaacgagacagaggaggagggccagggaggcagaggagaccaggagtgtgaagccagaagccaagggaggaaagaggctcaagtgggagggagggtcggtgtgtggatggtgctggcccacaggtaagatgggaaccggaagattgtgctgtgctgggcactgtgggtgagtcaggctaatgggagccatttcagtgatgggctggagccagaagtcagactggcctgtgtaggatggtgagggaggtgaagacgttagcctggagagccctttggagacgttgggctgtgagggctgcagagaaggacatgatcgctggaaagggagattacatttttttattatgggtgattctaagcagacacaataccagagagaagcatataagaaactgccatatactcatcaccccagttcaacagttgctgggatttggcctcatttcttcctctcttgccccctatctgttctttcattttcctttgcttaagcttaaaattttttaaattgtggtaaaatatacataacttaaactttaccatcataaccatttctaagtgtacagttcagttgtggtaggtacattcacactgttttgcaaccaatctctggaactctttcatcttctcaaactgaaactctgcacctattaaacgacagcccccatcctcctctgtctccagctcctggcacccaccattctactttctgtctctatgacttggactactctagatacctcaagtaattggaataatgtagtatctgtctttttgtgactggtttttaagtttacttagcataacgtcttcaagttttacccatgttgtagcatgtgacaggatttccttcctttttatggccacataatattccagtgtatggacagaccacatccatccaacaccagacacttgggttgctttcacattttagctattgtgagtaatgctgctatgaacataagtgtacaaatatctcttcaagatcctgcttccaattctttcagatgtatacctagaagtacgcttgctggatcacacagtcattctattttttggtttttgaggaactgccatactgttttctgtatctttttacattcccacggacagtgtacaggggtttcagtttctccacatccttgccaacatgtgttattttctgttcttttttttcttttattttttaatggtagccatcctaatgggtgtggggtgacatttcattgtggttttgatttgcatttccctaatgattagtgaagttgagcatcttttcatgtgctggttggccacttgtatatcttctttgggaaaatgttgattcaagtcctttgcccatttaaaacattgggttgtttgcttttttgttgttattgaattgcaggggttctttatatattccagatattacctctttatcagataaaagctttgcaaatatttttctcccatttcataggttgcttcgctgaaatatgttaaagcaaatcccagacatgatgtcatttcaccaaaggtagactttttttttggtggggggagctttccggtgaagactgaaaaacctgctagacaaattctaaaatagatgtgactttggatttttgttttttaaggctaggaggtcctggatgatgctgaaatgtaacagtgacacagagccagtgtggaactgtgtctgatgctgtgtgagggtgacatggtggctttgggaacatgggtgcaacactgaagatatgggagactccaagtgagggtgacagtgagagatcactgtgtgtgtggccctgtgacacccagtgacatgggacagtgggacgctgtggaccctgaaatgactgtgtgtcaccgagcaggtgggacctgctgtgtgaaggccacaggtgtcatgtcttcttgtgtcatcctggttgatgagtgtgacacagtgcaggactctgcatgggagtaagagggactgaagctgtgctataggtgaccgggctgcatgtgattcaagtgggctcagccccagcttcagctgctgagtatgggagggagcatggacattgtagggtagatgaggagaaacactgaatgggaacagaaatggtgtctgtgcccagatgcgagctcctcccttctctgaatacccaggaaggcttcctggaggcaggatgtgggcacttcagcaggatgttgtaggtgctgattaagagcagggcctgtggtgtcagacagccctgtctaggctctgacattcagcaggtcattttatctcttgagcctcaatttcctcaagtataaaatgggagctcttaggaggattgcatgaagcagtgctccaatgcatgcagtctctggcacttggtaaatactctatggtctcttggggagcagcaacctcaacacctgcaccccaggtccccaaataacaggagcaccagtaggagcacagtgaaggtgcgctgagtgaggtgtcctcttacacccacagccctcctctctccctctcccccaacttctgtcccctgcttggtgttgtcagcgataccccctcctgcccactcactcctgccccctcctctcccctgccgtccttaccactgtcagcctccagcccaggctcctgcagcctcatccaattaggccaatgcaatttgctcaagaaaaagccccataatttggttaatcacaccagtaggggatctggtcccggtcgggagggtgggggtggataggagtccatacccgcagctgaggcacaggtgtcaaagtgcctgtcttttgggacctttacccacttccttgggctcctttcaggagccaacagagtccaaagcttgggtcttctcaaacccaactacagaggccttgaaacaggagtctggacttcctgggttcgcttgtgttcctgggagggtccctgctactctctgggcctcagtctccctttccaaaaatgggagtggaactggggagtctcagaggccccagttggcctagctctgcatcccagctctggtcagtcccccttgtggcttctgaggggccttctcctgggccttggggagggagcactgaggggtaggtggagagcacagggccccagggaagtgaggaggggtaagtgtcctctgagtctcatctggaatgtgtctaccccagtcctataatcagagaccctctagttccaggctgcacacctgaaggtggggcaggaagaaaggaagctgccctttcttggtcacctgcaaggccaaagtctcttaaccgtgcaggctataccttgcacaggagctccagcagaggtggggtggtgctgaaactgagcccactctccctcaccaagcctttcccctcaggcccgcatctgcccagagaattggggtccctcctttctaatgtgcacacaggtggccccagccccctgctgggagtcagcttaggcaaggtttgatggctcagcttaatcttctcagcagctctgggggaagagaccattttacggatgaggaactgagcccaggaaggtccaaagacttgtccagtacatgtggtgtgtggcagggcaggcagatgagcccgcatctgagggaggcgatgggagaagtgacaggggtgcgcagaggaggagaattagaccctctcagattccaccactctcagccacacgttcactcactcatttggagacaagactaaccaccagcgcattcacagcaccccagacagccacatactgactataccactgtcacatggacatcaatgacctgaatcacatatgcatagatgcaggcccacatggtcactcccacgtgcagatggccagtgcacacacatagacacagggtactcacacatgtttacactctcacgacccatgtgggttacagattcctacagagacacagacctacatactttcacaaggaaattctcccagtgacccagggaacatagtctgccatgatgatgtgatggtccgtaggggctcgccactatggaccattaatgggcaggctgcacacatgcttaggtccccagcaaagcgggagttctgcacagagtgagaggagaggtcagttctgatgagtgtatccagaattttgcaatcagaaaaaccacacaaaaactattttaattttcatttccaagataaaatttagtttgaattgtatagagggtccgagggtctggtgggagggcatcatcatcttttcaaggctttggggttctaaggcacccacagattcacaacagtcccacaagatatcccaggctgacatatttacccagcccagtgtgtgcgtgtgtgtgtgtgtgtgtgcgcacgctgtgtgcatgctcatgctggctcccagatcctcgggatgtgaggaaggaaagtaggagagattccagagactccggatgtttgttctctggcttcctgggcccttcaaaggaaaataactctggatgtcagcctgcctgcctggcgggctgggtggagaggtgggctgtttatgttgggaggtgggctgtatgacagcctgcctcagcccctgtggccccactgaccgggaccctgtgtaatgaggcagagtgaccaaggcccatggccagcgtcccatgggctcgtaggcccatcgcctcccctctctggggcttggctctctcatctgaaaaatggaggtgggaaggagatgagactggatgggctttctcctggagactgattagagagacagagactcaggcccggggtccagaaaagacaaccaaagctggggagggcacatgaaggggggcaaagaaggtctgggttcaggggagtgcgtggggccccagagcctgccatgtctccgccaactctctccctcactggaggagggctctgtgccttggtgccccacctgcccagggccctgtggctcagccccttgcttgctctgtgagggggacgggagaaggatgagagtcccagtgatagggggaggacaagaccaggggagagggctgggggtttctggagggccagagcaggaagagcaggagagaagagaggacaccacagtgcaggaaacggaggagcaaaggctgggagtggggaggctggaggggtgcagggaatcagactggggcgctgcgaagaggcctgaggccagagcaggcagtgcctggatggagggagcgagcagctcctcaccctcagctccttgatgaggtaaggtgaccacgagccctgctccaggctgtgtgctgagcactttgctcggagcctgtcactctggaggaggggagggggtgttcccaggagctatgacagtcttgtgcaagggagggacagggtcacatttatgtttaacaaagcactgcgctgggagagaggagctgagagaccccggccctggggagcatggtggctgggaccccggagggcaggcgtgccccagacggaccccactcagaagattgcttatcccaaccccccaaagagaaaggctatttttaggaacaataaaagtgctcacacattcctgcaggggcagagagagggaaagggggcaggagtcagtgcagaggaagagggtggaccccgctcttctcccaactctgccttggtcttcagggacttctcctcaggggcttccccagccagccctgcctctccagcctccgcctgtccctggggttccctaccggctcttatgtctatccctctgcttctgaattggtacttgttctgtccctgtctctctttctcatacttccactttccccctccccctggggtttggggaacagctgggatgggccaagctctgttgagagagccaaatacagtcataggacaaagcagcgggaggctgtgggatacacacatgccgcagagcacagacagagagaggtggccaggcacagagagagcgcccagggaggctgagaggcagggagaaaacacgctgggacagtcagggagagccccagggcaggcatcaccgggcagccagcctctgtgccctgctctctatcttgtccctaagaagaccagcatggctgggcttgcctcccgccatccaccccaccagccctaccccaggctggcccttcctccccgccctctgcaggcccacactaaccctaggccaggccgcctccttcagcatttacctcccacacacaatgggcacagtgaggacataagagacccagtctctggcctggaggcagatactcagccttacccgacatctgagagggctcagcccatcccctggccaaggcaggtattagaggggccccaaagacaagcaggactctgggacaaggtgtcctagtgtggcccaaagggctgggctgaagcatgggtctcctggctccagatgagagcctgggtgaatccttccctgcctcctctggccttagtctaccccatcaagcttgggattggactacatgaggcctgaggccctgtagcccctggtccctgggaattctcagaaggcctgggagggggacaggtgaccacgcaggaaggcttcctggaggaggtgtcctcactcatgaaagaaggtgatagtgacagtgctcctcttggggaagagccctccatcctgacctgctgcccccacccggtctgcacgtggagatgatcctgaagcacaaagggcctcccggcctgcagaggtgcctgggagaggttgccaaaggctctcagtaggagacaccccattcctcaggctccttctctgagactgtaactgtgccagactggggaggctttgagaggtctcagctatctcccctgcctagatccttcctccacacccctcttctccctgatggcatgtagccctcacagtacagtagtcctgggcacacaggagtttacccagtcatttacagctcagcaaacgcctaccaacacctatgaggggctgggtaatgctggagacctggagaggggcaggacacaatctctgccctccaaaagctcccagtctgttgtgggagccagacgggaaagggtggcactgcattgatgcacacagtgcatgccatggtgggggaaaggggggcagtgggagccccaggtgggagggtcagacttgcctggagagagaacaacaacagactctccctggaggggatccagagaagggagatcactccattcattcattcgtcattcatccatccacccattcaattattcctttggccatcatttcctgagggatgtaaactctcttctgacactgacccagcgggacactcagcgtcctcctcctctcctgcttgagccaccatgcctgcctcttggaggctcctggacttgctttgctcagctcccaacccaccctgagggggtgaggctgaggagggtgtacagacattcagggtcaccaaactcagagctggaggcctgccacctcaccaggggcctttctcagggcacaggctccctggtggcagggccttggcccttgcttgcacacccttggggactaggagccccctcatccatcctgctcaggctctcttttgtggcgcgactctgattcacagtgtgcccaaatctgcctccttgtgactgccgcgagctgcctcgtgggccccaggccagaggacaaggatagctagaatgccaggtgaccaggatgactgtgatggcatggagagggggatgctgtgatgtgtttgggaggaagtttgtggtgtccaggagaatgtgggcagcagaaatgggaccactctcggttcttccctgtagatgaagcagctgaaggtgggagggggtgggaggagacctgagctggctctgccccgcttgatctgatgtctgccttgcagggccatcctccccctccccacactcagctcctgcctccctccctctacccactctgactgttccctcctttcctgactccagactctgggtgagggactgaggtgattccagtgagtcaggccctcagggaactgatcgtgcaggcaactcttgcctgccttctcctgctctttccctcttcccattccttcatccacccccaaacctagctcctgatggatccaagggtgcgggggacaaccgggaggtcattttggaggaggcaggagctggaatagaagctgggactggcttgggaagggcgagaggccggggcggagctggttgtgggcgctggaagggaggagccaacagtgtggggtcaggctcctgtggatggggacacccttgggaggcactgggactggctcaggtgtattctacagtgcacgtgtctccagtgtggctcggaggctggagacgcggccctgttggagtaacaactgaagccggagtctgcgaagggtgggcaggagggtggagggatgggggcatggagcgggagggggtaagtagaggagggaggggaggaagagaaagagggaggaggaaaggtctctggcaggtccctcctttaagactgggctcctgcgctgcgagtggccccgtccatactgccttgttatccatatctccccaccactagtctccctctgtccttccacccccagcctctcccctccattgggaccttccctggggcgtcccctcattggctgttctcacctgagcaaggcccctcccctccagtccttagcctcttcacctgtacaatgggatgacccaaacaggcacctcttgggcttgtaggaggatccaagatagtgtcagtgggtctcgaggtgtggtcccccgaccagcagcatcagtgtcatctaggaatgtttggaaacgcaagttcttggacctcgtcccagacctactgtatcagaaaccctgggggtggggccagcaatctgcactttaacaagcactctgggtggttctggtgcacatgaaaattggggaacggctggtggaaacctctagccacaggaggtgcttgggaaaggtaccttcccctccccaaagcctgatgcctcactcaagcatgacactgacagttgggctagttcagctgcgttctgggtctctgtcttgcctcctccttcagactaagcctcccaagggttgccaagcctctttcctctattctcctcaccctgatccagctcagcctcattgagagaagtctggggctgcaagatcttcgcactcacaggcagttcctctttgcacatccaaggcaccagtgtctttgagaggcgtctccttggccaggtggcaggcgtgggtgtgtggggaggaaggaggaggaaccgccttgttctgctttcttgtctctgactctgcaggctgggggtgctgtaaggctgcgaggaggcatagagtcagcttgggtgctgggctgaggccaggggccgaggctcagctgaagcgggcttctctggtctgagcctacaggatgcctcctttggggcagttctgccagtcaccctgactgggcggctgtgcttgctagtgccagacccatgctaggcacagaggtcgatacgttctcctgtgctcttgaagggccctgtcctctgggaagataagaggctgtgtatattgcccaccggaacaggaggcaggaagcaaaagaggcgtagatgacacttgcctggcaccccctgtttcccctctagctgccttcctgggtttcccattctgtgggcgcttctcttgagttaggtgctttctcccagtgttctcaaggtgactatttggaggtttgtgggaggagtgggctggagacacaggagtaggtgggggcaggaagtatgcaggagagagatggagagtgggaggagaagctatgagaggaagagaggacgcggaggtgggaaaagacgtcaagactcctggagaggaacaggagtgcagcctgggacagaggtggacgtcggccgggggaggcagggaggaaggcagggaggtccacccgaaaggaagggaagggatgatggacagagaatgagagggctccgaggtcctgggggatctagaaggacccttccctttacagaaggggacaccaaggcccagagagagaggagggcctcacagaggacctaacacaagcagagttgcatgaatcagtgtgaacggacagtcccaagagcacagccggaccttgggaggtacttgactcttgagtttgatgttattgccttcctgtaggccagtgtgaggggcactgtgaggcttccttccagagaaggaggcatggagccagtgccaggcagtggggtgagccataggaggacctgtggagatggggaaaggcatagagactcatgaagatgaaacaggaaagatcttatggcagcgaccccaaccctcaggaagggcgttggtcttgtgcttgtggctccaaaggggataagaccaaggtctctggtttcatagaatcttaggctttaagaacgagttagaagtaatttagtccagaccctctcctctccccagataagtgcagaaatgcagatctagcccacggctgagccccaaccctggcttcagaggaggcctgactcagaacaggctcccctttcttggtacctggggtgaatgaaagctaagtccgtggtaatggtgctgtctgtggtgctgactggccttaccttggactacagagctgcaggtggagctggagagagcagaaaggctccatctatccatctacccacccacccagccacccatctacctatccacccaccatccacccacccatccatccaccatccctcccccaacccatcctgcacccattcatctatccacctacccactcatccatccagcctcattgaattaaaccatagaactatatgctgcagagctagaaagatccattttttagtaatgacaaaactgaggctcagaagaggaaaggtgttgcgtaaggccacacagaacttctgtagtcagtctggtacaggattggaaattgcggctcttttctacacaccacaagttctcctctgtggtctgggaaattgcctggtttttatgctgatatctatactgatatttgttccaaaaagctgtgaaggcaggaaatgtgacctccttcaccccatcccgagcctgagttctgtgtgtgtgtgtgtgtgtgtgtgtgtgtgtgtgtgtgtgtatgtgatgtgcatgtctaagtgcaaccttgtatatgcattgaatatatgattgccttttgatctgtctgtgtgcgtgtttgtgtgagagcctgtgcatatacgtatgagtagaggagtgcgtagcaatatgtatttgtgtggcatgtgtagatgggcatgtgagcaggtaaagctgtgtctgtatttttcctttcctcttccttttaagatcgaagccccctgacttgagccttgctccccatctgtgcctccaattcaggaatctccctgcttcccattagcagctgctccccactgattctctccttccttcactgaagcagcaactcttccctctgagcccacacctcatgggctttgcaatttgagctatttcctcccctgagttggtgcaatgggggtgaagttgctttgagatctgaggaagattcatggaggagatggcatttgagcaagccttgaaggcccctttgagtgccagatctgaagtggcccttcccagctgcagttcctgcacccaacaccctccattcctggggcatgctgggcaggaccaggaggtggattgacagaaggatgcccacaaagagccctgggcttcatcagtcacattaccatccagtccgctctagcacagatgggaagcccttccctgctgctgccccaactctccccaactttcctttcctgctctccttattgctactatcctgcacttggcctgaaaagtcacagaaaactgaacaatcagagcaaaggtcaggcaggcacccaccaattccagtaaaggacagttgagggcattccccaattgaagcaaagggcaggttgaggagtccaccaatcagaataaaggacagactgttctttctgagcaccctagggtgggagctggggatcgggtgctgagcaggaaccagacagggctagagatccagaggtttgggttctggacctggctctgctctgactggctgtctgaccacaggttgatcattgcttctcattgaacctcagcttcctcatcggtcaaatggggagacttagctctctgaaggctgtggctttgaagaatttctccccctgtatcaggctcactccgtcacctgggtctctcttccccaagtccacatcacatacatcagactccaccaagggcagggcctctcaggagtcagcttgtgggctcctctgcctccaagaaggaatagacacaaaccaacaccaccttctgtgctgtctttagagcccccgtctggggagcgtgcatctggaagactttatcttgggagtactgggggcatcagctcttcctcccctttttagtcttcagaattgaccttggaaggccataatagcctgcgtgtattgtgcacaggtatcactcgagctcttgccctgtgaatctttaaggaactgtaccagtgagaacgtgtgtgtgtgtgcgcacatggatggtgtctgaaggcctgctgggatgtctgcgaggacgtgggatctgtggctgtgtggtgctgaagttgtctgtgctgtgatgaggagtgcctaagggtcaaaagacaagtgatccaatttgggtattgtgttgtctggaatcagtagcttctgatgtctgagggtagacatcttcccatgaccaagatatgtgtcttcatccttgagcagtgggagggaccaaggaagcctgggggttggggaaagcgatgctgagtaagcatctggggagaaggcccactactgccctcctcctgggaacactggattgggtgggggaaggggaggaaactgcagccaagaagacccaggagtgaaatttggagctgaagcctggatgcaagtcttcattgagagcccagcgtggaactttctggcaaataggcattcagcccactcttgtgcacccttgaggatgggaagctcacttcctccctctctcctggtgacctgtggcatgcctttgtagcatggccctacctggaagaaggtccttcagcccactagaccaaggccagcctcctgtgaaatcctatgggtccccaggctgtccatggggccacagagttcagatcccccatctaggagggtctgagagattggagttggagactgataaccctgggtctcctctgctttagatgaggcatccctgggttatccagtcttagtcacatgcaaaacttggtttccaattccctcgtttcataggtcgcctcctctggatgagtgtcatcttgtcagcccctgggacacaatgaacaggggatggtctaactagactataaaagtgggggaactgtcatcttcccaattgggttaacagacctctattaatatggcctgcagtttgagcatttttatttcttgccagtcatgcttacactgtgggctcatgctgaactgtggtcttttaagaccctcaacctcatatcatgttcacatgaatggggacccagccatgtctccttcatcttgcagttaatcactttgctttctgaacacagacccaaccttccactgggaagacatctgaaaggacttccaagggcttgcgggagggcatggctggtggctggtatgagtcacgatcttgccttggccctcgtttcctttgttctgttacctttctctttgatccccatggctctggccaagttaatagagcgagaagcagggacttttgtctccgttccggctctgcaaggacgagttctgttcctgggatgggaaggctgtgagacagtcaaggctgacgtctccttctcctcctatagttgccaggggtggcccagctgttctcccaccttatgggttatgcaccccataggctcttgctactctcaacccagcccctcactaggctggaaaatgagactaggtgagaccaccttccttctggggaaagtgagcgggacccagcttcagcgaatattcagctgagcatctactctgtgttgggcattctgtgaggcacttttaggactctgatttttattttcatttttaagggctcaatttcattttatcttcatgtcagcctgtagggggcaatagccccagctgcttccaacttacagataggagactgaggctcagtgactgaaccaagacactcactgctcatacacagcggagctaggattcaaatttgggtgtttttttgtttgcttgttttgttttaatttggagccttgtggtttccctactgtgccagaattgtcctcgactagagaacaagagacctggggtctaggccaggcttgacctgttgactcactatgaggcctttgctaagtccctggcccttctctgcgcctcagtttccccacctgtaagatgagggtacttggacattctgtggccttaagactgtttgattttgagatcctaagatcctgggattcctgtgcctgaaagactcgggctctggactaagctggggggttttgctcacagtcctttgggcagatggggctgccctggcctgcctggcaaagcctctcactgccctctcctctcttccaggacgccttgctgagtctgggctctgtcatcgacatttcaggcctgcaacgtgctgtcaaggaggccctgtcagctgtgctcccccgagtggtaggtgcccgcccttgccccacgcttcccaccccacccccaaatcctttgaccagctctatgctgtacctcactcagggccaaggaggaaggaagaggcagggtccctgcccagaggactttcatggggaagtgaagggtctggatgggtgttctgagacagctttctggaggaggaagccttaggctaagcatcaaggaatgaacttgcataggaatcctgcaatggctgagccagaaggggccttagaggttaagtggaaaagctgtgtctcagataatgaaagggattcacctaggataacaggacgtggtggagccagctgagttttggaatacatgcagcaggagaagttgagggtagacatgtagaagaacttcctggaagccaggtctgggaggtactagaatagggctcagctttgatgaatagacatgcattgggttaaagtgccctgcctggagatgggaggctggaaaaatggcctctagcagccttttagcagctttctttctgtcccatcccaataccatggatgagttgcaggtttggggcaggtttggggtgatcatggttgcctgagcccagagtgccttactggggagattgtgcccctcatcatctgttccaggccactcccctacctggcttcaatggccactgttcatcccttaggcaggaggatgggtaaaccagcccttgaggcccaaagtagcagggtgttagttgcaccagaaagagggaagcaggggacgtttgaagcctggagaagggagtctgatccagcctaaggggcatggaagacttcctggaggaggagattccctaactgagtcctgatagccttgaatgtcctcttccctactctaaacccggccaagggcagcctctgctccaggaaatatggccaactcagaatgtgaccttcccatccctccagagcccattgtccctgaatctgcttgatggatgaaccaccggaggcccagagagagagggcacttgtcccaaggtcacacagcatgacagggataaatgggacttggtatctaagcagccccattccctctcctcagctctgccttccccaaacctcctagaagttcagagcccaggaggagggctaatgagtgagctttattgagtgtgaaattggtaggaagtgggtggtgtgttggcgcccaaaaataaatcctcctggagaaggacgggactaaggcaacatctggcctggggtgaaggcacatctggaaagggagggtggtggaaactggcaggtcggtttctgtagggctgccccgagagcctctgtggccactgaggctgccgtagggtgggaggaggaagtgactggctctgtttcacaggcagggtgccctggcggctgtgccagcctagatgctctgcaacagattaattgtctccccaaagctgggggctgggatgacagctgtggtccaggttcctgggacagtgggaaatgtcagccctggcccacccaagagccctataggagctagggaagccctgactttcgggagtcctggcttgattgcacggaggggctcagcccccagtgaggtaagggagctgaggtctgctctgctgcccccagggagggaagcagagatggggaggggacccccgcccagggaggagagctgctggcacctggcttcctcatcagcacccattgtggcaggcagccccgaatgcagatggtgctgatgtgtctgaaatggttccctccttctctccaatagactcagctaattttaacccagagggctgagagtaagggggtgggagacatacggacatgcggaagtgaagcgagaatctgtccccctctgcccccatggactacccacccctccctctgcctgggcaggactttctgtataaccccggctggtctcttaacctctttgggccaaataactcaggcccctcccaggctgctggaagagatggatgacaaggaggctagatatagccgaagagtgggcggcctccttcccactgaattctttatccctgaacatcccacttaggtttccttccagccaaacaagagggtgtctgcccctctcactcccttcaggccttatcattcccaccccatgccacacccaccacggaacctgactcagtgtctctggaagtagtggccaggcatctcctgtggtgggggctggctggcgacagctgatgacaagaagagtggctggcaggattgtggacgctctcagagtcatggaaggcaactgcttcttctgggaaggattccacacttactgagggtgggccttcaacacgtagctccactgtcagctcctcccaaagccctccaggataccctcagctgggaggcaagcccttctccatcctcctgcggagaaaacagcagagttgtggacaaggctgcgttgcatgggggttggtcagggatcccgaagggttgccagttctgcttggaaggaatgtggatttttgcctgtaggtcagtgagggcaactacttctgccaagacatggcctggaactgaggccagagctgctctgggcccttggggagggaggattaaagagcaagagctttgatctccctctgaggagtaatcggtccaaaatacaaatctgctcacgtctccctgtgcacgtcctgccctgccccagttctgttcgtaagcccatcccactcagccctactgaccttgggcccagcccctgtgccccttccctcactgtctgttcctaaatgctccatgctttatacgcctctggacctacctgtgtacctgctataaggcctgggagcccattctgcaccctgcccactccctgaatgtgtctaattcccactcagtgacagctgaaaggtcacttcctccaggaagccctctccagccccaccggaggatggcgcagtgccctgctctgtgttcctcccctggctggggttatgggtgtgtggtttcttgtagaggtgaaggagggatgcttcctagaacattctgagccccatccctggtacagctcagagtggatgctcagttattgtttgctgaatgcctgaggctggagtcaggcagggaaatatcccaggtgggaggtgatttgtctgcaccctcagtccttgaaactctttacctggcacattgggttttgggtggtaaaaaaggtcataggttcatgaatcattgcctgcttagaattccttccaagaggagaggacgaggtgcttagttcaccgggtgttttgctgccctggctgcatcttagaatcacctggagagaaaaacaaacagatcattgccagagctccactcccacaggttccatgaccttgccccacagacccctgtgtacaggctgggactgggcagctgggagggcctctccacagggtctcataagtgccttctgtcctaggaaactgtctacacctacctactggatggtgagtcccagctggtgtgtgaggaccccccacatgagctgccccaggaggggaaagtccggtgagccattctctgcacccccattgccctcttgcatggccaaggattctcagggctgaggcaccatccaaggtcatctggtctgaccctccccttccaacattgatccccgcctccctgccaggtgggattccttggccaggttgctgactccagcacagaagggcagaagcaatgtcttctcttccttggggaaatggataggcacagagaaaataccaattgatggtaaattttctccttctaattgcttctaaatggctgcagcctcctcagagcagagtctcagaacattggggctatggggtgtatcagttagaacaccggcatgctgtgagaactactgcgaggctggacctggaatcccagcatgctgggcctgcaggagctcacagtgccaactccttgcatctgagaacagggagatcacaggcagcgtcctgctgagggttctggagccccactgcctgggttcaaatctcagctccctgtttactagctgtgtaaccttgggcaaatgacacaacctctctgtgcctcagttttgtttatgaaatggtgataataatggtgcttataggattgtggggaggattaaatgtgtcacacatgtaaagcatttaaatcaggcctgatccatggtgagggctgtctgttggggattaccattgtgagagaatgctggaatcactgacttcaggatcatgggatcagggcacttggccccctgataccttgatgcccatttaattcagcctcctcatcttccagatgggtggatatcatgagacatgaccaaggccacatgccaggtatgaggcagagccaggcctaggactcgggtcttctgactcctggctgtttaggggaaagtgagaggaagtggaactcatcagatgagaaaaccttgggggcaggcatgctgctgggaggaggcaggctctgaaggatgtggccattgcctgctaagcactgaatgcagggccattgtggggcccagggagcactgggcaggagctgagggcagagtgggcaccagtggggatgtcccaagaaggcagctctctacccctgtgaggagggcttttccagcaggccaggtggtccagggatgtggctttttcaggtagcagctgagcctggcaagccactcacctttcacagggaccatggaaagaattcctgtttgaggatgctggactcatggtcctgaggcccctccttgtgctggaaaccctggtttctaggatgctggtctctcctcagccctttcccgtggaaggagttggttctgctctgatagccaccttcccatttcctattctcccactgagctcctttcaccttcccctaacaacttctccgtcaaggagcatgggaacaaagccattaccacctctctctagcctttgtgtcccgtctgtaagaggatggtctgaaaggtctttagaaccttaaggggaaaaatgtggtcatgtccccctttctcctctaattccaaagaacttcgctctcctccagcatcccccacctctaattctaaagaactttgcttcatataagctccactcctccaggaaggctcctcggagcagcctgggaggccttcctgggagggatgcaggaaaacaggctcaggaggcagcggggagcagcctgcaggtttgcttcactccctaggacccacacatgctcccctcagctgtctgggcatgtagagtgggtgcgtatctgcggtccaggcatttttgagagggctcagatccttggcatcagctgccctttcaacatcctccttccaaccacttcagactcagtaaggcctttggaaaaaataccaaaaaaaaagcaattaaaagtgaatattcaaatccaattatcccagagctcagtggagatggggaggtgagtgcctgctggtagacaggggctgaagattccaggaggagggccaggggatgagaaggcaagagagtgaggacagcaaggacctcccaggggacatacccatcatcaggacacacccgtcatcatccccaaacaggaattctttccatggcccctgtgaaaggtgagtggcttgccaggctcagctgctacctgaaaaaggattgggggaaggcccaggcccagtgctctctctggtatctgagctctgcttgcccacctttgtgcctggtgtctggtggtgagcccatctccacaattagggcggagaggccccagggttggctgggccctgctctcaggagctcccagcaggatggggacttgagacccaggtgtatggacgagggaagagcactggaatgggattcagacaggtctggattctagctcagccccctccctgtctctctgctttcctacctgaggcccggtctattggcttaatggggtaacaggggccaagtgcttggcacagtgcccagcacacagtaggagctcagtgattgctacttgcactcccaagtcccaaccaatgattagccttgagtgaccttgagaaaacgacttctcttctggccttttttctgtgaaatgggtggggttgggtacagggtccttccgatggtgacctttgtggctctggtccccccaggagggagagggactgacctacaggctgccgtggagcctgaggctctagcagtgcccgaggaggtgggggtgtggggagggtgctactccaggaaaccctggactgtgggcaaacagcagcaggtgtggcgtggaggctggatcatagagacagataaggaggcccgaggcaatgggcagggaatgggatcagggcagtgtggggagagacagggtggaaaagggtcaaggcgggagtgaggaggcccccgccagctcccagccccacctgtccctgttcctgccgctgtttgggctctcagatgcccagctgcatccccccagtgtgtttggctttcctgtcttcttgtgcttgtaagggctgcttgctcccttgcaaagaccgtccctgctccactttcatctcagccaatcccattgtaattatctttcatggcctgaccagaagctgtcttggggaagcctgctccacagttccctgacactgagaaggaaccaagtttcagaaaaggggtctgggccatattggcctcccttagggttcttccacaggaagaaccttgggctgggagtcagagacctgggatccaggacaacatggctgcaatcacaatccgatgccctcttcctgggcctccatatgcccttctgtaaaatgatacgctgaacattctgatattgagggctggtgaggctctgaattgtaagggctgcaaacgaccttggggctggagaggagagaatcctggaaggctgcctgggccagggtcttcctgaaaggaggcttcacttccctcttgttggtgccccacctccatctcccagactgtttcaggccccagctctgccgccttcctcttcttgtgtctcctgctatcttaaagcctctgattacctgatgctgagtgcagcaaaaatctcaggcctttcagctgcaactgaagcacccaccgcccacctcggcccaggctggctgtctccctctgctaccattttggggtccccagggcccatccctaagaaatttcttcccctaagctgaccaggtcttctttcattgcagaatctgaccatccctaggggttgtctcagaggacaccgggaacggtctgctcccatctcgggatcctcacatgctgggggaaggagggcaagaagagggtccaggtcctgggggctcagtgagagtggggggcttagtgaggggatgggggcccagtgacagtgggcagcctcagtgaggtgatgggggcccagtgaggatatgagggctcagtgagagtggggtggcccagtgaggggattggggcacagtgagagtgaggggctctgtgagggggtagggacttaagtgaggggatggaggctgagtgagtgtgtgggggctcattgagagggtgggggctaagtggggaatgggggctcagtgaggggatggaggctcagtgagaggatgagggctcagtgaggggatgggggctcggtgaggggatgggggttcaatgaggggatgggggctgagtgaggggatgggggctgagtgaggggatgggggctgagtgagaggatgggggctgagtgaggggatggggctcaatgagaggatgagggctaggtgagaggatgagggttcagtgaggggatggggctcagtgaggggataggggctcagtgagaggttgggggctcagagaggggatggggactcagtgggggatgagggctcaataaggggatgggggctgagtgagaggatgggggctgagtgaggggatgggggctgagtgagaagatgggggctgagtgagaggatgggggctgagtgaggggatgggggctcagtgggggatgagggttcagtgagaggatgggggctcagcgaggggatgggggctcagtgaggggatgggggctcagtgagaagttgggggctcagtgaggggatgggggctcagtgagaggaagagggctaagtaagaggatgagggctcaatgaggggatgggggctgagtgaggggatggggctcagtgagaggatgagggctaggtgagaggatgagggtttggtgatgggatgggggttagtgaggggataggggttcagtgagaggatgggggctcagtgaggtgatgggggctcagtgggggattagggctcagtgagaggatgggggctcagtgagaggatgagggttagtgaggggatggggctcagtgagaggatgggggcttagtgaaatgatgggagctcagtgagaggatgggggctcagtgaggggatgaggccgagtgagaggttgcggctcagtgaggggatggggacttagtgagaggataggggctcagtgagggaatgggggctcagtgagaaggtgggggctcagtgcgggattgggtctcagtgagaaggtgggggctcagtgagagggtgagggcttagtgagggtattcgggctcagtgaggggatgggggctcagtgagaggatgggggcttggtgaggagatgggggctcagtgggggatgggggctgagtgaggggatgggggctcagtgagaggatgagacctcggtgaggggatgggggctcagtgggggatgagggctaagtggtagatgggggctgagtggggggatgggggctcagtgacagggtggggctcagtgagaggatgggggctcagtgaggtgatggggctcagtgagagggtgagggcttagtgaggggattgggtctcagtgaggggatgggggctcagtgggggatgggggctcagtggtagataggggctgagtggggggatgggggctcagtgagagggtgagggcctggcgaagggattggggctcagtgagggggtggggagtcagcgggggataggagctcagtgggggatggagggtcagtgggggatgggggctgagtggtagatgggggctgagtggggggatggaggctcagtgagaggatgggggctcagtgaggggatggggctcagtgaaagggtgagggcttagtgaggggattggggctcagtggtagatgggggctgagtggggggatgggggctcagtgagggggtggagacttagtgagagtcggggggctcagtgagggtgggggttccctggggggatggggttccgtgggaggatgggctcagcaacaggcttggctgcttaatgatgcctgggacctagtgggtgttggaggggggcttctccaaagtagagaacgcgagaaggacacacacaggggctcagagaagtgcaggggacccagctctttccaggctgttggccctaccagcagagaacctttccctcgattctttttccattaaacaaatagttgttaaagggacggaactgccataaagtccacgcctgttcctctctccactctgtgcccatctgtccttatcttcagtggggcaggccatgaccacccaggcacccagtgctgtcattagccttcgcctgggcagctggccctgggttgtggagttccccacaacccccagcatgagcctggaaggcagggtgggggtggggtagtagtaagggaggaactggagaggagcagggagcggctctgagttgagcaaggagctatcgggggtctgagcagtggacgaagctcccgctcccatgtgggtgggggagactcagccttggcacattccccctcgcagtctgtgggcatctttggagacttcaggaggacagcagttctgggagggctatggcagaggaaaggggctcccatgggggtaggttgaggtgagtgtgggctatggggtcccgcaaagccgggggagggcaggctgcagagcaaggtgccgaggctgcctaagaattgagggtccttggaagccccagtgcttgggggcatctcggcttatcaagattggtctatcccagctcagcctctgtcttgtccagggccactaagatgataggaccctcactgagaccaggtttccagtgtcacagtctccttatgtggagagttttacccaggcagcatgatcgttctgaaatcatacctgaccattaccgtccctgctcaaatccctcccagggcaccccctgccctcaggctcaagcccagctccatagggccctggcccctgtctagccttgctctcggctgtccagtcacaccaacctccttgtggccatacctttcagcaggcacacaatcttctcgcctccaagccttcacaattgcaattccctggacatcctttcctgtctgcctcgataacctctgcctgtcctttaggactcaactcaggtgtctccctctacaggaagccttctctgactccatcacaccctgcacctgagtgggctggggcctgctcttcctgcctttggcagagctctcatctcccgactgaagcgtgggtctgtacgttgatctctgcgtgttcttggcctcctcaagtgaggcatatgtctgacccctctgctcatctcagccctcagcactgaacctgacccagaaggacccagtgaaatgagagactttaagtagaatgctccccgaggtttttcatctagaacacttattcttgctctgccatggagaatggattgaagagacccagctaggaggctagaggcttggggagaggctgcttcagggttcagggaaaaggtgtctccatgtgagctgggcagtggcttgggcatagagagcagaggacagttgtgagagacaactgggaggtgactcactgatcggatgggggaggtgaggaaagaaggcaggtttttggacaagccgtgaaggacctggtggatggttgtgctgctttgttgtgaggtggagggagtggagataataattcagatggtatgggggtccctgggccacctcagggacgtggtggggaggctccaggtggcctttgggtatctggggtctggagctcatgagtgagggctggagagtcatgaggccgtgagcacagaggaggggttttgtgcaaaagagaagaaaggctgaggacagattccttcatcagggtcctgggaaagagaggccaagcagctccagtccaggggtgggaggggaaatagttgggagtcggcaggatgaggctgcagtgcgcactgaccagcaacgcaaggaccagtgccaccttgtggcctccggttaaccagattgtctgaggccaaggagctgggcagggtttggccaggggtcaccccctgcctccgtgaagcctcagccttcatcagtttaatcatcaggaaacgtggctcccgttgccctcctgccaccctacgtccctctccttcccggggtgactggcaatgtggacagccgggaactggagcccagcacttcaggaaccttaaaggtcctgggtgtaggggctggaaggtgggagacaccaccggttcctgtagatcctggattacttaaagtggccaggaaggaatgggtttggttcagaatgctgcgtgagcttgaacgagatgctcaacctctttggtcctcgatttgtctagagtctctgacctagtgatctcgtgacttgcaggccaccccctccttttcctcatgtgacctttgctgggcttcccttagtgaccctgtatgcacacagttccccaagtttctcttctgtccaggccaggcagttcctacaagcacaattaagtggaggcagcatgagggatgaagaacccaggacaattaatcatcaaggagtgacatttggtgcaaactcaggtgcttaattaagcgggatgagccagaggctggggggtagaggaggtgggttgtgtggtgggacagagagaaactcattcttcccataccaacctcccctgccttggttcccaccacccctctgccactgtcataccctgccactcacacctgccccctgttcaaagctcacacctccacaggtatttgggaaggttccagcatagtggttagacctagccctggtgccacctacctgggttcaaatcctggctctaccgcttattcactgtgtaaccctgggcaagtgaattagcctcttggtgccatagcttctccatctgaaaatgaagatatctaattcatagaattgctgggaattctgagttcatctatgtgagttgcttgggctgtgcacgggacataggaaatggccaataaactttagttatgatgattacctcctgtgcttagcactaaaagctgatcaacaattgttttctgaggatggtgacagggagggttcttctctctccaccctagttctccttgggaagatcagagaggtcaggtcatgtgcctaaggtcagattgtagcaggcagcctagctttgagcccctgcattcacttcctctgctctcccactgcctggaagatctgcactgggccccacccgagcctttaccagcaaggggcaccagaggccaaactgtggctgcctgtttctccacatagggtccagggtcccctacttttttacttgtgctgtcatcgtgtccaacctgaggcaggtcagcttgcccagatccttgcacatgtgcagggtccaaactgtcctgtgttcccaggccaggcctcgttcctccctgagtcgggggctctcaaggtggcatcatgtcctcttttcagggaggctatcatctcccagaagcggctgggctgcaatgggctgggcttctcagacctgccagggaagcccttggccaggctggtggctccactggctcctgatacccaaggtaagggctaggggctgggcaggggcaggggcagggagggactgtggcccctgcactccaggtcatgtgtgtcttctattcctcttcatctctgtctccttctttctcttgctctgtgtctctagcagtccctccatctaattctctctctattgtactactaaattctctgagcctcaacttcctgactataaaatgggacaatagtatttaccttgagggggtgtttcaaggaggtgcaagtgagatcatgcatgttaggggcctggcacaagcgagggctcagtggcccgtggctgtggttgtgatgtgcctgtgcctgatgctggatggggctgtagttgctctcacattctctctgtcactgtcattggccctatttctctttttcttctcctccatgcctcctgtccgccatgtccctctctgcctcgtgtctcagtctctctaggtctctgtcctctgtctcgatgtggaaagtgcacaagactgggagtcaggagacctgacttgctgtgtgatcttgggcaagtcacttcccctttctagacctcagtttcccaatctgtaaaatagaggtgctcagcctcacctgccttcctccctgcaaccctgggaggatcacaagaaggttgtgagtgaaggggtttccttccatgcagaggctgttgctgtggttgtttttgttgctgcctcaggacccgcctctgtgtttctgtgggttttggggtctctgtgtgtctctgtcctggcctctctttgtctgcatctttgtctcccccacctgggtcccggctcggtatctctgagcctcgccagccctgcaggagcacctcattgccctctccccctcagtgctggtcatgccgctagcggacaaggaggctggggccgtggcagctgtcatcttggtaagagcctgcctaggcggtgggatgtagggagaggagaccatgggagggagtggtggatggagcctgtccagtnnnnnnnnnnnnnnnnnnnnnnnnnnnnnnnnnnnnnnnnnnnnnnnnnnnnnnnnnnnnnnnnnnnnnnnnnnnnnnnnnnnnnnnnnnnnnnnnnnnnnnnnnnnnnnnnnnnnnnnnnnnnnnnnnnnnnnnnnnnnnnnnnnnnnnnnnnnnnnnnnnnnnnnnnnnnnnnnnnnnnnnnnnnnnnnnnnnnnnnnnnnnnnnnnnnnnnnnnnnnnnnnnnnnnnnnnnnnnnnnnnnnnnnnnnnnnnnnnnnnnnnnnnnnnnnnnnnnnnnnnnnnnnnnnnnnnnnnnnnnnnnnnnnnnnnnnnnnnnnnnnnnnnnnnnnnnnnnnnnnnnnnnnnnnnnnnnnnnnnnnnnnnnnnnnnnnnnnnnnnnnnnnnnnnnnnnnnnnnnnnnnnnnnnnnnnnnnnnnnnnnnnnnnnnnnnnnnnnnnnnnnnnnnnnnnnnnnnnnnnnnnnnnnnnnnnnnnnnnnnnnnnnnnnnnnnnnnnnnnnnnnnnnnnnnnnnnnnnnnnnnnnnnnnnnnnnnnnnnnnnnnnnnnnnnnnnnnnnnnnnnnnnnnnnnnnnnnnnnnnnnnnnnnnnnnnnnnnnnnnnnnnnnnnnnnnnnnnnnnnnnnnnnnnnnnnnnnnnnnnnnnnnnnnnnnnnnnnnnnnnnnnnnnnnnnnnnnnnnnnnnnnnnnnnnnncatctcccacaccccagccttctgccccacctcgaataggtaggatgaagccattggcccagtcagcagctttctgaggggtgtgcaagcccctgctggactctcagcccccataaggttagaaggcccagcctttggcgtacgcagcactaaccttggtttctctttgggatcctccagatggggtggggataatgtccaggagggcatgaaccaagtgaggtgtgaagagagatgctgcggagggacagatggacataagggcctgaccaatagagatagtgtggaaaactagccagagatttggagtggctggagctgggggccttgaggagagaaaggccatggtcaggccagccagacccagggctgaggctgggcggaagacaggcagctaggggggctttctggagtggctgaggaaggagtgttagtgggaagtggtggatgctctgccagagccccagaacccagacaagcctccctctgcagcccctcgaggagttcccagggtttctgctccgtggaggggattgtggaagtgcagagcctgtggggacgggattctgccgctctttccgtttcttctcctgtatggaggtgggggttcaaactcgttctatcctagtaaccaaaggatgagttccccaaattgctattattgggggtctgcttctgtcgagggggctgccattccagtaaagggcaggcttgggggcatggacagataaatgagcaggtgttggttccccggggactcctctccagctcattaaaatggaattaaacgcttcccaggcgcctgacctttctgagctgctggcaggagagggcagtgggagtcagggatggctgagaggggaggagaggggggaggggaggaggggtacttggctgggtctcctctgcacccatcttcctgactgagggagccaaggccgctgcttggtttctccgcaagctgctccccccacccccggtttctggaacggagctgctgttgcacggagttctcagggggtcgcctccccctattctttgctcttggtctgccccagggctggtcagctttgaggggcactgaggtgaggggctgtgtgcagaggtggggattgggaggtggtggctgggtcacgcacctccttctctgctgagggcaaagggcctggggtgccaggtgcctgagaaggacttccttagattgaggctatgaggactgggtcaggagggaagtaaggggaagacatttggaaggttgcttcccttgtgggcggaatgcttgccatggccgctgctcaccttggctcaggctgggccagaggccaatgtgtgtgtgtgtgtgtgtgtgtgtgtgtctcagggacgctggtgggatcagatcacttacacttaactcacccagtagaactctggtctggtcctgcggcaggctgggtgctggagccgactctgccttcagggagctctcagtctgggggaaggcagggacaccctccccaccacaggccagatgaaatactgttgccagcaggtgttctggtggcaaagcctggagcagcaagtggtacctcatcacagagaaagcatttgtgtggggccttggggcacaggtaggaggtccacaggcagggaagaagggaaaggggattctaggcagaggaggaatgtgagcaaggcaggaaggaggccgggggaaggggtggtgtgctgaggggagagtgtggtcctggggaagctgaagtaggggtgcatgctgttgagcaggatgctagccagctgggctctggctgccaggagttttcaacaaccgtcccttcacctcctcaaataccctgggcagggaagaactcttgaaaggtgtttagattattcacatctgcctctcctctaagcctgcaccttcccactcatgtgtaaatgcacttccctaggatgccccctccccaaggcatacatgtctgacagatgcaccctggctcacaggatctcactgcctcccagaggtagcacaggcagccccagacttcccagctgctgccagatcctgagggcagagggtgcagaaggaagatggagagccacagggtcggttgatcttttgggaaggccgagtcaccagctccttcctggacaagccccattcccctctctcagtctctgctcttagtattcatccactgatccacctacccatccaccccctcatccatcagttgaacaactatttcttgagtacccactgtatgtcaggcatggagtgctaggtgctgggaacacagaagtgaccaagacagattagacaggccctgccttcacagaccatatggtctggagggttggtggtgagaagcactaaagtgagcataaccccagctacttgggagtattccttgagctcaggagtttgaatctggcctggagaatagagtgcgactccatctctaaagacaataaaaataacaaaaatactgcaaaacaagtgagcaaaataaggataggatcacacgtgatggcaagtgctagcaaggaaacccctcgagggagtcctgcaaaggaatgctggggtccagtggcgacgccatcagcgagggctctctgaggaatatgctggccaggtgcagggctgtgtggctgacttctgggcctttacagctcactgctcaaagcaccttgattgcaaattttttgtgtggaaagtctttggctctgttccttaatcctgggataataagtccctttgaggagtggcagcccttggtctctggcatttgatgcctgatttgtgcccactcttcccccagctgcaccagccacaccagctccctgcacggggatggggtgttcatgccattaaccattttgaacttggttagggtggggacctgggggctgtgctgggttttaaccctctcttacagccacagtgcccaatgttgagtgttcccactgggtcccagacacttgccctgattagcaagagcaggtgtaagtgtgtgttcctgttggcgaacaaaaagccatgagtgtgtgggggtgattgtgtgtgtttgtgtatgggggcgccaggtgcatgtgcatggcttttgggtaagtgaactatttcctgtgtacaggcatgaatgtgcctgtggggatgctgtggacactgtaagggtgggtgtgtggatgtctttgtgtctgtgactgcaccgtgtgtgtgtgtgtgtgtgtgtgtgtaccacctccatgggagattgagtgtaagtgcatgtgtgtgagggcctgacgttcttcatgagagtgtaggtgtgtgtgtttgtgcacatgctgggtgcaagtaggccaaggcagcccgagaactggttgcccccacagccttagaggggtcccagccttctctattcttgagagatgggaccaggtggaaggaacaagaaccacgtcctcctccatgtgctaacagtaaaatgccaacatatttatataagccatatgcaaatgaaccatagccccagcttctcctccctcccgcccccgctgtcctgtaggagtcacagattgagcctcatccagagcttaagtttaaacaccatccttgacagcccaggtctcttccaggtcttcctgcctccaatctccctccctcaaattcaccctacaccccacagacagtggccctcagatgctaaagtctgccatggctccccagtactctcaggctaaagtctaacttcttagcctggcactcaaggcccttccttctgtggtaccatggaccacacccctacctggatcctcatctccccgcaccacctaccgccagtgtcctggtctcttcaaggtctacttgtcctccccatgccaattcaggaagccttccaaatgtcctcccctctgagctacccacctagttttctctctccttcctcaggtatgaggctccacacctcctcccagtcatgtctccccactcgtcccaccccagacagactgtgagcttcccgagaacctgctggtctcctcctccccatctgctcctggcaggagacccagagctgaggcaggcattggctgctgactggggagggaggaggaaggaggagcccccagtgcaggcgctgtggggagctctgcaggtggtgagcagctttgagtaagctccggaagctagtgacgcaggtggggagccttgctggcagggcctgtagtgggtccctaggctgccaccctccctccccaccgtctctcattttcctcgacaagcacccaagtaggagtgggggaagggacttcacagagtatgaaagatgggctgagttccctggtgactggcacagggagcttggagagggacaggatgatgggggtggtggagagagtggatctagaggggggaaggtgtgggcagagaacgggagggagtgggtggtgctgtcttcactctgccactttctgctatgtgattttgggcaagtcactccacttttctggccatggcttgcctgccaggtggaggcttgcatcacagtggtgagaatcacatgtaaggcaaagcacttcacgaacccatttatccatttattcattcacccgtccatcctcaccatggcaggtgcatcatactgagcccattcctttatccaagacttaggggcagctcaaaccctaactcagacaggatagagccgggaggctgaggctaataccaccaattctaaaatcaggacctgcagcgctccataatctgtgagctaaaaaggggtctaaggtccctccatcccctgaaccatacacccggactgtgctcttgatgagacagtgattgaaaaggcagagacaaaaaagtttcacgtccttaggttagtcctaggagacttcctacaggagggattttcctggagctgtctgagtggtcagaaagatggggttatcactgaggcccacagactggagtgtgtatgtgttggtggggaccagtgtgtgctgcgcatggggagggcactctggcagagacagacactgagagaggtcacagctagttcccttctcccatccctccaggtgcactgtggccagctgagtgataatgaggaatggagcctgcaggcggtggagaagcatgtgagtgggagtggggccatgtgcaatgaggctgaagacccttatcacagctggtgggaagatggcctggccagggagctggacagacctgggtttcagcttcggctttgctgcttttgagctgtgtgaccttgagcaagtcactaaacgtctctgggcctcagtttcacacctgaaaatggggataatgatagcaccgactgacctagggcagtggtgaaacaaaactggtcaaatatcttgtaaatacacacggttgccaacttacaattttcgactttttgatggatttatggggaagcaaccctatcctaagtccaggagcatctgtacttagaaagaaccctccacataatgatactgaggctctttcatgcctgagactttatgattttgtgactttaacaaggacttacgacttcctgagggggctggagacagaaatctgacatcttgtcttggaagaatctaggggctagggatggagatagaccctgtaccctcctgttcctggaccgccggacgctccaggggctgtgggagcccccgggggagccctcaggaaggtagagtccagggatgaggtgtttgggacggcggcggggtccctgggcccggcaggcagagggaacggcgggagcaaaggcaggaatcccgctgcagcaagcgcagcgagcttggggcgagcggcgcgctaaccgctcggcctgccccagaccctggtcgccctgcggagggtgcaggtcctgcagcagcgcgggcccagggaggctccccgagccgtccagaaccccccggaggggacggcggaagaccagaagggcggggcggcgtacaccgaccgcgaccgcaagatcctccaactgtgcggtgagggcccggcctggacaggtcacgagggcggggccgggcagaacttggaggggaggtgggcgggttaggcgatcccgggagccggcggcgggcccggcgcggagctgagcggcgcctgagggacccggacacggaggtgcggaggggccctctctctgaccggcgcctggcccttgcaggggaactctacgacctggatgcctcttccctgcagctcaaagtgctccaatacgtgagtccctgcgcccctgccggccacctccccgtcctgtctccctccggggaccaacttccccttgagccctccatctcagttccaattacgatgtccttccttcctctctcctccacccgcctgaagagccccggagaggggagcaggtggggagtggggtgacccggatccgcggtcaccccctcgccctgcctgtccctctctcagctgcagcaggagacccgggcatcccgctgctgcctcctgctggtgtcggaggacaatctccagctttcttgcaaggtgagggcccaggtccactgtagagcgggggcggggctgggcgaggaactcgggtctccgagggggaaatccattgcctttcctttaaccagccccctgcactccgttcctcaggtcatcggagacaaagtgctcggggaagaggtcagctttcccgtgagtcccgcgtctgtcttctcgttggagtctgcaggggcggttgaggccgggtagacactcctgggatctgcctggagtatttggatcttctagactcttggaatccgatggaattatctggatcttgggactacttagaaatgctgcagggatcacaacctgtgatcagcaggctctattaggaagaatctcttagcatctacagaaaggcttacctgggacctgttcacttctgttggagtatttctggatatggatctgctagaatctgttgacgagaatccttggagtctgcttatctctctcgtagttagggaagactctagagtcctttatagcgaattctgccagactcccctccatctctgctcatcaatgctgaccctgtccaccatttggactgactgaagggttctttgaaacttccagatttgagggtggggacaggttgagatcccctgacctggggagtactgggccctgactcagtctctcctcaccccctagttgacaggatgcctgggccaggtggtggaagacaagaagtccatccagctgaaggacctcacctccgtaagtcatggcctggctgacccagaggggaaagaggagaccccactgccagcccctagagccagggtctctgttacagagcagcctaggaatggggcagataagacctggggactttctactgtcccatctccatgacacagagcttccagccttgcatgagtcccttagaactgcctgttgcaaaatgtgatggagggctggaggagggaagcatactgcgccctgcttccctgccctgacttgcctcgcctttgcaggaggatgtacaacagctgcagagcatgttgggctgtgagctgcaggccatgctctgtgtccctgtcatcagccgggccactgaccaggtggtggccttggcctgcgccttcaacaagctagaaggagacttgtgagtctttgtgggatgatgcagatcaggagatgtcactgagaggctggctagggctccacgagggtaacaatgtgggatgggtactgggcaggggctactgtctcagcagcagtgggttgaacagtgtgttagtgcaagagaatgaaagtcatgttgaggtccaagctagttcctcttctcttctcctgcttcctgaagtttgggtaatctgctcttggggtattgggttccctcccttgccatccctgtttttgcattactgctataaactgctagatggaggggtgggtgtgctctgggttggatgaaccctctgggacccacaaagcatcatcaacacagtggacagtggctaaagggaatatgcttggggactgggaaaagctgtggatcttttgagcccctgacagggcagctataaaaatgatacacaaaaatctctttttttgtgggcagggcacagtggacaggaaagcaggcttggaggcttagttggaaaggatatctcgagaactgaggacaaacctggggtctagaaatggtgtcataaataaatttcatatcctacaccaactcataaacaggcagtaggtgcctgaattttattgcaaatggatcttagttcagggagaaacagtgctgcgtctgatgagccatttctgtcctgggtgcaggttcacacttgggctggcaggatgagcagtttgtgctgtgtcacataggtggggagaagtagacagatgaggggctgagtcctgatgcaaagagatgctgataggatgctggtctctggagtccaagcaaacaggctgggtttcagggcctggagctcctgcaggaggtggacactagagagcctgggactaggtaggtgtcagagcccgggcctgaggtctgctggggtagggtggagatccaggagtcctaggtctgagctgcagaacctaccagcatggaactgtgttgacagttgggtgggcctggagaaacaaagataggggcaaggcagaatcagctgaggcagggagaatgtgggattggtggcatttggaacttgtgggcatcctaatggtgggagaatttatgccattcagcaaacaaatattgagcacttaatgttgccatcccagtgctgaccagatggccttgggaaggcctttggggaagggaaggtagagtgaatgggggtccagcaggggccatgacttcttgctgctggctgtgagattgggttctaggatggccccagagctggagaagaggtggtatcagcaggaaataaggatggggccttggtggcagctttgaggcccagggcaggggcagggctatctctgggtcccacgcatttcagggagtgagtgttgaatgactgcatgagccagggtggggctcagctcagtgcagtgactacagagaagcttcctgaaacacagctaagtagccagagaacaggggctccagaagcccttcagctgtgagtgggatggggctggtggcaaggccagggataggatacactgacgacattagcaaagacctccgaagtgtttcctctgtaccaggctctgcactgggcatgggtgatatagtcatggccccatttcataagactcaaagctcattttcagggcatagagggaagagagtgagaagggtattctaggccgagggaacagtgtagaaaaaaaagcatgaaggtgtgaaagagcccaaggttttctcagaatgatgaggatctttgtgtggctgaagctgagagatgttctgggttgaggggtgacaggtgggtggggctagctgagggaccacaaatgtaagaaaggtgtgcagacagacccaggatggtggggatgggatctagatccgaatcactggatggcaagcatgaatgggggatgccccaccagggtggagcaccaaggccagccaaaaagtggggaagggcttaggcagggacacctcagggcagcgtgatgtgggctaaggcaggctcttcccatgacccacaccattggtccacccagccccatgcagctccccagtgacaaatcatttggtggccagattgaatgacgtgagcaggatttggggcttatcttgtctcaccagagctagctccatgagcagggcaagcagtcctctccacaccaccaccctaagatttctggaggcaccgaatcagggccagcggagtccagggagagtggggtagtgacaggagctgcacaagatagggcagtgccaccgcccctccccaaggctggaggtgtgcctggggaagagcagaacaccagcttgagcccaggcaatctctagtctgagggaggagacccagctttgggctgggtaaatcccaaatcagagacgggaggtatggctctggtttcaagcatctaaggaggactggagccctccccttgggcagcccccagtctgcagggtcatgggggtgggaagctgttccaagggcctgtgcagtggttatatagttggcaggtgggtacccctgtgggcttctgatggaacagaagtaaggagagtggggagagaagccagtcttcccttccctcctgagtgagcccaccccctcctccaggttcaccgacgaggacgagcatgtgatccagcactgcttccactacaccagcaccgtgctcaccagcaccctggccttccagaaggaacagaaactcaagtgtgagtgccaggtgagtgacctgccttcagcctctctcgggcaccgactcgctcagttttcagccccgagagccattcagaagggaaatgcccatgtctttctggactggtggcagcccttccccaggtggctccataacctcataacttgaaggcttgcagttgttcaggacccgcgccactgcccgcaggcactgtatgtgatcgccctctagtgttcaatatgtgcactacagcaacacctaggcagctagagctggcgtgaaggcggctgagacactcaggagactcctcacctgcaccggggctattccctcactccttcacttagtagccaaatgatataattagacactgacagtttctggcttgtccagtgagccctagggaaggaaggagaagacccgggtgctgttggaggcagaaggttggatagggtgacccctacaccccgacccccctatgatctccatttccttcattccaggctcttctccaagtggcaaagaacctcttcacccacctgggtgagtgcactgttctctctgcctggctgtgtgtgggcatgggggctggcatttgcagaggagaggcgggaggtcttggcagcctggtctcaccctgcctggtcttctcccttccccagatgacgtctctgtcctgctccaggagatcatcacggaggccagaaacctcagcaacgcagagatgtgagtgactctacccaggggacagggcgagagaggctgtggccttcagtccccatcatctcctttcctgccccacccacttccctttctctgccttctgcgggacttcatcaccttttgagggatcctttatttcatgcctgtctccctcgctagactgtaggctccaatacagcagggacagggctggctttggatcctcagctcctatcacagtgcctggcacatagtaggtgcttccaaaaaaaaaaaaaacaaaacacttgaatggacacgtttctggagccagccagccctgagcagagtgtcttaccttggagcactcctcccaggcctcggaaatccggcctttgcctccttatgggacgtgagggcgatcagagggggttgtcaggccccagaggaccaaacccctccctccacagctgctctgtgttcctgctggatcagaatgagctggtggccaaggtgttcgacgggggcgtggtggatgatgaggtgagagggcgtggagggagtatgtggccctaggggtgtccgggagtccgccggcggcgctggggagcggcccgaggtttaacagtcccctctgtggccgggtcactaacttcttcctctcgactccatctctgctccggcagagctatgagatccgcatcccggccgatcagggcatcgcgggacacgtggcgaccacgggccagatcctgaacatccctgacgcatatgcccatccgcttttctaccgcggcgtggacgacagcaccggcttccgcacgcgcaacatcctctgcttccccatcaagaacgagaaccagggtgcgcgtggcggcccgggcggaggggcggggcctgcgccgggcggggcgggtccgagcgagcgggggtggcaacacttccccaccgcctccggcgtcccggagcataagggagtcgggttccatgcctgggacgtacgtaacctgcggaaactgcgagggcaggtcccggccggatccctccctccaaccgatccctccctccaccggtggttccttgcccctctcccttccccagaggtcatcggtgtggccgagctggtgaacaagatcaatgggccatggttcagcaagttcgacgaggacctggcgacggccttctccatctactgcggcatcagcatcgcccatgtgagggcggggttgggagtggggtgtggggtgatagggggcggggcccacgaaggaccctcggttctcctcctccgactgactctccttgtggattgatcccttggtctggcactcagagtcccgccgctggggtgcagccttcaggacacgctggccacctctgggctcagtttcccatctaaaaattgggcatacgatttcctgccctgtccactcagcctcctgggaccatgagaaactcccgttgtcaaaacctcctctcttccctggaagcagtctcaacccaagccgagtgcttttttggaagtgctgggtctcggtgtccaggcctactggcgctctggcctgggaatccagccccaaggtccctgacatgatcccctccttgcttctccttccctgccatgggccttgggctccatcactgaagcctggatcaggtgtgggggagtgcaaagggccagaccaaatgctgggagaacttgatgaggaggaaccggcgcgggggtctggatgaaagtgggggtgaggtctttactgtggactggagcttgaaggttttgactggggccagaatgggacaggaagtggggtgtctttttgaccccttcatcccagtcctgggcattgctaaattttcacagccaccttccttgagccccatctttccctctttcccctagtctctcctatacaaaaaagtgaatgaggctcagtatcgcagccacctggccaatgagatgatgatgtaccacatgaaggtgaggcttgcagagacctctggtcctcctcccagattccccggggacccagggccaggcagggcttcctgatcaatctctactgaggatgagaggataggcccagagccacagcaggcctcctgccctccttaggggcagctcccacccctgcttagagacctctcctccaagctgcttctgagctcagtcccaaggctggaagtagccagaggaaccagcccagggagtaattggttcagccaggtattccccatgttcagggaataattcccatcttgggaattactgagggctaggaagctcacccaggacccgtccccatggcttccctaggtacaatgcccatgcagccctgggcagtcttaattgctgataatctatcccattccctaccctgggtcacaaaagctggcttagttccatgtatatggtagtcgctgttcatttggacatttcctctcacctgtgtccaaaccagagaggcccagaccttgtgagttggatcaaaactgtagtaggaagagttaaggttagagagtagaaaggtctccacaaaaggaggactgctacagttactgtgtatgaaatgctgccatggtttgggggtgtcatgaaggggtgttgtcgatctttgccaaggttatgctgttacagataaagggtggtcacctgcaggaaggcgcgcggggtgggctgcagggctgtgaggggagggtggtgatttcctgcccagttacagtccacagcgtggtggcccaactgtggtacattctgggtgacggatcccccacctgccatgggaatttgagggtgaagacaccagatggggtgaaggctgtcttctaatgctctggctggtctcctctaggtctccgacgatgagtataccaaacttctccatgatgggatccagcctgtggctgccattgactccaattttgcaagtttcacctatacccctcgttccctgcccgaggatgacacgtccatggtgagttgctctcctccacttgactggccaggccgaaggtatgtagccagaggcttaagttaaatgcgcatcaagaacttcctgggaagacagagtcatcaaggaaggctgtggagggtccctcagagatggaggggcttgtagtctgccatcaggaagccatggggcctgcccaggggctagaggctggactggatgatcccaagggctgctcttggaccaaccatgcccagggcatgtgacctcagggtttgcatccctcccaaccctgtttttctaacattttgtgtgggcttggtttcaagagttcttagttcttagatctctaaaaatgcatagctccgagaacggttgcttcaactattttgtggttctctagtttagatgtaagtttctaagactccagatcttgagtgtggagcttgaagaaggacccaggcaagggccctgtcttgatactggcagcccctctgatacctccctctgccctctccaggccatcctgagcatgctgcaggacatgaatttcatcaacaactacaaaattgactgcccgaccctggcccggttcgtgcgcccacagacagccccagtcttcgcctccctctttcctctactgtcacatccattgcccccggcattctggagaggatctctctaaggatgactggggagacccagtcttatgggggtggggaggatccatgaatgagaagcaattcctagacactgaactgtcaataaaggcaagaaatgaggcaaggcaaagcctggaggcaaggccgagagtgtgtagccagaggtttaagttagatgtgcataggaacttcctgctaagacagagtcatcaaggaaggctgtggagggtccctcagggatggaggggacatgtagtttgccatcatggggccgtgatggaggaggagaggctgaggcccctcttctgccctcttccctcccccaggttctgtttgatggtgaagaagggctaccgggatcccccctaccacaactggatgcacgccttttctgtctcccacttctgctacctgctctacaagaacctggagctcaccaactacctcgagtgagtggctgcatctcccccacatctggcagccactggggtccccttccctgggacagggaagcaccccctgtgtgtcaggcactttacacgcactgcctcatgggatcttcttagccccaggggactagaggggaaggctgtgagccccatcttccaggaggggcttgctcacagccaagcagctagtgaagactgagcctgatttaaacccgggtctgctggactccaaaccagtgcttctttccaggaagggaacccaggtgttccaacctcctgtcccagtggctcctgggcatgtcatctcctgtctgtcctcttggggatttagggagggaactgtgggctgacctcttttttttctcctttctgcctctcaaccagggacatcgagatctttgccttgtttatttcctgcatgtgtcatgacctggaccacagaggcacaaacaactctttccaggtggcctcggtgagaccctgccctgctcacagtggggaccctccatggggtgtcttggagtctcatcctctcccagcctgaagatgggtgggagcgagtgagaccaggagccaggtttagacacaggaggaggttcccccagggtttgcccctggctctgagatagggaggaggggagaaaggtggaagggcaggacactgctcagcctaaagcagtggcacttggatccggatgtgaggagtgaccacagttttcctgggcttttccagaaatctgtgctggctgcgctctacagctctgagggctccgtcatggaggtatcactcttctgtcccaccccgtccttcttcccctttaaggccagtgacttgcaaagttatgacccagctcctcctattcccaaaccatgctctccagacaggctgcgagagctgcagccacacctaggacatgtctggctcattttcctggagtgggcttggaagggtgcaggtgcggatgatagcaaggatttgtgttcagcgtgtttccctttggctgcctgggaacaccccattcagccccctcctgccaaacttgggatgggctccactcccatcacttagcgtcaccttagattgtttggtttgggtctgcctacctcctcgtgcacaaggtctgagccatttctgagttccctgcacttggcacagggcttggcacagagtaggagacacatttccaaggtcaccttgcctcatgctacttcccacaacacctctccagaggctgcccctgcttgcacacccccagagacgaggttctctgtctctctcccaggaggcctggtggcagtgctggttctgccctctgcccccctgagataagctgctccttttctgagtgacagcccttcagcatccggaaatgggggccttgcccttgcctcatcactgcctctccttgtcagcaaacaaatgtgttctgcatgatttggtgtctaggactccaaaggatcatttcaaaaatgttccagctttcagggaccccagagcttaccttgttgggtccctgcatgtgacagctgaggagtctgaggctcagagtggtctagggactcaccctgggtcacacagagggttgaaacagagctcagaaagggaactggggcccctgactccccctttctgactgctctgctgacctgggggctggagctggacgaggcccctgcttcctctcttggggtcaatggtaagggagcccatctgccccagctgggcccccatcactcctctccccccagaggcaccactttgctcaggccatcgccatcctcaacacccacggctgcaacatctttgatcatttctcccggaaggtgatggggttgggggtggggtggggattgagggggagctgggagctggctggaggtgggataaggagccaaggagtggaggctcactgggatgggcaaatgggtgggggtgtccagtaggagggcatgacacccctgccctcgcctcaggactatcagcgcatgctggatctgatgcgggacatcatcttggccacagacctggcccaccatctccgcatcttcaaggacctccagaagatggctgagggtgactgctgttagccccagtccttggggctggggaggaacaaccaggggaaggatttgccaggggagcattcccagggtgcagacccatcccctgcaacatcaacccttctctggctgcacggccccccccaggcagacccagcactggccccttggctcccatcaagggtgcccaattccctggaccgctctgggttgggccctgggagccttgtcctcagaagggcaaagaggctgggccccgctccttgaccccatcctcccctcaacagtgggctacgaccgaaacaacaagcagcaccacagacttctcctctgcctcctcatgacctcctgtgacctctctgaccagaccaagggctggaagactacgagaaagatcgcggtaggtgtagtcctccctgggaaggcacaggctgcccaccctgcccagctttgggtgccccctgtgcctgaataccctctctctgctcagctcagcctggctgtgttctggggagacagaaacctagaccatctcagggtgacaaatggagactcagagaggggaacagacctagcaagtcagtggctggtggaaggtgggccccaacccagccactccctgcctcaggccatcccactgccaagctggggctggtggggacggctcctgagctgggactgaatccctgggcctcagttttctctcctgggaacgggctgtcagaggagcttgggtggatgtatcctacatagaggatgtgatgagagtgttggcctttcaggagctgatctacaaagaattcttctcccagggagacctggtatgtgtggagtgaccccaggatgtccaggatgggggagggttcctggcctgggacagggagggcttgaactagcctgaccctggtacccgatggaggaatgagagggacaggcctgacgactcgatgcctgcaggagaaggccatgggcaacaggccgatggagatgatggaccgggagaaggcctatatccctgagctgcaaatcagcttcatggagcacattgcaatgcccatctacaagtgagtgagctcatggggacaagctgcaccctgcacagagagggtaggctggagtggggacatcacaggaaacacaggtgctgagattggcctggcccagctccaactgattcatccccttgcctctgggcataactgtctcccgctgtgcccctcagtgggtccttcacttcatccttggtcctcagtggaaagagaccatcatgctttcctaggtgtcctcctctgtctcacattcttgtggaagttcttgttttttttgagatggagtctcactctgttgcccaggctggagtgcaatggcacgatcttggctcactgcaacctccccctcctgggttcaagcgattctcctgcctcagcctcccaagtagctgggattacaggcatgcaccaccacgcccagctaattttgtatttttagtagagatggggcttcaccattttggtcaggctggtcttgaactcctgacttcaggtgatccacacacctcggcatctctgagtgttgggattacaggcgtgagctaccgtacctggcccttgtggaaattctatttgttgtgtagccctagtctttcttgctgcccatggtctgatttctggcctctcaccctctgcccccatgcacccgcaggctgttgcaggacctgttccccaaagcggcagagctgtacgagcgcgtggcctccaaccgtgagcactggaccaaggtgtcccacaagttcaccatccgcggcctcccaagtaacaactcgctggacttcctggatgaggagtacgaggtgcctgatctggatggcactagggcccccatcaatggctgctgcagccttgatgctgagtgatcccctccagggacacttccctgcccaggccacctcccacagccctccactggtctggccagatgcactgggaacagagccacgggtcctgggtcctagaccaggacttcctgtgtgaccctggacaagtactaccttcctgggcctcagctttctcgtctgtataatggaagcaagacttccaacctcacggagactttgtaatttgttctctgagagcacaggggtgaccaatgagcagtgggccctactctgcacctctgaccacaccttggcaagtctttcccaagccattctttgtctgagcagcttgatggtttctccttgccccatttctgccccaccagatctttgctcctttccctttgaggactcccaccctttggggtctccaggatcctcatggaaggggaaggtgagacatctgagtgagcagagtgtggcatcttggaaacagtccttagttctgtgggaggactagaaacagccgcggggcgaaggccccctgaggaccactactatactgatggtgggattgggacctgggggatacaggggccccaggaagaagctgccagaggggcagctcagtgctctgcagagaggggccctggggagaagcaggatgggattgatgggcaggagggatccccgcactgggagacaggcccaggtatgaatgagccagccatgcttcctcctgcctgtgtgacgctgggcgagtctcttcccctgtctgggccaaacagggagcgggtaagacaatccatgctctaagatccattttagatcaatgtctaaaatagctctatcgctctgcggagtcccagcagaggctatggaatgtttctgcaaccctaaggcacagagagcccaaccctgagtgtctcagaggccccctgagtgttccccttggcctgagccccttacccattcctgcagccagtgagagacctggcctcagccctggcagggctctctcttcaaggccatatccacctgtgccctggggcttgggagaccccatagggccgggactcttgggtcagcccggccactggcttctctctttttctccgtttcattctgtgtgcgttgtggggtgggggagggggtccacctgccttacctttctgagttgcctttagagagatgcgtttttctaggactctgtgcaactgtcgtatatggtcccgtgggctgaccgctttgtacatgagaataaatctatttctttctaccagtcctcccccatggggctgtttgcagactttgtgcttggggtgggtggagggggggaatagaactgggagaggcaaacgccctttggaactccatggcttccagggtcctccacccttggtgcctagccccccttctggggaagtcatagacctgttggggtactccctaggccagatcgtggaggctaaggggtgggtggcagatgagaaggcctggccatggagcagtgatgggacatgttggctggcagagattgtagaatagaggaaaaacaaaggttgaggcaagcaggcaggctgcctggaggaggtagcctggagcttgtcctagaccctcccagcgctggcctgccctggtcatgagtgcccatacggcgagggcctaggcctctgaactctgtttctagctgcagtgatgcctggctgtgtcccaggaagtcccacatcccagttactctgagtcctgccgaaggtgcacgcctgagtcagactccacaccagatccagccccgggttgtgtctgaggagttgcgtctgttcctctgcatgagagtgtttacttccgcccagtccaagatgggcagactgcaggttggggctacgcggaggctctgcctggcacagtctccagaccctgtccccgacttgcctacccccctctgagctcctctccgtgttcatctcttcctggtcagtaaaggttgatgtgttaagagggtgggcactggggtctcctttcttggtgggagcaggaaggagatggacagggccatcctgtgaccatcagccattgccagctttgcctttgggaccacagagcccatctgcttcctctgcagctccccctgccccactagcctgtctgggtttggaatctgctcctctggctgaatggtctccaggtttccagcttcccttagcgtcatggggctccaggctcctcccattcccagctcctgctgtgggctccccaagtccgtctctatcctctcacagcacaggacccaggcttggccagtgggtccccgggtgggggtgggagtggtcagtttgtggcccacggccaataagagatggctattctaatggtgcctggctgaccccagggtcactgtgggctgatgtagctgctcttctgcctgacccctgaccctgagtgtgtgtgcgtgttcctcttccacaactcttcaggcaaagagaaccttgaccctgcatctgtctgtccccagcccagccctcctttgaggctcatgctgtgacacatccctgtttttcaccaaatggagggaacaaccacagatatttccttgtgcacgcaggaccctgtgctagggctgagggctttgtctttgtcctgctctggaaagtctcacagtttgattggagagctagatctaaactcagatgcaggccatgacaacgctgtggggtgcccggccatggggctccaggcaggatcataaccctgagaacaacaatgaggtttgaaagatgagcagatgttgtttataggcaaaaggggacaggcactcctggtagaagaaactgcttttgcaaaggcctcgagaacagaagggactggcaggtggaggagccgagagatggaggaggaggcaaggccagatcctgaagggccttaaatgccaggttgtggagtttggctttattctgtgggcagtggagaaccagagaaaggttttcagtaggagagtgactcagaagtgcattttagaaagatccccctggagagcagggaagtgactgcaaggggagagggtgggcagggattattctatgggtgatgtgctgtgccctgggctgggcgaggagaggaattcaggagatgctaggttggcagaacatggtgaccagtgggtcgggggatgcagagggaggacttggaggggccctgggaggtggggtctatgccactccatgaagagctgtgggggctctgttcagcatcaccctcacccacaacaggtattgggtggagcctctggcaggggtgagctccctgcaaaggtgagcaaaacagctatctgaggatgcccagggaggagaggtgggaggaagggagagaggacagatgggaggaggctctgcacagagcctgaggacagccctcaccaggttacagaacacaaggcttgaccccattggcttcctgtagctgtcctgctctcccaacttaatggtttcattttgcattttatttaaatttcacaatgattctagcagataccattagtctattctgcagccaagttgtctaaggtttggagaggttaagtaatgcaccaaggttaggatttgagccctacctgtctgattcccctccgagagctgtctgattcctttctcctcctctgggataggggaaggagactcagaaggacggggtctccatcttcagtctttgcaagactattgtagggcattgggatggtgagcacaaagtgggttgaagccccagagaaagagctgagagctgggatcaactgtgtgtgtgcatgtgtgtgtctgtgtgtgtgtgagttggagtagggggcagggagaaaagagtggggtggtggtggcttgtagtgcagctcagggccaccaggtggtgtccggccctcgctgtcctcacctccccagaggtcagagaaggatatgggagggggtggggtggggtgagggggacgcggcggggacggcggggacggtggttggtagtctcactcctgtccattcacctacaggttgagtatcccttatccaaaatgcttggggccagaagtgtctcagatttaagatttttttcggattttggaatatttgcatatacataatgagatatcttgggaatgagaccccaggctaaacaggaaatccatttatgttttatatacacacagcctgaagcagttttatataatattttgaataattttatgcatgaaacaaagtttgtgcacattgaagcaagtgtggaattttccacttgtggcattatgtcggtgctaaaaaatgttttagattttggagcattttggatctcagaactttgcattaggaattgaggactaagtctgatattctgtcttacccagattcctacctaagaggtctaggaagtcatgccctacaaaccatacattctcatcagatgggttttatttgaccctatatgttgtgatttacttttcaatctgactctggcataacattatgagacaaggaaaaaaatatttaaccccaaaatatatttccgtgccataccttgaaattgccctgcaaagtctcttgtgggaaaaatccacattctatagagattccccttccgcctttgttttccttcctttctttccagatccaggagataatcaactaagtaagagccaggcacccttttaagtccgataagagacaatttacaacttgctctgtctgaagtctgctatctgagagcttcctctgcacaataaaacttggtctctataatcctttatctttaaactgaacattcctttctatggatcccaggtctttagacaaactcaaacaattgtcaaccagaaaatgtttaaatttacctatagcctggaagccccccgctttgagttgttctgcctttctgaaccaaatcaatgtatttcttatatgtatttgattgatgtctcataccttcctaaaatacataaaaccaagatgtatcccgaccaccttgggcacatgttctcaggacctcctgagggctgtgtcacaggccacggtcactcatatttggctcagaataaatctcttaaaatattttacaggctgggtgcagtggctcacgcttgtaatcccaacactttgggaggcggaggtgggtggatcacatgaggtcaggagttcaagaccagcctgaccaacatgacgaaaacccagtctctactaaaaaatacaaaaattagtcgaccgtggtggcaggtgcctataatcccagctacttgggaggctgaggcagggaggattgcttgaacccgggaggcggaggttgcagtgagccgagatcgcgccactgcactccagcctgggtgacagagtgagactccatctaaagaaaaaaaaaatttttttttacagagtttgactctccatcaacagaatgctgcacctatatgaccctctcacactcacaaacacagaggcattctcatgctgacacatgcacacacacacatgctcattctttgacacacaggcatgtttacctgcagactccatacagcatataccctgtacagtacacacccatacagactcattctttgacacacaggcatgtttacctgcagactccatacagcctataccctgtacagtacacacccatacagactcctcagggaaaatggaaactgtttcttggaggcctccagcctgtatagctgttctctgaacagaactgaggcccatcagttctaccttagtgagatccctggaggtggtacctgcctgatgagcggtctccctctgcagaacggtccctgggaaggcagagccagccttgcgtgtgaacagggataggcagaaatgatgcttccctcaccccttctctgtgcaggaaataactactagagagcattgcaaggcttggtgctgtgctggtgagggcggacgtcatgacagggagtgaacccagaccatgaagggggcttcctggaggagggtgaggtgaggcaggtcttggagtttggatgaggaggacgggaaaggacttgaggacattgcagatagaccaggaaggcaggctgggaggtgaggaggtgcaggaggctgtgcttctcggggctcagtctccttgagacaggggtgggactgaggggtggattggttgggggtgtgctgaggaaggatggtgagtagatgctattttcataaccttggttgcagtctcttgggagggtgccaagtccaggcaggtgaaggagttgaaggtctcctccgagcaggagctaagccctccccctctagtcttagtttttctgtccataaactgggatgatgaaccccgctggaggtggtgagggtcgggggcagagcagagcagccattatgctcaagacaggctctggactgcacctggggagagaagggagaatcagggttggggcgggaatgaaggaaggggcatgggaaatcaggggaggaggcagcatgggtggtgtgggaggatcaaggatgtcagggcaggcctcttacctgactgaggtttgcactcctgggttccctgtcctgaaacacaaagcaagagttgtccccatacagcaaatccctgctcttcagcactctttgcaatgcctctgggctttcctttctatcctggcaggatgagcgttgggattcctcactggtcttagttttcctgtccattaacttgaaggatgaacccactggaggctttcaggatacagaagatgttctgagaggaaggctgccctgtgtctgggcagctgtgtgggaatgaagtctgatagacggcacagccagatttttctctgagggaataccaagatcagtccatacaggaaacaaagcacaacatcaagtttggggactggtgggtcagatgtgagaatgggaggtgtggcaacatcctgccaagatggctgccactctcaatccctaaatcacccctgggagaactacagaactgattgggatgcataggattctaggaaaagacaacagtgttatagcccaacgagttcttcttgcctgctgcccagaaagactaatgcactgagaacagcaggtgctgcagcaaagaaagagtttaataatcacagggccagccaaggacaggagatgtttctcaaatctgccgtcctgagaatttggaggctagggtttattaagtatagtttggtgggcaggggactaggaaatggggaatgttgaagaataaatcacagggagttgaagctgtcttcttgcactgagtcagttcctgggtgggggtcacaggactggttgagtcagtttcctgacgtaggttactggtctgggtggtaacatctggttcctcagaatgcaaggtctgaaaaatatctcaaataccggtcttaggttttacaatagtggtgttatctataggagcaattggggaggttacaaatcttgtgacctttggcttcataacttctaagccataattctaaacttatggacaatttgttagttttataaagttttataaaggcagttttggtccccttgcaaaaagggggttagtttcaggaagaggctatcatcatttgttgttgttgttgttgttgtttgagacggagtcttgctctgtcgcccaggctggagtgcagtggcacgatctcggctcactgcaagctctgtctcccgggttcacgccattctcctgcctcagcctcctgagtagctgggactacaggtgcccgtcaccatgcccagctaattttttgtatttttagcagagatggggtttcaccgtgttagccagggtggtctcaatctcctgacctcatgatctgcctgcctcggcctcccaaagtgctgggattacaggtgtcagccaccgcacccagcctcatttttgttttaaaattaaactataaactaaattcctcccatagttagcttggcctgtgcccaggaatgagcagacgatgtgcttgtgaggttagaaggaagatgcagtcagctgtgacagatttctctcactatcattctcagtttctcacttaatttttccacggcagcctggggtgcgctgggagcagggagagataaaagtgagaactgggttggagaggagtgcttggacagtcactgcctcccatttcacctgtgcacaaactcctgatgtgagttgattcagtgaggaggggccagccaggtccccgtgggcatcatcctagcactttctctccccagtccctaggatgggtggctcacaatccagggagatgcctagggctgcttcttttctagatattccagtcagaggaggctccagcagaagggagtgtccagctgtggctgtggggtgcctgggcctcacatcttgtcctcgccttggtcaggacccagcacagattaggatgctgccttcagctcatccccagcacatattaccaatccgagtcatgctgccctgagggaaacattggtccacaggtcaaaagaatacaactaaaagaaagaaaacaggtcaggcactgtggctcactcctgtaatcccagcactttgggaggccgaggtgggcggatcacgaggtcaggagatcgagaccaccctggctaacacggtgaaaccccgtctctactaaaaatacaaaaaaaaattagccgggtgtggtggcgggcgcctgtagtcccagctactcaggaggctgaggcgggagaatggcgtgaacccaggaggcggagcttgcagtgagcagagatggtgccactgcactccagcctaggcgacagagtgagactgtcttaaaaaaaaaaaaaaaagagagagaaaaaagaaagaaaaccaaacaacacagacaaatcaggcagactttaacagatgggtccagaatgtaaaataaatgctttaaatttccctaaagagataagggaagatattagcaacatgaagtaagaacaagaaatcattcaaaaagaaccatttgagaccagcctgggcaacatagcaaggccctgtctctccaaaaaaaaaatacccaaattggctgggtgtggtagtatacacctgtatagtcccagctcctcggtaggttgaggtgggaggatcgcttgagcccaggaggtcgagactgcagtgagccatgattgtgccactgcactccagctttggtaacagaacaagatcctgtcttcaaaaatacaaaacaaaaaaacaaacaaaaaaagagccaagtagaagtatcagggatgaaaagattatagttggaataaagaaggggacagatgagaagagcagggaggattcaactgaagagagaaatagtgaactttgaggatcagctggacaaactcttgataaaggcggttggaaagggatcaagaaatagaaggtatacgagaaaataaaatataagagatgtggaggatagaagtagaaatgccaacatccaggcaatagatatcccagatgaaaggataaacaaattggaggaaatatttatagaaacagtggacataaatatactatattaaaaaattgaaagacctaaaatttaaagggatctgagagtgtcaatcatgggagataaggacaaacttccaaccagatgcattatttcataaatttaacactaccaatgcaaagagaaaattccaaaaacttccagagagaaaatgcaggtcacctaaaaaggagaatgaaccaggttatcatcagagttcctaacagtattcactgctggttggaatggataaagatgggacagtcaaagactgtatatacacatcccctacatgcaacagagaatatacaattttctgcacatacagagtatttgaaaaattgaccatctgttacagggatccgcaacccccaggccatggaccagtcccagtccctggcctgttagaaaccaggccatacagcaggaggtgagtggcaggcgagcaaacgaagcttcatctgtatttacagcctctctccattgctcgctaatattaccgcctgagctccatctcctgtcggatcaacagcggcattagattctcataggaacgcaaaccctattgcgaactgggcatgcgagggatctaagttgcacactccttatgagaagctaatgcctgatgatctgtcactgtctcccatcacccctagatggaactgtctagttgcaggaaaacaagctcagggctcccactgattctacattctggtgagttgtgtaattatttcattatatattacaatgtaataataatagaaataaagtgcacaataaatgtaatgcacttgaatcatcctgaaaccatcccccactcctcgtccgtggaaaaattgtcttccacaaaaccaatccctggtgccaaaatggttgggtaccactgaactatgagaccccacagaagcctaaaggccccaaaggatcaacatgacataatgttttctgaccataatataataaacatagatattaatagacattaatcacaaaagaatggttaaaatgtccatatatctggaagtgatgtagtatgttattaaactactcttgggttaaaaagaaaactataaaggaaatgatgaaatacttagaactagactgtaaaaacaaatctccactacatacagtatcaacatttatggaatagccaaaacagtacttggtgaaatgtatatctttaaattcatttattgggaaacagaacactaaaaatgaactaagcattcaacttaagaggctggacaaaagacagcaaaagagcaaaaagaggaaaattaaaatgggtcagaaataaataacccagagaacatcaacaacagcaattagagattccccaaaccaaaagctggttcttttaaaagattagtaagactgacctctgataagactgatcataaaaaaagaaagatgtagacatactaagtatagaacaaaagacagacaatatttacagataccagaggggttaaaaacataaaaaaagagtatcattaaaaattacaatttaaaaggccgggtgtggtggctcacgcctgtaatcccagcactttgggaggccgaggcgggcagatcacaaggtcaggagatcgagaccatcctggctaacatggtgaaaccccgtctctactaaaaatacaaaaaattagccgggcatggtggcaggcgcctgtagtcccagctactcaggaggctgaggcaggagaatggcgtgaacccaggaggcggagcttgcagtgagctgagatcgggccactgcactccagcctgggtgacagagcgagactccatctcaaaaaaaaaaaa

SEQ ID NO: 952 - DNA, 3924 bp, Homo sapiens
gacgccttgctgagtctgggctctgtcatcgacatttcaggcctgcaacgtgctgtcaaggaggccctgtcagctgtgctcccccgagtggaaactgtctacacctacctactggatggtgagtcccagctggtgtgtgaggaccccccacatgagctgccccaggaggggaaagtccgggaggctatcatctcccagaagcggctgggctgcaatgggctgggcttctcagacctgccagggaagcccttggccaggctggtggctccactggctcctgatacccaagtgctggtcatgccgctagcggacaaggaggctggggccgtggcagctgtcatcttggtgcactgtggccagctgagtgataatgaggaatggagcctgcaggcggtggagaagcataccctggtcgccctgcggagggtgcaggtcctgcagcagcgcgggcccagggaggctccccgagccgtccagaaccccccggaggggacggcggaagaccagaagggcggggcggcgtacaccgaccgcgaccgcaagatcctccaactgtgcggggaactctacgacctggatgcctcttccctgcagctcaaagtgctccaatacctgcagcaggagacccgggcatcccgctgctgcctcctgctggtgtcggaggacaatctccagctttcttgcaaggtcatcggagacaaagtgctcggggaagaggtcagctttcccttgacaggatgcctgggccaggtggtggaagacaagaagtccatccagctgaaggacctcacctccgaggatgtacaacagctgcagagcatgttgggctgtgagctgcaggccatgctctgtgtccctgtcatcagccgggccactgaccaggtggtggccttggcctgcgccttcaacaagctagaaggagacttgttcaccgacgaggacgagcatgtgatccagcactgcttccactacaccagcaccgtgctcaccagcaccctggccttccagaaggaacagaaactcaagtgtgagtgccaggctcttctccaagtggcaaagaacctcttcacccacctggatgacgtctctgtcctgctccaggagatcatcacggaggccagaaacctcagcaacgcagagatctgctctgtgttcctgctggatcagaatgagctggtggccaaggtgttcgacgggggcgtggtggatgatgagagctatgagatccgcatcccggccgatcagggcatcgcgggacacgtggcgaccacgggccagatcctgaacatccctgacgcatatgcccatccgcttttctaccgcggcgtggacgacagcaccggcttccgcacgcgcaacatcctctgcttccccatcaagaacgagaaccaggaggtcatcggtgtggccgagctggtgaacaagatcaatgggccatggttcagcaagttcgacgaggacctggcgacggccttctccatctactgcggcatcagcatcgcccattctctcctatacaaaaaagtgaatgaggctcagtatcgcagccacctggccaatgagatgatgatgtaccacatgaaggtctccgacgatgagtataccaaacttctccatgatgggatccagcctgtggctgccattgactccaattttgcaagtttcacctatacccctcgttccctgcccgaggatgacacgtccatggccatcctgagcatgctgcaggacatgaatttcatcaacaactacaaaattgactgcccgaccctggcccggttctgtttgatggtgaagaagggctaccgggatcccccctaccacaactggatgcacgccttttctgtctcccacttctgctacctgctctacaagaacctggagctcaccaactacctcgaggacatcgagatctttgccttgtttatttcctgcatgtgtcatgacctggaccacagaggcacaaacaactctttccaggtggcctcgaaatctgtgctggctgcgctctacagctctgagggctccgtcatggagaggcaccactttgctcaggccatcgccatcctcaacacccacggctgcaacatctttgatcatttctcccggaaggactatcagcgcatgctggatctgatgcgggacatcatcttggccacagacctggcccaccatctccgcatcttcaaggacctccagaagatggctgaggtgggctacgaccgaaacaacaagcagcaccacagacttctcctctgcctcctcatgacctcctgtgacctctctgaccagaccaagggctggaagactacgagaaagatcgcggagctgatctacaaagaattcttctcccagggagacctggagaaggccatgggcaacaggccgatggagatgatggaccgggagaaggcctatatccctgagctgcaaatcagcttcatggagcacattgcaatgcccatctacaagctgttgcaggacctgttccccaaagcggcagagctgtacgagcgcgtggcctccaaccgtgagcactggaccaaggtgtcccacaagttcaccatccgcggcctcccaagtaacaactcgctggacttcctggatgaggagtacgaggtgcctgatctggatggcactagggcccccatcaatggctgctgcagccttgatgctgagtgatcccctccagggacacttccctgcccaggccacctcccacagccctccactggtctggccagatgcactgggaacagagccacgggtcctgggtcctagaccaggacttcctgtgtgaccctggacaagtactaccttcctgggcctcagctttctcgtctgtataatggaagcaagacttccaacctcacggagactttgtaatttgttctctgagagcacaggggtgaccaatgagcagtgggccctactctgcacctctgaccacaccttggcaagtctttcccaagccattctttgtctgagcagcttgatggtttctccttgccccatttctgccccaccagatctttgctcctttccctttgaggactcccaccctttggggtctccaggatcctcatggaaggggaaggtgagacatctgagtgagcagagtgtggcatcttggaaacagtccttagttctgtgggaggactagaaacagccgcggggcgaaggccccctgaggaccactactatactgatggtgggattgggacctgggggatacaggggccccaggaagaagctgccagaggggcagctcagtgctctgcagagaggggccctggggagaagcaggatgggattgatgggcaggagggatccccgcactgggagacaggcccaggtatgaatgagccagccatgcttcctcctgcctgtgtgacgctgggcgagtctcttcccctgtctgggccaaacagggagcgggtaagacaatccatgctctaagatccattttagatcaatgtctaaaatagctctatcgctctgcggagtcccagcagaggctatggaatgtttctgcaaccctaaggcacagagagcccaaccctgagtgtctcagaggccccctgagtgttccccttggcctgagccccttacccattcctgcagccagtgagagacctggcctcagccctggcagggctctctcttcaaggccatatccacctgtgccctggggcttgggagaccccatagggccgggactcttgggtcagcccggccactggcttctctctttttctccgtttcattctgtgtgcgttgtggggtgggggagggggtccacctgccttacctttctgagttgcctttagagagatgcgtttttctaggactctgtgcaactgtcgtatatggtcccgtgggctgaccgctttgtacatgagaataaatctatttctttctacc

SEQ ID NO: 953 - protein, 786 aa, Homo sapiens
MPLADKEAGAVAAVILVHCGQLSDNEEWSLQAVEKHTLVRRVQVLQQRGPREAPRAVQNPPEGTAEDQKGGAAYTDRDRKILQLCGELYDLDASSLQLKVLQYLQQETRASRCCLLLVSEDNLQLSCKVIGDKVLGEEVSFPLTGCLGQVVEDKKSIQLKDLTSEDVQQLQSMLGCELQAMLCVPVISRATDQVVACAFNKLEGDLFTDEDEHVIQHCFHYTSTVLTSTLAFQKEQKLKCECQALLQVAKNLFTHLDDVSVLLQEIITEARNLSNAEICSVFLLDQNELVAKVFDGGVVDDESYEIRIPADQGIAGHVATTGQILNIPDAYAHPLFYRGVDDSTGFRTRNILCFPIKNENQEVIGVAELVNKINGPWFSKFDEDLATAFSIYCGISIAHSLLYKKVNEAQYRSHLANEMMMYHMKVSDDEYTKLLHDGIQPVAAIDSNFASFTYTPRSLPEDDTSMAILSMLQDMNFINNYKIDCPTLARFCLMVKKGYRDPPYHNWMHAFSVSHFCYLLYKNLELTNYLEDIEIFALFISCMCHDLDHRGTNNSFQVASKSVLAAKSEGSVMERHHFAQAIAILNTHGCNIFDHFSRKDYQRMLDLMRDIILATDLAHHLRIFKDLQKMAEVGYDRNNKQHHRLLLCLLMTSCDLSDQTKGWKTTRKIAELIYKEFFSQGDLEKAMGNRPMEMMDREKAYIPELQISFMEHIAMPIYKLLQDLFPKAAELYERVNREHWTKVSHKFTIRGLPSNNSLDFLDEEYEVPDLDGTRAPINGCCSLDAE

SEQ ID NO: 954 - DNA, 2248 bp, Homo sapiens
gaggctcagagtggtctagggactcaccctgggtcacacagagggttgaaacagagctcagaaagggaactggggcccctgactccccctttctgactgctctgctgacctgggggctggagctggacgaggcccctgcttcctctcttggggtcaatggtaagggagcccatctgccccagctgggcccccatcactcctctccccccagaggcaccactttgctcaggccatcgccatcctcaacacccacggctgcaacatctttgatcatttctcccggaaggtgatggggttgggggtggggtggggattgagggggagctgggagctggctggaggtgggataaggagccaaggagtggaggctcactgggatgggcaaatgggtgggggtgtccagtaggagggcatgacacccctgccctcgcctcaggactatcagcgcatgctggatctgatgcgggacatcatcttggccacagacctggcccaccatctccgcatcttcaaggacctccagaagatggctgaggtgggctacgaccgaaacaacaagcagcaccacagacttctcctctgcctcctcatgacctcctgtgacctctctgaccagaccaagggctggaagactacgagaaagatcgcggagctgatctacaaagaattcttctcccagggagacctggagaaggccatgggcaacaggccgatggagatgatggaccgggagaaggcctatatccctgagctgcaaatcagcttcatggagcacattgcaatgcccatctacaagctgttgcaggacctgttccccaaagcggcagagctgtacgagcgcgtggcctccaaccgtgagcactggaccaaggtgtcccacaagttcaccatccgcggcctcccaagtaacaactcgctggacttcctggatgaggagtacgaggtgcctgatctggatggcactagggcccccatcaatggctgctgcagccttgatgctgagtgatcccctccagggacacttccctgcccaggccacctcccacagccctccactggtctggccagatgcactgggaacagagccacgggtcctgggtcctagaccaggacttcctgtgtgaccctggacaagtactaccttcctgggcctcagctttctcgtctgtataatggaagcaagacttccaacctcacggagactttgtaatttgttctctgagagcacaggggtgaccaatgagcagtgggccctactctgcacctctgaccacaccttggcaagtctttcccaagccattctttgtctgagcagcttgatggtttctccttgccccatttctgccccaccagatctttgctcctttccctttgaggactcccaccctttggggtctccaggatcctcatggaaggggaaggtgagacatctgagtgagcagagtgtggcatcttggaaacagtccttagttctgtgggaggactagaaacagccgcggggcgaaggccccctgaggaccactactatactgatggtgggattgggacctgggggatacaggggccccaggaagaagctgccagaggggcagctcagtgctctgcagagaggggccctggggagaagcaggatgggattgatgggcaggagggatccccgcactgggagacaggcccaggtatgaatgagccagccatgcttcctcctgcctgtgtgacgctgggcgagtctcttcccctgtctgggccaaacagggagcgggtaagacaatccatgctctaagatccattttagatcaatgtctaaaatagctctatcgctctgcggagtcccagcagaggctatggaatgtttctgcaaccctaaggcacagagagcccaaccctgagtgtctcagaggccccctgagtgttccccttggcctgagccccttacccattcctgcagccagtgagagacctggcctcagccctggcagggctctctcttcaaggccatatccacctgtgccctggggcttgggagaccccatagggccgggactcttgggtcagcccggccactggcttctctctttttctccgtttcattctgtgtgcgttgtggggtgggggagggggtccacctgccttacctttctgagttgcctttagagagatgcgtttttctaggactctgtgcaactgtcgtatatggtcccgtgggctgaccgctttgtacatgagaataaatctatttctttctacc

SEQ ID NO: 955 - protein, 195 aa, Homo sapiens
MTPLPSPQDYQRMLDLMRDIILATDLAHHLRIFKDLQKMAEVGYDRNNKQHHRLLLCLLMTSCDLSDQTKGWKTTRKIAELIYKEFFSQGDLEKAMGNRPMEMMDREKAYIPELQISFMEHIAMPIYKLLQDLFPKAAELYERVNREHWTKVSHKFTIRGLPSNNSLDFLDEEYEVPDLDGTRAPINGCCSLDAE

SEQ ID NO: 956 - DNA, 4283 bp, Homo sapiens
agagccagccgagcagcagaggcagtggcagcgggagaggcgggagcagcggggcagcagagctggattggggtgttgagtccaggctgagtagggggcagcccactgctcttggtccctgtgcctgctgggggtgccctgccctgaactccaggcagcggggacagggcgaggtgccaccttagtctggctggggaggcggacgatgaggagtgatggggcaggcatgcggccactccatcctctgcaggagccagcagtacccggcagcgcgaccggctgagccgcggggccagcaggtcttcctcaagccggacgagccgccgccgccgccgcagccatgcgccgacagcctgcaggacgccttgctgagtctgggctctgtcatcgacatttcaggcctgcaacgtgctgtcaaggaggccctgtcagctgtgctcccccgagtggaaactgtctacacctacctactggatggtgagtcccagctggtgtgtgaggaccccccacatgagctgccccaggaggggaaagtccgggaggctatcatctcccagaagcggctgggctgcaatgggctgggcttctcagacctgccagggaagcccttggccaggctggtggctccactggctcctgatacccaagtgctggtcatgccgctagcggacaaggaggctggggccgtggcagctgtcatcttggtgcactgtggccagctgagtgataatgaggaatggagcctgcaggcggtggagaagcataccctggtcgccctgcggagggtgcaggtcctgcagcagcgcgggcccagggaggctccccgagccgtccagaaccccccggaggggacggcggaagaccagaagggcggggcggcgtacaccgaccgcgaccgcaagatcctccaactgtgcggggaactctacgacctggatgcctcttccctgcagctcaaagtgctccaatacctgcagcaggagacccgggcatcccgctgctgcctcctgctggtgtcggaggacaatctccagctttcttgcaaggtcatcggagacaaagtgctcggggaagaggtcagctttcccttgacaggatgcctgggccaggtggtggaagacaagaagtccatccagctgaaggacctcacctccgaggatgtacaacagctgcagagcatgttgggctgtgagctgcaggccatgctctgtgtccctgtcatcagccgggccactgaccaggtggtggccttggcctgcgccttcaacaagctagaaggagacttgttcaccgacgaggacgagcatgtgatccagcactgcttccactacaccagcaccgtgctcaccagcaccctggccttccagaaggaacagaaactcaagtgtgagtgccaggctcttctccaagtggcaaagaacctcttcacccacctggatgacgtctctgtcctgctccaggagatcatcacggaggccagaaacctcagcaacgcagagatctgctctgtgttcctgctggatcagaatgagctggtggccaaggtgttcgacgggggcgtggtggatgatgagagctatgagatccgcatcccggccgatcagggcatcgcgggacacgtggcgaccacgggccagatcctgaacatccctgacgcatatgcccatccgcttttctaccgcggcgtggacgacagcaccggcttccgcacgcgcaacatcctctgcttccccatcaagaacgagaaccaggaggtcatcggtgtggccgagctggtgaacaagatcaatgggccatggttcagcaagttcgacgaggacctggcgacggccttctccatctactgcggcatcagcatcgcccattctctcctatacaaaaaagtgaatgaggctcagtatcgcagccacctggccaatgagatgatgatgtaccacatgaaggtctccgacgatgagtataccaaacttctccatgatgggatccagcctgtggctgccattgactccaattttgcaagtttcacctatacccctcgttccctgcccgaggatgacacgtccatggccatcctgagcatgctgcaggacatgaatttcatcaacaactacaaaattgactgcccgaccctggcccggttctgtttgatggtgaagaagggctaccgggatcccccctaccacaactggatgcacgccttttctgtctcccacttctgctacctgctctacaagaacctggagctcaccaactacctcgaggacatcgagatctttgccttgtttatttcctgcatgtgtcatgacctggaccacagaggcacaaacaactctttccaggtggcctcgaaatctgtgctggctgcgctctacagctctgagggctccgtcatggagaggcaccactttgctcaggccatcgccatcctcaacacccacggctgcaacatctttgatcatttctcccggaaggactatcagcgcatgctggatctgatgcgggacatcatcttggccacagacctggcccaccatctccgcatcttcaaggacctccagaagatggctgaggtgggctacgaccgaaacaacaagcagcaccacagacttctcctctgcctcctcatgacctcctgtgacctctctgaccagaccaagggctggaagactacgagaaagatcgcggagctgatctacaaagaattcttctcccagggagacctggagaaggccatgggcaacaggccgatggagatgatggaccgggagaaggcctatatccctgagctgcaaatcagcttcatggagcacattgcaatgcccatctacaagctgttgcaggacctgttccccaaagcggcagagctgtacgagcgcgtggcctccaaccgtgagcactggaccaaggtgtcccacaagttcaccatccgcggcctcccaagtaacaactcgctggacttcctggatgaggagtacgaggtgcctgatctggatggcactagggcccccatcaatggctgctgcagccttgatgctgagtgatcccctccagggacacttccctgcccaggccacctcccacagccctccactggtctggccagatgcactgggaacagagccacgggtcctgggtcctagaccaggacttcctgtgtgaccctggacaagtactaccttcctgggcctcagctttctcgtctgtataatggaagcaagacttccaacctcacggagactttgtaatttgttctctgagagcacaggggtgaccaatgagcagtgggccctactctgcacctctgaccacaccttggcaagtctttcccaagccattctttgtctgagcagcttgatggtttctccttgccccatttctgccccaccagatctttgctcctttccctttgaggactcccaccctttggggtctccaggatcctcatggaaggggaaggtgagacatctgagtgagcagagtgtggcatcttggaaacagtccttagttctgtgggaggactagaaacagccgcggggcgaaggccccctgaggaccactactatactgatggtgggattgggacctgggggatacaggggccccaggaagaagctgccagaggggcagctcagtgctctgcagagaggggccctggggagaagcaggatgggattgatgggcaggagggatccccgcactgggagacaggcccaggtatgaatgagccagccatgcttcctcctgcctgtgtgacgctgggcgagtctcttcccctgtctgggccaaacagggagcgggtaagacaatccatgctctaagatccattttagatcaatgtctaaaatagctctatcgctctgcggagtcccagcagaggctatggaatgtttctgcaaccctaaggcacagagagcccaaccctgagtgtctcagaggccccctgagtgttccccttggcctgagccccttacccattcctgcagccagtgagagacctggcctcagccctggcagggctctctcttcaaggccatatccacctgtgccctggggcttgggagaccccatagggccgggactcttgggtcagcccggccactggcttctctctttttctccgtttcattctgtgtgcgttgtggggtgggggagggggtccacctgccttacctttctgagttgcctttagagagatgcgtttttctaggactctgtgcaactgtcgtatatggtcccgtgggctgaccgctttgtacatgagaataaatctatttctttctacc

SEQ ID NO: 957 - protein, 931 aa, Homo sapiens
MGQACGHSILCRSQQYPAARPAEPRGQQVFLKPDEPPPPPQPCADSLQDALLSLGSVIDISGLQRAVKEALSAVLPRVETVYTYLLDGESQLVCEDPFLPQEGKVREAIISQKRLGCNGLGFSDLPGKPLARLVAPLAPDTQVLVMPLADKEAGAVAAVILVHCGQLSDNEEWSLQAVEKHTLVRRVQVLQQRGPREAPRAVQNPPEGTAEDQKGGAAYTDRDRKILQLCGELYDLDASSLQLKVLQYLQQETRASRCCLLLVSEDNLQLSCKVIGDKVLGEEVSFPLTGCLGQVVEDKKSIQLKDLTSEDVQQLQSMLGCELQAMLCVPVISRATDQVVACAFNKLEGDLFTDEDEHVIQHCFHYTSTVLTSTLAFQKEQKLKCECQALLQVAKNLFTHLDDVSVLLQEIITEARNLSNAEICSVFLLDQNELVAKVFDGGVVDDESYEIRIPADQGIAGHVATTGQILNIPDAYAHPLFYRGVDDSTGFRTRNILCFPIKNENQEVIGVAELVNKINGPWFSKFDEDLATAFSIYCGISIAHSLLYKKVNEAQYRSHLANEMMMYHMKVSDDEYTKLLHDGIQPVAAIDSNFASFTYTPRSLPEDDTSMAILSMLQDMNFINNYKIDCPTLARFCLMVKKGYRDPPYHNWMHAFSVSHFCYLLYKNLELTNYLEDIEIFALFISCMCHDLDHRGTNNSFQVASKSVLAAKSEGSVMERHHFAQAIAILNTHGCNIFDHFSRKDYQRMLDLMRDIILATDLAHHLRIFKDLQKMAEVGYDRNNKQHHRLLLCLLMTSCDLSDQTKGWKTTRKIAELIYKEFFSQGDLEKAMGNRPMEMMDREKAYIPELQISFMEHIAMPIYKLLQDLFPKAAELYERVNREHWTKVSHKFTIRGLPSNNSLDFLDEEYEVPDLDGTRAPINGCCSLDAE

SEQ ID NO: 958 - DNA, 77647 bp, Mus musculus
  misc_feature (1)...(77647): n = A,T,C or G
gcaagttccaggacagccctggctacccagggaaactcttattccaaaaaccaaaatgaatgaacgaatgaatgagagcttgaatatttgatactgcagcatgcagagcatcttaactttggtcagcactgactgttatctctaaaactgccaatgctgagaataccacaacacacaaatatgttgtacaaaatggcagttatttgcttagggttgtccctggaattgttggaaatcctttcttaatcccaagccaaaatttatttaatgattctttatgaaagtcaaacatccttaacaaacattttaaaatcaagtattttaataaaaaaaatcccaaagatataataatttaatacatggtaaagaaccatggtatgaaaatatctattctttatcttctacagaacaacggtatgaaaacatcaaacctttaacgttcacagttaaactagtaggttgctataagagcagaagttctgtgtatttagtgaaaagggcaatttctaacacacaacggtcttgaatgtgaactgctatttcaggcagggttcactgttcttgtgggttgtgatgggatgtgcagtgcaaagttcttgtgtgtgtgtgtgtgtgtgtgtgtgtgtgtgtgtgtgtgtgttttcagactagggcttcagtgaagttgtgagacataacacaggtgagcactaccagaaaccttgatttcatgtcaggtttgatctgaagcattttctgattgtttcatgttcagaaatgtttttacttttgtccaactttcagcctcccatccacgcaccaaagccaacctctgggtcagaactaacatcctgtggctaatagatacatagattaaaaaaaaacatttggaacttatgaacataacagaccacttgtttataccacctcacagctaagaatgtcaccagatggcaccttggacctactgagactctttctcccatcttgctgtacccacctctctgatagactcaccactgtgttttaaacttgcttcgattgatggttttttttttatagtaaaactataaaatttcacgaaatcacttctgtgttggaacatgaaatctggggtaatgtaaatctgagtttctggtccatggccactcaaaatgcctccaggataaattatctcgtcttccctctaaaatgacagctgcattatttgtgtgtactatcatgactctcagtttaaggacctgggagtagaggagacagctgagaatcagagtcaatggccagaacacgaagagggttgtcaagagccacgctcgctccacctaggttaagcctgcagatgcaaagcaaagttcttttacaagttgcagaaactcccaaggcagataacaggaaatgaggaaatgaggaaatgagaccaaggagacctgtgtatacttgctcgaaatggtgattggtagatcagtggaaagcttagaaaactgtcagcatgtctttgttgtttagtgcttttactaactgcctttaaaatagttttcaaagaaaaggacagcgatgtagttgagtggtagagtatttgcctagcatgctgaaaggccctgggtttgatcatcagcaacatacacacacacacacacacacacacacacacacacacacacacacacacacacacacacacaagcagtccaattctgagtgccatgattggatactggacaagtaagggcttattaaatgaatttcggtgaataactgctataaatagaatttagttcaaactttagtaaagttgcctgaaactgcaagtgaagagctttggtgtattttaggtagctgtaatggcacattacggtaacatcagttttgttaaaggaactattctattttttttccctaatgaataacagctgctttcgagttggcatggcaactgccgttaaagcatgatggaaataattatgaatcttaagacttttctgagggatatgcataagaatgtaatgaacacacacacaaacacatacacacacacacacattcacaggtttaatttaccttggtaaaggcacatggagcacagtaacacaattatgctagttatcataaataaatttgaatgtcaatctcacttctgtcacctaacagctgtgcaactttgggcatgttttttgtttcatggagtctcaatttcttctaagaaattcaaatgatggtcttcatagggctacttggaagaacagagtaaaaaatctcattagaaccacgtgtagcaagacatttaaaaaactatcaagagctagaaaatgatacatgccttaagaaacctgtttccttggattgtggatagtatctgtataaaattgtttgctttgatctctctctctctctctctctctccctctctctctctcgtcctcctcctcttcttcttctgtatgtgtgtttggaatagatggtctcttctctgtgagcacacattggcgtctctgtgtatgtcaaggtggtggtgcttaagtggacatcaggtgtcttctttgattgcattccattttatttagtgagcgaagttgtctttgctgaatctgaagttctcagatactggctagtgcatctacctagcttgctctaggaattccctgtttctccctcaccagtgcctccagagccagttccactgtgctgccgtcaaggtgctgggctcactctcccaagtgctgcagcctaggagcctatggggttgaatgggccagctcttccactctcacaccctggggctggctcacctgtgcctttgcctccactgtgttgctcaggcaaggtgcatggcccagctcctcagaggcaggggtcagctctcttgatctggaagagagggggaatggcatcatccccacacccatgcaacctcactgcagatgagtggtaaggccagttcttccacgctcttgcccttggggctggctcacctgcacagcctctaatagggccagctcgactgtgacccattctccagcagcccactagggacagggccagctcaccagctgtcattaccccagggccagatctcccaactgccacaggtggtaaggggtgagggtggaggaggacaccacccccacacccatgccacgtcatagcagatgagtgttatcgtcattgttcttgtgggtttgtttttttttaaacaaaaacaaacaaacaaacaaaaaacaaaaacaagggttctgggaatcaaactgcagatttcacactttatccagatttcactttattcgctgagccatctctctagcgccccccttttttctaaagaagttattgaactctcaaggattcataagcatcagtaactacatttatttatatgtagagtgttttttctctgtgtattttcttagtaaatatatcgaacctgtatgtaggatataaaacataatatattttttggcttggtgtaatttaccttcatttatagaatgctggttctgtgtacagctgcttcacatttgaatgctgctatgcagctgagccccaaatagcaccattatcttcagggatattatttagtatagatgaacgtgtaggggtgcacattggggtgtaggtaagcatattcatattgatatgcatatgtgtgtggaggcccaaggtggacattggcaattttcctaattgttcttccacattagtctttgatgcagggtattttagccaaatccagagcttgctgatagggctagtcaagctagctagcttgctctgtggattccctttcccactgtctgaggtcacaattacaagccaacggacaaaagtacccagtatctatgtgggttcccaaactcgagtcaccttatttgatttgcaagtgttaaccactaagacatatctccagcactgaatgttgtttttgtttgtttgcttgcttttggtatgtgtgttttgctgcatggatatgaaggtacacaagtgtgcctgcagtatggaggccagaggtcaatgtcattgtcttcctcagttgctcctctacttgacgttttgacctagagctcattgtttaggctaggctttgccagtcaatgaggtctctggatccacctgtgtccacgccccctcctcaagggctgcagatgttccctgctgtccctggcttcttatgtgagtgctggggccctgagagcaggtcctcataattgtgcagcgggcactttgccaactcagtcatctcccagcccaattagatttttttttttttttttttagtgtttgttattaactagatttccattacagcaacaaactcctgagataaccagcttaaagggaaggaacatttgttttagtacaatgtttcagaggtttcaggccactgacacatttcttttgaatacattctttctgcctgtggcaagacagcataccatgacagggagcatgtggcgaagcaaggttctgatctcctgatggataggaagtagaaaggagagtaaagacagcagtgccacaaccccttctgaaagcacccccccacacacacacaccaggtcccacctcttaaaggttgtaccattttctaaggcatcaaactgagggccaaatctttcaaacacaaaccctttcagggacaactcaggtacaaactatcacagttttctttccttttctagggcaaaaatttccattgtctttggtgaaagctattaatcactcttgttttttgtttgttttgttttattatctatctatctatctatctatctatctatctatctatctatctatctatctatctgtttatttttgagacagggtttccctgtgtagctctgactgtcctggaactcactctgtagatcatgctggctcaaactcagagataccctctgcttctgcctctcaagggctgggattaaaggggtgtgccaccaccacctcctggggatcgatcacttttataatgaacagatttcattcgtgaggctgcattacagggggttctaagcacacaacacattccagccatggcaccacactatccttggatctaaatcttttaaatcttactccagaaaactctgctcatcggtgtgcaagtttctgctgtatcatacatgtgtttgaaccagacgggatgcctttgtattctcaaccctaaagctattgttaagatttatttttattttttatatctatgaaagttttcttggtagtatgtatgtgcagcacacatgtgcctagtgtctgaggagcacacgagagtatgtcaggattcctggatttggagttacagatgtctgtgtgctactattggttgctgccaatggaatccaggtcctctgtaaagaatagctggtgcccctaactattctttttttttttttaatccctaaaagatattgttaaaccataatgtaatcataaagcaaattacttaaagaattccattgctttcatcagaactaggtatggacttttgaaattatgtaccaatattccttaaagatatttttgtcttaaatttattagtgatcgatgtattttctggaaacagtgcctggtgtacacatatactacgctgccaagcctgaggagtgattaacttagttccatgtcttttgagaagatactaaatgaatgaacatgaatattatcatctttatcttattctggtgtcctttcagagtttattattcagttagacaggccctctctgcctctctctgcctctgtctctctgtctctctctatgtgtgtgagtgtgtgtgtgtgtgtgtgtgtgtgtgtgtgtgtgtgtatgtttgtagacaggcttttgctatgttgctctggctgccctctaactgaattcttaagctcaggtgttcctcttccctggacttgtccactagctgggactgctgtcgatgtggctgattggcacaacacttgcctatcatgtccccagccctgcttctaacactactatgcatcaaacctgaaggaaagctgctattagcctaatgacctgtgaccttcagaaatgactgtacttgggactggactgtggcttcctccagggcagacgccatgggatttaagttcattttctggactagggacttaggtctgccataaagcaggcaactcagtaagtgtttggagtttctgactgggtactgcatagtgagtgcttttatgataccaaccaggctgggcactaaaacaagccccaaacccctcaagaaaaaaatctcccggccccatccagcttgatcttgagagctgtggctagtgagtgcttactgagcttggggcttttctcaagttcactacgcagaaatccctttccttagatatcattttcttcagtggtatagccacagatgttgtcattaaatttggggtcacagcccatgtcccaagccaggttgggccaccttcattacttagccaattaaaagagtcaaataaatagtagaaagcaggataaggtgatgtattcaatatggtcacattggtaagagggacaaagggatccagtgagccctgatgtctgtctttggtgtcttgaattgagattaaagcttaaacacagggccaaggacatgcatattgaaggaaatcactgcacctggacctaacttccatttttttaaaaggaacaactaatacaaataattgaatttttccatgctgtatggggccttgctaacgtttttttctctagtcccctagctactgactcctcaaaccaaatgacatctgtttgaactaaataatgatgggcctttggaatcctcccactctctgttaaaaggtctcattacaagtatggtctaatgctgacctctgagtgtcttacagactgaaagtcgcatttgaaaaattgctttctagacaatatggctaattgaaacctgaataaatgtctgtttgctctgataaagtaagtatattttgctattgtatatatgaaatataattgtatattatctgtttgtaataactagcactgtttcctgattttataagagatttaaacatttgattgtcaaggcctatagacttactctactaaactagagattttaaattttgctttagaagtaagattctatattcttctgtgctgtgatattaatttttccgggctctacatgattctttttaagttgtgcaagccttttaaagattgacaggtattagatatttgtaaatctatatgtaattacctcattttccaaacagatgtactgttgtggttttaaataatcttttttttttttttttcccgagacagggtttctctgtgtagtcctggctgttctggaactcactctgtagaccaggctgggctcgaactcagaaatctgcctgcctctgcctcccaagtgctgggattaaaggcgtgtgcccccaccgcccagcggttttatataatcttatagctaactattttctgttgtggtgattttgtttttgtaaagccttataactaagcagtctgttagagttctacagcggtacagcttctgacagaggaatgtgaacaagatttgtgaggtgaagtagaatattgtgagtgcttttatactaccaacaggggtggacaacaacacaagcccccaagcccccaagcccccaagcccccaagcccccaagggaaatcacctggcaccacgtagtctaccctgaagctattctaaagagatacttgtgtgtctcagtcagactacagaaacaaaggaccttagagaaatgggaatttccctagaactctcaagctgggggaaaaaagaggccagccagagagggaactagctttctagaaagatttcacagagttttagcaatgcaccagaccaagttatgagatgagactgaagcccagacaatgatgggccaatggcgagtgagataacacattgactgttactgcatagacgtggatctcctgggcccttaaactttaatcttatgtcaggatactgaagatagactgtgtgtgttgtgtgtgtgggtgcagctaactggatctccctgtccctccaccctatgtggccatgttgaataaatctccttattctgctctccattattaatgccttttagttgccttgaggacaagtgacccaacctggcttggagttcccaactaagtttcaatagtacgttgcctatgttctggtaaataccccccactccccatcttcaaacacattcatgcaagcaactgtaattaaactcggggattaaaaaaagacatcgaagtagcaggaggctttagagtgagatgattaatggaggtgtatctgttagaatgcatccaacatacatatgagattgtcaaataaaaaaagcacagagtttgcaaaaagggcaatcccttatacccgtagtagtttgtagttcttaagtattatttctattattttaaattacgtgtatgcgtgtgtctgtatgtgggtggtatgtggatgtgagtgcaggtgcccatggagcccagaagggaggcattactagcaggtgattgtgaactgccaactgtagattactggggactgaactcgcattttctgaaagagcagtacctgcttttagccactgagtcttctctctagcctcggtttttagtttttgaatgacagctaaagcctggtgttgattataaccaggatgcaatagttttttccaaaatgattgcaccgtgcatgaagcacacagccccacgaatcttcttcatacacccgggtaatcaccaccacatcaagaaaaaacaggttcccagctcatacattgtaatgagcatagttttttagaaaaatgttttttaggcatgtaaaaatagtgtagtcaggatccccactacactcaaggctgcacctgataaccataactccgtacaccactcactcaaagataacaagagatagtcctagaactaactccacgatgcccagtgaacagtatataagcagagactaagagcaatgctctgctctgcacatctggagagatgccactttgatctgccctgtggctggagaatcttttctaggatcctgcccctggaatcagaaatttctgtttgagactggacctgaccttcagccaagatacatcgcataggtaagcagcctcgggagataggcttaggaccgtagttaggaattcagagtgtttatattgtgtgaagacccaaagcataactaaataaaacttgttatactaactacgcgtatctaccttctagctcgcgacactcagcaagttcccgtgcaccctagctctcagcacacgccccaccttccaacgctgaaacttctctcactgtccctacatcttgcacgggattgtcttgaaggaggaaggactaggtggacagtctctcggggaggatggacgcgggctccagtcctcccgatgggcccttcagaaggtccatacagtgctggctccacattccgaaggaaccaagctggcagttatcagggaggatcctcacactcagttaagaccgagggtagccggccccatctggggagcgccagggtgcacgttggcagtactcaagcacgccgcgatggctgcggggcgggctctcacgtctgccacttgtcccgcaccttttgcgtgggctgggctcccgcgccagggtagtcgggcgtggcccagggcgcgaccctccgggaagcgggcggccgggggcggcgctgctgagcggggatgtgcggcgcgcgcccattggctgcgctttccccgaccacaccgcccagccgcccacttcccggcctctctccgctcccccattggccgtcctgcctggggggtttggggtgggcggctgaagaagagtggagggtgagcggttctcccgggaagagtgtgagcaagagccaatcaggagcagacgtggaaaagaggcgccacgccaaccagtcagaccccgaggcgcggtcgggacccgtgacgccatagcgctctcagccaatgggcgcaccgctgtcggtccgctcttcagcagccggtcgggggcggtgaaaagcgagtgaggagagcgcgaccacggcgtagccatcgctgaagggagagcgaggcccgagcttccgcgtcgaggtgagcggcacgggctctgtcgcaggctcggccgcggcccctccgcacttggccgccgttttgcgggagtcctaggccgggctgcgttgaggtggggcctgcgaaccgccccgcccccgccccgccacggccgcctggaggcgggggcgcctcctctgctgggactgtccctgcgcggcgtggccgggccgccgccctcccgactgccagggccgcggcgagggagcttagaggcccctggcctgcaacccggggaggcaggggttccgtctgcggggggaggccgcgcagaggcggccacggtgggggcccgagttaacggaggagggtggcggcctgggattgagaggaagaaagtgatgggaaaggggtgatgctctggagagggcgtccagtgaggaggcccctgctccagagtgggatcggcctctgggaagtaggtatcaatggcgttgcggagaaatcagctgagagatggagaactggtttggggtttgaaggttaaggtctctggaccaatggggacagggcatgtggagtgtgagaaggtacacacagaaaccggaaggtgtccgaggagtggattttagatgaggggtggatggaggctgtctgactagaaggcgttatttggtttcttggaaagtacacaaggaacagtcaaggtggatttctgtgtgcttgctcaagggtggggatcttttgtgaacagtggagtgagttgggagtacagagttgagagagagtatctcaggatgacagctcggaacactcaacgtagctacctactgaggctgatcattagctcacctttatgctgtcccctggatgatccatctgattgtttagccacagctcacacaaacttagctcttagaagtaatgggtattaagtattctttgatttttttttttttttttttggactgggaaattgcttaattcttaaagaaaagtgctaagggcaacatttaaagagtctggttggggatggataatggatgggtaatatgacatgaggatggtgcaaggtgtcttacaaaaacagaagtgatactgtgtgaatgtagttgtgcagttctgaatgagcaatctttttaatgtagtggaatttgttttatgcttgttgggcagttgctttcacttttgagactagttttgtagttaaataaacaaaaaatattttcacttaagaaagacattagtatatgtgtgttgctgtcaactgctttcctctttgaagcttttatttgtagggtacaggtagaattaaatccacattttcagtggatttaaatgggagagataatttctgcttaaagataggacaaaaggccggtgaaaagttacagtttgagggcagaattcaagagagcagttgtataaatgttttcttattcaccagctcagcatagaattttagctaatggatcattctttaggacagagaaggtatttgtgggtaacacattactgtaattacattttgcttttagtataatctagttcccaaagggctgagttacctgtaagcagagagacagttcaagagaagggcaagttttttggaaaaggtgaattttgggtcatttgcaccaggagttggtgtgtgggttattactagacacaagaatgattacagtagtttggatgaagtataagcagactgtggatttaaaaacctcacaagtgtaaatagtttctaagtccaattacagatctgtctgaagaaatggttagatatgtagccatcagttaagcttcttcctgcagcttggttggttggtaaatagtggttccctgtgatggcttgaaggaacagaacagttggactgaagatggggcatatatgcaccccccaatttttttgatagttagaaatttattggttgctactttgtgccagaaactgttttgagctttccaagtatcattatttgattgtatttcataggtgagggagaggttcagacagatttgacttgcctaaggttacaccagctattattacatggcaagtcggatttggcagaatcagacatgaattgaacatttgcttgatgacagacactggagaatgctggagattcatgatttaccagaaaatccaaaggtcagacctgagcctgttagagaaaagacttgttataaaagaagtaaaggaggcatgggggctaggggatggtggtgttgggattgtcagcacacgcctttaatcccagcacgcaggaggcagagggaggtgggctttgagttcgaggccagcctggtctacaaagcaagcccaggacaattagggctattacagagaaacagtgtcttgaaaaacaaaacaaagtcagtaaaggataaagattgcttgtaaagattttgtaggtactgaagagtatgctgtttagagaagcctagagctgacttttttgaaagaaagacctagagactgagaagaaagatggttaaaagaagccactgagttaaataaggaaaaaagaaatgtaaatgtagagtcaagatcactgaggtcaatcatgatatgggtcagcaatcatgcttggtgtggtcatagttatggtcacatgggggaggggaatcatagcagggccccttgcaatgttttagtctttgactaaagaagatctgagtactcaatatgcttgtactgaaaaaaaaaattccagataaaaatgagcattgtttttatcattaagggataacatctattcaacagaaatgggacagttggggctatgtaggtctacatagcttggggtgagagcagagatggacttacttaacatctgctccatgtgagctattttggaaagcatgttctgatgttggaaatgactgagttgttgtgaattgaaatggtacatcctaaaagatgacttttgcttaatctgaagtattaggttattgaagcaccttgaatcatagagatagggtcctgacttttctgaacatttatttttcttagagattaagaaaagaacttaaggttaaaagaaagctgtgaaccactcatagaactgggtcatttttaactgtttcttttggtcttacatccttccttcttcccatacatagtttctttagttcctcccattgttgggtttgatatggacctaagagtttcagttcagtaaacagtataaaagtgctacatttatttttaactgattaaacagttaaaagctcaccactaggactggttagatggttcattcagtaaagtgtttgctgttcaagcatgaaaacagtttggatttctggcaccctatggggcattacacggctgaaatctcagtattgaggaggtagagacatggggatccatggggctcgcaggcttgctagtctaatcagagactttgtcttaaaaataaagcagagaagcaattgggggaaatagcctatgtcaacctctagctttcatatatagaagacacacttgtataatgcacacacatgacacacacaaatgccacatatacttcactcttgtattcccaattcaaatagagacatatcaatcaaatagttctttgtttagcaagtaattattcccaagcaaactaggaggatctttccaaggatcagtgcagattgagttcaatctcatacatgaaaagggagaaatattataaatccatttagttttaaccttcatttggcatatagagattgtggaataagtatacatgtgatttctgtttcatctggacactgttatgttccttaaatagataatcacaattaccttttgttttcttatgtgcgagctgcattttacaaatgagaatgaggctcagaaaacgtaggttagagagctaagtgtcagaactaggatatagtccttactttggcagggcaaggtgtcatgtgcttgtaatctcagcactggggaggcagaggcaggaggattctgagtttgaagctgcctgggttgcatagcaagagtctgtataagagaaaaaacaaaacaaaacaaaaacaaaaaaccccaaaaacctaaacccatgttttgtttcttaaactcacaaagataaggacttacttattaatatctgtaattgaaaaacgtgtcatataacctctagtatttaatagctatttaataccttaaaggataggtaggtctcagcccccactccccaactttgaaacataatctgtgttgtcctggctggcttagaattctctaggtagaccaggctgatattgaactcacaattatagtctgcttttgctttctgagtgctgagaccaaaggtatatgccaccatgctaaaatcctgcttcagttgtttgtgccctgtgatcctacctctaaatatgtagtagtgagtttgtttcatacagggttgattatgttacattttcctgttttagagatatgtgtctacatttcagtattttttaaatgttagaaatggatcctgtatcttaaagtcaaatataactgagaattgaggaagtatgggagttgcatgtagtttttatgtataatgcttttagaatttttttgtcttcattttcttcctagcctccccctttttatttaacattcatttacttttctttaaattattgctcattctcttgagttaatacggtgtagaaaatgtgtcataatgtaacaattcacatcaaactttgaatcagtaggtttgaggtttaattttggccttgtcagcaatttcatgtttaactgtaagcaagtaacttcccctttgtgggctttagcttcttcaactgtcacggtggcagggagagctttaaaaatgattattgcttttttttttaacctcattttccctttttatcttcctttctttcctcctgtcatttttgacatggattcctaaggatatagttatgttcttaattattataaagagtgaattccttgtgttactgagacaggctatcttagcagatactcattaaattgttagcaaagaaacagataaatgtcatctcttctccgagctaattaataaaaactaataaaaacatgttggtaaagtacatgtaatttttaaaaagctgttgaaaatctagcatcagagcttaatggcagaaaaagtacttagcgtatgtaaggcttaagagttcagtccccaggactacaaataacaacaacaataaaatgccagatcttagcccttgggaggcagaggcattggatctctgtaagttcaaggtcagtctagtctacatagtgagtttctagacagcctcttgtctggtggcagtgtgtgtgtgtgtgtgtgtgtgtgtgtgtgtgtgtgtgtgacagaaagagagacagaggagtttcattgaaaggcacctttgcctaaataaatgtgtttagcaaaactaaatcagctctatttttaacaaatgtacaaaggagaaaactcgtggacctgattttaagaatccttctattttcctccagctttaaaagttatgaatctttttgtctatattgcttcatagcttgtacctccattcactttccccataatttcgaagcaaattaaagaaataaaaaattaatgccatacagcctaatagacatgttaatcaaagtggaatggaatttttttttcataaaagtgtattttgaaactctgctttctattgtattgtgcaagagaaatcagatatagtaaggtgccctggggcaggtagagtgttaggagggagcctaaatatgtgtactagaaacagtgtagttaagctggattgtgcactacaaatgggtagttaattgaactattttgaaattaagtagaatttagataggttgagataggactaatagtaggtggtaaaggaacttacacttatttatgcatacagataaaaaaatctaactttggctttacagaataaaatatatcttaatctgtgtctttttatcttttagacccaaataagatattatgtacatagtaaagatcttttctcagttcttggaaaaagccatttgttgtactgaaaatcaaggcacaatgttttgtgaatgtattattgtccctggtggattatttggcacattccattaaaaagtgccagtatcgtataaatattgtatgccaacacgtaataatcgatgcactttggctaaagtactagtggatgtgtaccaccagcttttaggtataaatcacttggagcttttacattatttcacttttgtgtacatacacatgtgctaactacttcagaaacttagaattttgaaatatatagtttattgcatttcatggaattcttagagatgtgggtgtaaacattcatgagatatctttgacttaaaggaatttataccatggcttcttatgaaatattctaagaataacatttcctagaattcaggcagttttaaggtttatgaacctctccgagcatcttcataaagatttgtctctttagaagaaaacaatacatttaatttttggtataactttagtggcttcttaaaatgttcagaacctcagctgtagctcagtggttccccaactttccttttaaagcttagtaaaaaaaaatttttgaggtctgtggatcctggcttgctgtcccttacccctttgtgcagtgctagagattgaaccagggctttgcgtatgctaggtaagtgctctgtctacccacgaactatatagtcttagctaataatttattctttaatgttaggcagaaaactcaactctgctctgttttatatattatgattacctttaagtaagtgacttaataggagttataaaattatgaaacttatcatgcaaatactagcttaaaaagtagaccaattagattctcaattggattcttggggaaaagtaagccatagccaggtttttgtttaactgttgttttgaggtgggtctttttccgtgggttgtactgacttgactaaccaactttctgccgtagcttccagagtactgggagtacaggtacatggcatcatatttagccataagccattcaatagtatagaagtaactataaaaatttttggaatacgtgtatgtatagtgcttttgtatacaggatgtgaggcagtgtatgcttgaatgaacagaaagtggaatatagtagaatgcataaataccttttacttttcttgcagcagaagaaaattctttaacttattcttaacaaagtttgtggaggaaaaaataaccttggtgttttttttttgaagctcacatctgggttgaaagtaattcagggtttttgtgtccaatgggattgattgatcatgaaactctgaggcctataagcacttatgctccccttagaatgaagaatggttttaatatgtttcttagaaacatgtgatttttaaaaccttgcagattgtatttaaagtataggtcatatcaatattaggtcgttaccataagcagaatctgcaggagagaggaagcaggtaaattggcaaataatgggacatttgataaattgattgatagattgtaaatagtaggtgaattgctttaaagtgataaccttggtgaccttttggagttaataattccctaagtatcaagtgcaagactaggaaacagaagatgataagtgatctggcctctcagtgaaattgagcaagaaaccagagatgttaattggcttgcccaaacatggtcatggtggtcccagtagtgtagtaactgagtacactgaatctttttaagtcttttatacttttttataattttgactagagccaggaagatgacttaaggaaaaaaactgttgtgtaagatgtgacccgagtgtgatccctggaactcacgcaaaaacctagataggctgattctcatctgtcatcccagtaagtctaaagcaacaggaggcagacagaagcaggtctttcaggggcagcacatctaggtgagaaccaaatctagaaagttctcccctgacctcgtgggccatggcattcatatacccacattcatgcatagaaacttttttttttaatttgcctatcttttcattataggtcttagttatatagagaccaatatgttttagtactagagattttagcactatgattgataatttgaccatgaaagccctgagtttatatagtctcaaatgtttatttctgctgcattcttaatgttgttaatggttacaaggcttattttagggtgccaggtactcaattcagttttacaactgaaaacctactgcaaatccagaaaatcactagacattgctatccttgtgacttttacatagcctgtccttcatgctatgtcttaaaagatactgagttttaagaagacattatagaatttaaccctttaaagacctccttgaaaatatttcttctcactcaaaactaaaaaccagaaggatcattggcatccaaatacagatgaccctgattctgagttctttatcacttttgcttgctgtggccagagagaaggctcctcccccacatttatatcccctaaatcagcaaggatttgtaagagtgactctttctagtggaataattgttactctgatccaagtgtgctttgggtaaatttcattaggaatatggtagttcctaattgaattacaaaaacggaatcttggttagaaaatcaatgatgaaattgtagaagtttaataataattataactaaattggcagtgaatctaaactaatggtgatttttttcagttaaaaatcaagacaataattgaaaaccataactaggtaaagacagcaacggtttctcttgaaaattactatcatagtttctgagtatcagatgaggtagcattattagctgaagtaaccagacttgaatacagaaagacgtctttctttcatgtattttgataatctttttcttggtaactagttgaacattgttattcatatatagccttatgcatcaaaggacaattgtcctttcttacatgatttatattcagaggtttgccccagttttagagaagtgttacttagatggctgagctgatgatcacaaatgggcattgttttcctaggtgtgttgagaaatttgtaaagggcctgacttgaagttcacctagtttctttacttctagatagcttgtagtctttgatatgttaatctcctttctgtaatctgattggatatagtttacagtttcccaacctcatttcacaacaaaacttccctgtttttaggtttaaccttaaaaacagattcagaaaccttatgaagaagtaatacaagagtagagataaagtataggcagggagtcaggacaatttcctgctttaaggattacatacaagtcattcaatgtgataatcatattgagtcagaactatgcttgcagttatgggtgtgttaatagaatacccaattttgtcaccctgttttgaaagtttaactttgtaaatagagtttaataaactttagactgtgcaagatacatgattattaatttaataccattttgggtatgtaatctataggtaatgttttagggttaaagtgtacatttttctttaacatcaatttaagctcagtattttaatattgatcatgaaatacattatgtacagtaccaatcttcatgactttataaaccaaagagagtattttagtttcttttgcaggcttgacaaggtttgaaattacacctttggtaacatgaaataataatagtacacttttgtgttaaacacttttttatttctctgaggctaaaaatattaagataaaaatttcttaatatggaaacatttttattaaggagtaaatacagcctagtcatttgtctataaagtagtttgtctaaaataaaatcacatatgactgacttaatgggcaagtttctttgaagaattctttccctgcaatggaattgaatttgtttttccaagtggtaaaaatgattctcattcccccaccctactaaactcactgttaggattgtttgtattattttcttgtcatttctttctacttagtactctttttttttttaaatcatgctatgtatgaacacgaacatagttcattttctataggttttatagtaattagcagtttaaaaactgaaaaaagaaaatgtataatactgaaaattttacaatatttttaagtgtataattttagtgtcatagaattggtacttcctctttgatgtagtgtaagttgcttattcttgagatggagtctccacatctaaaattttcaggataataagatcctagaagcattcttgttcttgtgcaagtgttgtgcttatagaaggacatcaatgtacaaaatggttgtgtaatagccaagaactaatctaatgtaccattgagactcctcaataccaatgccttagacattagagacacagaatacagatatcgctatatcagtgtctgtgtagacaaacagagtagctattatgtctacttcaatggatgcttacagcagagttggacactagcatcttttattgaaaaaagaaatgttatccaagatgctaaagctattcttttgtctgtggaaaactgcctgataagccttaatttttgagaagaggaaaaagaactcactgttctatgctgtgtgaccatagtttgtacattttgagtttgcattttggttgtttatttgttgtctgtattatactttcctaatgaaaagactacatatagattgcattcacaatgtacatgtgttcaaaacatgttgtgtatatatatatatatatatatgtgtgtgtgtatatatatatatatatatatatatatatatatacatacatacaattttcttgctaataagtgtattcgtttaccttttgtagttaccaaaatagagtgcaaaagacactaactagatctttgtcttccaatgtgccttcagaactttgtgtgtgtgtgtgtgtatgagtgtgcgtgtgtgtcagtgtgtataaacatttgaaagtatgagacccatgggaacatattttttaaagttttgctagcttaaagaataaaaataattaaattaaaaaaataattaaaaaataacgtgggagaaagacgatggctcagtaggtgcagtgcgtgtctctcaagcatgaggacctgagtttgatttctagaacccataagaagccagctgtggtgtatgtgtcttcccagtactgggagggagagagggcttatccttggggttcactgggttacacagcctagcctatccagtgtgctctaggctgatgtgagactttcaaaaaacaaagtgggtggctccttaggaatgggacctgaggttggactctggcctccacatatgtgggctcatctacatgcacacacaccaattatttgctgtactcatttggtaaataaaaattacaagaagctattgtagtaagattcctgtactagtctgtccctaccataccctgtataaataaaaatggagtcattcatgtaaaagttgtgtattaccaagctgaagctctcagctgttttttgacttcctggaatattattagattatagctataacagtgaaacatcccatattttcatttggtatgaaaataaagttcactcttccttaatctaaaaaagataacctttaaaaaaaatctaatataacccatcagctattttgctgttctaaagctgtctctaactttacaaggaaacggagtataattgtggtctaccttttgttttgttttttcttttttagcctttttttgggtctgtttttgtatagaaaaccaacctttttataatacatggtgtatgtatgcttataattctagcatttaggagatagaggctcttgaatccaaggcctgtctgacttacatagcaagactctgttttaatgcaataaatcaacaaacaaacaaaagatccttggatttttttatttgtcctatgcagtgaagtataatttgattatagaatagaaaatgaagtcagttagggttttttaaaatgcatgttgtaaggcactggggccagtctccatcactgaaaagcaaaaacagattgttaaactaaattgttcttatattttcctttggcagatttggtgactgaggaaaggacccagagactccttgaacaactaagacaaggtactgttagccctgttgagagtccctatctatcttatggagcaccttagggtttctaataaattcctccaggccacactctgttctttttgcattaagcctaggttgtttttagtttgggggtaccatgcttagtttgctttgtgggtactcatcttggacatgtccctcaaaagaggagtttgtgaccatgctgtgcttgtatgtaactgcatactgcacatgtgctcacctgctgtcctagctgtagttaaaggtagtgttcaatgatggcagtactaaaagggatgagacacttgtcctcagaatttaatttattttcatctttttcttcttggacattgaactacaaaaaacatgagccaagttgggtgaagggatcctatagccacagccacagcttgaggcaccgttctagcctcattcagaaaccattagaatgcttgccatggtgaggtagtgtttatctcttgaggttgggctgtctttcgatcacttgtcaataaaaagttatactgtagtgacttctgactgtcagaaaaggtgagctcttctgcctggacattcacagtctggttgtgagcacattggcagctctgtaagcagtctaagtagcctgaggttactgtggagcccaggctgccttgttgcaagaggcaatgacacttaaaatcaagaactagggctgttcacttggaattgttctgtggagccttttctaaattcctgacttgaagaaattgtgagagaattaagtggttgttataaattacttcgttaaaccaaagtgtggacactttgccccttcttagaattggtaacaaaacacccatggaaggagttacagagacaaagtttggagctgagatgaaaggatggaccatctagagactgccacacccggggatccatcccataatcagcctccaaacgctgacaccattgcatatgccagcaagattttgctgaaagaaccctgataatagctgtctcttgtgaggctataccagtgcctgccaaacacagaagtggatactcacagtcagctattggatggaacacagggcccccaatggaggaactagacaaagtacccaaggagttaaaggggtctgcaaccctataggtggaacaacaatatgaactaaccagtacccccgggagctcctgtctctagctgcttatgtagcagtagttggccatcactgggaagagaggcccattggtcttgcaaactttatatgcctcagtacaggggaatgccagggccaagaagtgagagtgggggtggggagggtatgggggacttttgggataacatttgaaatgtaaatgaagaaaatacctaattaaaaaataaattacttcgttaaatagtgatataaaaccagaatactactttttctgcatctgctgctatttactgagatttgatgacatacagatatataacccataagcacatgtacccagatgatgtattctgtgtttccaaccttcttgtgatctttcatctttggtatgtaaaacattgtttctcctattctttcctgtgcttgtttgaaaagctgttccagccttaagtatttagaatgtatttttgtagctgcagctgttttcctgtgtgttgggaagaatgtatatttatcttgacatgaagcttaagcatcatctttagaaggccatttgcctagggccttaattatagtcactatgacatttggccttctatcagttttttagggtgatggttacaagtcttcatatagtttggctccttatttcaatggaaatttattgtctcatggttctagaggctggaagtgtgaaataagtgtggggagagccatgcctggcttgatttgatgctctatgactcatttggccttgttagatagtgttcttcttgtgttagtgcttttctagactgtatttttgaactgtgatgcttttctcattcatgcttcattttcctgaatgcttgtgaaatactagaaattattgtttagaacttgtcttggcatccatggtctgcaaatggtggctttctgattttttttttaagttttactgaaacatagtccattttgtttattttctattgctgcctaatccatgtttatgaaatatctgagactgaataatttataaagaagagtttatttagcttggagttgaaggctcaaggtgctgcatatggtgatgtcttccttgttcacaaagtcccaagacagacaaggtatgacaagagacggagtgtatgtgtatgtctaaacataatagctggattagatatctattcccttaataattcacagtggagattaaactgcagcatgagttttggtgggatgacaaacaattccaaacacaatccactttatgctgtaatagaagttacaaagttgtttctgagctatgggtcacacaactgaaaatgcttactttttagtcctttatggaaatccttgctgacccatggtttagaatattttggatttcttcctcttagggaatatttgaaattacttttcgtttagtttttttaaataagatttattttgtttttagttgggggggggggtgagtgctggtgtctgcaaaggccaaaagcatgtgatccccttgagctgagttaaagggagtgctcagaacccatctcaggttctctgcaaaaacagtatgttctcttctaagccatctctctagcttacattttactttttaagtcatacaacttaaggaatgttaaaagatcatggatagacctggagggcatcatcctgagtgaggtaacccaatcacaaaggaactctcacaatatgtactcactgataaatggatattagcccagaaacttaggatacccaagatataagatacaatttgctaaacacattaaactcaagagaatgaagaccaaagtgtggacactttgccccttcttagaataggaaacaaaacacccatggaaggagttacagagacaaaatttggaagtgtgacgaaaggatggaccatctagtgattgccatatccagagatccatcccatgatcagcttccaaacgctgacaccattgcatacactagcaagattttgctgaaaggactcagatagagctgtctcttgtgagactatgccggggcctagcaaacacagaagtggatgctcacagtcagttattgaatggatcacagggcccccaatggaggagctagagaaagcacccaaggaactaaagggaactgcaaccctataggtggaacaataatatgaactaaccagtaccccggagctcttgtctctagctgcatatgtatcaaaagatggcctaataggccatcactggaaagagaggcccattggacttgcaaactttatatgccccagtacaggggaacgccagggccaaaaagggggagtgggtgggtaggggagtgggaggggtgggtatgggggactttttggtatagcattggaaatgtaaatgagctaaatacctaataaaaatgggaaaaaaaaagatcatttagcttaactgtcttgcctgtctgctgctgacaagagattttccagttgaggtatagaaaaacaaaataaacaaaattaaggaattaattttaaaccagcattgtatatgctatgctatacacaagaattataccaaattgggagcttaaaaatgaataaagatagatttggtggtgttgacctgtaatcccagctgctagggttgttgaggcacaagagtaacaaatttaagcctgtctggacaattcaatgagaacactgccttgtctttgaatgaatgaatgaatgaatgaatgaatgaatgaatgataattcaatgagaacactgccttgtctttaaataaataaataaataaataaataaataaatgggtgaggatataggtccctttcctatatatgcaggggttttgtttatacacagacacactgtgtgtctatgtatgtatgtatgtatgtatgtatgtatgtatgtatgtgggggggggagagacagacagacagacagaatgaatgaatgagaactgaaatactttcttctttgtccatctgtttacccagctgtctccactagtggaccttggctaatgtgtttgtatattaagtgcatagagagacagttttaaaagaaaaggaaatagagccaaccttgagttatagctttaggagatggaaattgatagaaagcaggattgagtagttaggcatccattttgaaactttcacattcagtccttagtatctctaaatttgtagaagggaaaaatacagacaagctaattccctgcatcccctctttatagttacagatacctttcttcagaagccgccagtattaccaagtttttggttctccttgagaaataatccataaaaacatgaatacatttaagaaattccttttccagaaaagtagtatccatgtattgcatttttaatgttttaaagtaatatttggagagaggcaggagatatggctcagcagttaagaatactgggttgcttttcagtggacttgggtttgattctcagcatccgcacggcatctcaaggtcatctttaacttcagttcctgagatccagcactctgttctgacctccatggcactgcatgtaagcagtcgctgatacacatgtagtaaaaatacacacattaagaaaaacttttaaaagattattacatgttttaatctcttattttaatatttttaaaaatattaaatatttttataaattttgttagaatttcatacatgaatatagtcattttgatcatattcactcaagctgcttctccttctaactgttcctagatctacttccaggcaacccccttccaaattcatgtctttttttttttttttttttccttaactcactaatgcagtttgtggtgttcatatactcagtgggtgtgacgccatccactgtagtatggtccatctactaggatccatatcatgaaagatagctggcttttccttccccagaagccaacagccgtcagtagctcctcagctaggggtagaggcttttctatgctttaatgttgaattgcttgatctttgcaggtaaccacagctgtgagttcatacgttcagcagtcctgacatgacaatgttttggtctggtcctcctggaactctggcttttcaagacttgttatccctttcctgataccctcacaatatgcctagctttatacttctctctctccccagaacctaaccttaaagtaatggtctctactgaaaatgctagttagtccctaatattccagacaataacaacaaaataaaacaaaacaaaccctgaactttgtggggaagggatatgatattgatatcatcttggaattgctactttatagcaatatattcaatgccacgccactttattctttgtttaaatacagaatataccaccagaggaacattttaagttttacctgctcctctgtaaaaatggacattagggttttgcattttgctgcagtgggtacagccttttcatacatgtggaaagaagaactgggggatactttttagaaatattttcaagatcaagaggtaatgagcatttgcatttttatagacattgccaaattccattctctcattaagattctgttccttttgtatactttattaaaaaaaagaacaaacctttattagtgattggaaatctggtagataaaagtgcatcttgctctaccagttagaacactttgaaacactgcctcatgtcattgtggatatatgatgtcagtgtataagaggagtgaatgaaagagggaatatttggaaacttcagtgtcttttcattaaaactaatatctatggctcagaggtgaagactactggcagcttttctagaggtcctgagttcaattcctagaacccacatggtggcttacaaacatctataaaggagtctgatggcctcttttgtcattgaaggtatacatgcagagcgaatactcatacattaaaaaaatacatagataagaaaaaaatattaaaaagcaaaacaacaaaacagtcaaaaacaacagcagaaataaccaaatcattataaattattaaatagccttgctactcaggggcacaggagctctatcagttggtagtagacatgggtcagttcagagcgaggccccatgatcacttagtagctttcaggaacaagggccaattgaattagaatcagcattttaacagacccccaggtgatttctgtgtactttaatgtttgggaagttctagtcaagtgttcatttgtggctcccaaggaacacacgtgaaagatacatttaaagaagggtagacatggaggggtatcctgaacttggttgttaattggattggtaaagacatttgaggtgttggagtgtgtagaggaattacagcagaagtctatgtggctttaccacttaaatctttcatatagggggttttgttttgttttttgtttttgtctgcaatattagggactagcattttcagtagagaccattatgttagagttaggttctggggagagagtagtataataactaggcatattgtgagtgtgtcagcgtttgagtcaagagtttaagggacagtgataaatcagaatgcattcctagaacaggaacacaaacttagtatttttgtctaagctttttctataaaaggccagatggaatattttaggctttgggactatataactctttgggactatgtaactgttagttatagtgaaagtagacaggttgaaattctagattatttatggttattacaataaaatgttatatgcaaaaccagggaataggagagatttggccttagggtggtggtttgttgctctgtctagtgtctttggagaatcaggaatgaactagagtgttgtgggtagttgaacaccttaacagttgatgcactaagtaacagaatttaggtttaaggttttgggctccttatgagtcgaggctttgtaaagctgtgcttgtctttcttgtaagcataatgcctaagtggcacccagcttcagattgaagtttttgagttcttgggccagactcaggtagtatacttgtagttaatatgcttgggccagactcaggtagtatacttgtagttagtatgcttgggccagactcaggtagtatacttgtagttagtatgcttgggccagactcaggtagtatacttgtagttagtatgcttgggccagactcaggtagtatacttgtagttagtatgcttgggccagactcaggtagtatacttgtagttagtatgcttgggccagactcaggtagtatacttgtagttagtatgcttgggccagactcaggtagtatacttgtagttagtatgctttaaatactgttacttcttccttttttttttttttttttttttggtttttcgagacagggtttctctgtgtagtcctggctgtcctggaacttgatctgtagaccaggctggcctcaaactcagaaatatgcctgcctctgcctcccaagtgctgggattaaaggcgtgcgccaccacgcccggctaatactgttacttctaaagaggcctataccaatggttctcaacctcatgttgtggtgaccccaaccataaagttacttttgttgctactttataactaatgttgctactgttctgagttgtaatgtaagtatctgacatacaggatatttgatgtaggacacttttgaaagagttgtttgacccccaggcaatgctgcttatattagaatacagttaaatgtggaggactacttaggagggatgatgcagcgtagaaatgacataggagttgctatataaaaaaactttctcaagtctaatcagatgtttacaagtacagctttattagtgaataatcataaggtaagctcactcatgtagtcaacttgtgccaagggagtggaaagatttagatccccataaagcctactttgtgccccttccttctccctgagatatcttgactttgtgtgtgtgtgtgtgtgtgtgtgtgtgtgtgtaaacaaagagaatctcacagactatattatttttatctgtattctttggctaacatttaagagctcttttcaactgcattgctatataaaatgttgctgtaattacattttactaccaatgggcatttgagagtttttaaagataatactgttgtttgaaaatgttcctaaatactgctgggaagctttccaaagttatcatacccattttttactctattagtactattttggttcatctccatttctatgtttaaaagtttcagaccagcctaagtaaaggggctacatgtatggctggcggtggtggtgcatgcttttaatcccagacttccgagaggctgaagcaagttgatctctgagtttgaggccagcctgctctacagagaaagttccaggacagccaagactagacagagaaatcctatctcgaaaaacaaagtggggggtggggggagtgactacatgtgtgtgttgtatctactggagtagtctgagagtagcaccagagcccttcagagtgtttggggacttgttaattattgtcagccagtaagtgagtagttctggtttatttctatgaaccttcatatacttgatataagcctggttttgctaaaatcattaatttaaataattaattgttatagtttgtattatttgtatatcattaaccgtatttaacaaataaatagataatgctgttttttaaataatcttattactgaggcttaacaattacactataaaattaatgattctttgaaaaattacttgtttattagttcaaatgattctggtatgggtactgaattttgcctgtatcaccagaaggcttaattttcttgaaaaattttcatacattttttcagttattttgtcagtaatttctattcattgcatcctgtctttggtgaacagaatcctgctgaccatgcctgttgccatgaatgagctatgacagctatgacaaactgtggcttgtgtctttccacagtgtcagaaagatattgaatgaagttttcgagccttttaaatgttaccagctcatcttcaccaatattcctggtttcacttgaaattgtgtttcttatactcattaaatcatttgttaacaatgcaacactaaaattgcataatacacttcaaataatatttagattatagaacattgtaaaaaagagaatataaaggagctaaacaataggttaaatacaggtagctagtattaggcttacaaaccaattgatagaaaggtgaaaggtctggatagtgtcaaagtggacagttgaattataggattgtgctgagctgaggacagaaacaggagtttgttgcctggtgattttggcagaggcaggagggagataggattagtccttgagaaagtgatggtttagtgctctatgctgcagtctatatgtcttgcttttgctttgatccatttctgtcctaggtttgtgggccatttacatgtattgtttttcagtgccttgctttagtgtgtcttggtaattttaatgtacaaagttaatcctaatatatggtggtagttgtttatttgtataaataaggttattcacctttacgttggtacctaagtggggaagcttgggacaaggtacagtcaagaaactggggctgcacagtttcttcatagccatagcttgctggttttcagaaacatttaaatcaaagtcagagagctttaaatgaggaaatatcctacagtcacacttagaacagtgtctcattaatgcctgggttttttaatcttatctggttgaaaattgaaattaaccatcacagcattatattggaagctttaattacattttttgtttcatcttattttgtttcatcacagggtaaggggatgtctgtttcttggcaataaaaatatacttcttttaaagaggtaaattttcttagagttaaaaatgaagaggaccttaattttaattacttaagtttccaaaactattaacctgattacaacttccattagtactaggatatttgttaggcaaatacacttaaaagtagtttattttgtatgtaagttgctatcctagtcattttctaattcttcacgtggtcactttaggatttgtttgcctataagacctgcatgctgtatgttttacaaataaaacaggttctgatttgtagtagctttagcttaagtggcagaatctagatttgaagttttagttaagaatatatcttaagtctctctatggtatgtttctcttaatgagattttaagtgaaaatattcttttttaaaacagctgttggaaaacacttttggcaagtaaaccttagtgaattccttgaaggcagtggtaatatttggtaaacagcactttgtgagacttttaacttctttttgccaaacttttgaataggagaatatagtgtcacttagagaaacatctacttgctaagagctttcccctttcctgaatgataattttttgttgttcttaggagtgccaatagctaactccttgcccatccatgataggagcttgttaaactcattcactaattctttgtaagttattccttggattttctacctttatctggcttgctaatttccaaacatggtatatctttgttcctttttgtagtacttattttgtagatgtaatactttaaaacttttaatgaatttgttttgataactttatacatgtgcaatcccttaatgtcctttctgttgtcccgtatctcctttctaaccccattagtctccattctaattctccctttctctgtctgtccctccctgtctgtctgtctctctctttgtctctctctgtgtgtctctgtctgtctctctctttctctaagatccatagagtttaactaggattatctgggtataaatgtagatatttggaaaacagcttgttgctgtggtaatttacctgggcaacaatagtaagcttcccctgtagtgtctaagttgtttgtagccatggggtttcagatcaagttacagtaccagatatgaattctctgttgtggagtaggcctcaaatacagtaaagtaaaaagcagttgttatttccataacagttatacaccattgcatgggtgagcacatcttgcctggccggttggtattgcagattttagggttcatggctgagtaagacagttgatgcctttactccagcaaacggcatagtactttcaggtacaatgaaagctaactaacaggaagaagctttcaacttggttccagcaatgccttacaaccagtgtatgtggtgtcttcagcaacagggtcttattaaagtagttctggtgggcagtctacaagagtggtaagagcctaatattgtttgtgaagcttccttgatcctaaggcttagcctatatcagttttgtctcaaacacccatctggatacccttctcaaacatatacaaatattaaggctagagcaatgttcatacagaaaatcagactgataatgagtggtttggctgttctgtgcatgctttttgagtacttcgactttatactctgatcctgtgtttggtgttttctcctgggtttcagttgagatgataaatacagctctgacctccttacattacttttcttctaccatggcctctctgtcagttcattctcatctgttcttctaggagttattctgttttattctaaacaccttttgcttatctatagatttttgttcctatattttaaaaaaattgaaataaaatgccatcccttccccctctatttccttcctccaaccattcctaactactttctctctaactcctcctatactccccacaactctaaaattgatagccttttttcctttggttgtatttgttacatccatatatgtttatatgtgtatgcaaaaataggtggagcctgttgagtccacttttactgcttttatgtatatggcttcaaggctgaccagtctgcattggacaaccagtaagggagaggataattctccttcttccagcgtttaggagttccctgtagttctttgtctaggggtgagatgttgctagatttccctgtcccacgttaacttgcccattgtgtttcaatcttgtttatgtagccatttccaggagagactgttttatggctgacttcctgatcttctggctttttaaatctttccattccccttaagtgatattccctgatggaggagctgtgataaagatgtagatatatatgttggggctgggctccgcacgattgatttctgtcttatgtacagttgttttctgtgatgctctccatttgctgtaaagagaagcctttttgaggagtggttgccacgtttgtctagggaagatgggccacaccttcagaacacatgtaagttagaagactctaggacataaaacatatgcatctgttacacttttcagcttaaatgagactaaagtactattgaagctttttctcttctttgattgtactgcatgcccttgggcatgtgttactatttcattctatgggtatgaatttctaaatagcatagagtttagatttcaatatagtgtaatagtctcgtatagtaacatacttcatagaccttcttgtactcaccccattcacacacacatcaatttcttgtgtatttttcacaacttttttttttcttactatcaagtatgtgtagaagaaaggattcgatgttacctcttcctgtttcaggggttgatgactggtgatgtgacacctggcagtgttatttaagcagagtgagtttgctgacatccattcagtgttataaatttctttgggaacagaatcataattcagttgtattcagggtttaacagaggttgaatcaatatttgcgttcttattgtaaggaagttttagagatatttttaatacaactgaactaaggtaaagaaacttgggaccagaaaacgtgagtgatttgtctgatatgatccaggaaagagctagctcttgagggagctgcaatccattcttgcttccactgtagtataatgaaccaaaggttggattcttctattgtcaaaattcaattttgatttttgccaaccttttaaaatatttatgtggaaactgagagatcctagtaagattgaacatacatttgtaaactaatgttgtcatgtttttctcagtcaggatggtttcaatcccagaatactacgaggggaagaatatccttctcacaggagccactggtttcttaggcaaggtgcttctggaaaagttgctgagatcttgtcccagggtgaattctgtctatgttttggtgaggcaaaaagctggtcagacaccccaagagcgagtggaggaaatcctcagtagcaaggtaagtttgggagctgagcgtatggaagggggttaaaagaacatgcttgtgtggattttgtgaagcattattagcttaatattttgcttcagtattcaaaagtaaatctggggaaaaattagtaagtttctgcaatatggcagtgaactagaatcaggaaaagaaaaaagctttcttttatgatagaccaaattttctaataaggtttaaattactctttgtttttttttttttatttttattttgaggtaggatttcactgtgtagccttgactgtactggaactctgtagcccaccatgattttgaaacagaaataaagaacatagatagaatatatatattattaatatattaacagtattggggtgggggaggtattacttatttaactgtgctgaagacattttcacactggatagtattttcttataaagtactggtgtgtttttgggtgatcaacaggatccctggcctatatacattaggatccagttctgacaagtatttcacatatcaccaaatgtttactggggaccaaaattacctcaggttgagaaccattgatttataggaatgcctcaaggaaaagaaacttgattggatggtggagattcaactaaaatagttgatcatgggctgtggatgtaaataaataacttagatgtagagtgcttaacaagaatatgtgaagaagctcagagttccaccctcagtatgctctcagcaagtaaaatagctgatcatgaagtatgttttagaacgttgaaaaggtatcagtaaacttaaagtaggaagtaacgggagtattggtgagcagaaagcaggtctacttatccagagcacggacagttagtgtttgtgttgctgactaccatctgttttcttggagcacttcttgaactcgctgagtcttaagtctgtgtctgtaaggtgagcagtcttctgtgccccatgaaatctaaaatgttaaaataactgtctttggtggggagagagtttacagtaggctttgaaagtagattagaataaataactacccatagaataaatatcttcccatttgatagcttttcgacaggttgagagatgaaaatccagattttagagagaaaattatagcgatcaacagtgaacttacccaacctaaactggctctcagtgaagaagataaggagatcattatagattctacaaatgtcatattccactgtgcggctactgtaagatttaatgaaaatttaaggtaagaacagatacttactaacatttgaatttcatactttatagacataatgttaactcctctttttattgaagttgttttgagagtgatgcgaaattgtcataagttaatagtgactttcgataacagaattctctttttttgttatcattttgaaatgaaacatagaaaatagctattatatggaagatagctagtatatgccaattagaaaaccttgccatgacttcatgaaataggatataagcaaacagtgaactagaagaaaataggatgtacttgggtaggaaggtaggaatagttcactcagtagttgttttagtcaccttttcatgtagtgtcagaatcccctatgcttccattctacctacacactatatagaacagtgatcaaaattaggctcaagttttgcatattaagaaatggcttgtatgttatagtcactctgtttatatttgaaaaactctggtggcattgttaagggacaaggtaatgtcaaaaataaagttaaatttaaaacatttgaacttcaggctacatccttcttctaaaaacaaaaacaaaaaaacattccactattaagtattttaaaaataatagggttatttggttctagaagggggaacaaaatacccatggaaggagttaaaaagtttggagcaaagactgaaggaatgaccatcctgagactgccccatctggggatccatcccatgtacaaccaccaaatccagacactattgttaatgccaacaagagcttgctggcaggagcctgatatagctgtctcctgccagtgtctgacaaatacagaagtggatactcacaactatccattggacaaagcgcagggtctccaatgaaggagctagagaaagtacccaaggagctgaaggggtttgcagccccgtaggaggaacaacaatatgaactagccagtacccccagagctccttgggactaaactgccaaccaaagaaaactcatggtgtgactcgtgtctctagctgcataatatagtagaggatggtctagtcggtccaatgggaggagaggcccttggtcctatgaaggctctatgccccagtatgggggaatgccagggccaggaagcaggaatgggtgggttgatgaaggggggtggagtgagggtggggttggaggggaaaccaggaaaggagataacatttgaaatgtaaataaagaaaatatctaataaagataaataaataaacataaaatgaagggctggagagatggctcagcagcaaagagcactggctactcttccagaggtcctcggttgattgccagcacccttatgatggcttgcactcattctaggagattggccgctctcttctgtcccctgtggacactagcaaatacatggttcacagacatatatgcaggtaaaacaaccatacacataaactaaaaataaatccttttagaaagtaaatgaatataaatttcaaataatggcatttaattcataggactgttatttttgacggtgtgtctaaatatacaagttaatctcattatatagtcttatactagtttaaatgagaatgcatttgtttttaggtttaagaatatttgtgatgccctcctcttcaaaaatgcttaaaaggcaaagctctgattgtaaatggctttggcagtactccccataatttttttttaacataaaagtgtaactcttaatagcgatcacactgtgtgagagcacaataccaagcattttggtgtatgcagttgctaccactctcttacagtttcagggttgtgctttacagccctcaaagcattgctcacttgccagtttcttcctaactttaccaagcttatcctaggcgaatccattttattcctgaggtggctgaggtaacactatggagaaaagggaagaagtcttggagttacatacataagtgtttacatagccaccttaaacttagtgagttttcaggagctggtgcacagtagatactatagttcttgtccacttaaagggggaaattaggtgcttttaaagggaagttttattaacagaaaacattaattagggtaaaacacatcaaaataaccttaacattttttgatgactcctttttctttttttatgtacattggtgttttgcttgcatgtgtctacataagtgtgttggaagccctggaactggagttggagttatgaactgccaaactggtgctgggaattgaaccagggtcctctgaaagagcagccaatgttcttaacctctaagccatttctccagcccccaaaataaaccttaccggaaggaccacagtatattacttttgtgttctttttggatcactattatttcttataccagagagagaccatgttagaaagcctaggtaatttattatttttctcttctatgtcaagatatgaatgttcactattctagctctagtcacatcataattatttctgtgaatcagatttaatagatgttcacatttaaatattgatagaacattagacttgggccagatattcagaaatactggaaatagcctataatagccatttaggggaaaaccagttataacagtcaccatctgctaagtcacagatatcacatggtataaaactgttactatcgaggggactcaggaggagggaattcaccatatctgggtccttggagaggagccaagatgagtttgtgtatggactctttcacaaagccctggggtatgtgttaactttgttgatatagaactaaatgcaggcagcactggacagcatatgttgagagttgaggaggcaaagctcattagttttagatatttttcaaatattaaatggggagaaattgacaggactaaaaggtgaggaagaggggaataagcagttgcttaagtagttggtcatgaggtcttgtattcactagatgggacagtatcagttgcatggaaaggaatattaagaagtgagaagccatcatgaggtcaaaaacagtcagaagagagagaataatctagtggcttggggaaaatacatgagatattaggaatggaacagtgatgaggctcaagggggatgagtttggaagtaggtttctaaaaggagtgaaagcaccgattaagatataggaacggtggaatcttaagtgtattattcagactctaagaatgtaatatgactagaataatgctgggaagggcttgtggtggatcctggtgcttgtttgggcattttgtgatgactatttttctagttctgtctctggctctgtctcaggttgtgagcttttttagaagtgctcctgtagggaaatcctcccttttctacctctaaatagaaaactataataactggaaaacatgttttaaaaagtaggttccttgagtgtacttgacccagcagttttggaggctcctccttccatttagcagaaacattggctctcctggagagctgctgcacttatgcttctctttcagagcccttgctttggacacagcttaacaattacagatgcctacttctaagtttgatgtcactgaccctaaacatctgtctctatcaagtttaatttttaaaagtgactcttacaatagtaataagagataattgagacagtagtttgtggggaatgagaagagtggaaaagaaaattgtcaaaatggccttacttagaatgtagtttcttggtccttatttcaatcattaaaaaggtaccttcatctttatatactcccaagtgtatcttaagcttagtataagctctggagtaaagtttataaaaacatcaaatagattttgaataatttgggatatctgtaggaaacaaagaggaaagcttattagccattaaaatggaatattttttccttactaattttttctttctgaagtgatttttatgtctgcattagggaaatgctacactagcttatttgctttctagcaagcctgtcttaagatgcttttccaacaaaatataattttatttctgtttactttctggtctagtatgtaaagaactcagcctgaagtcaaacaaaatagaaactagggtttccattgagtgaggttaactagtcttgcagatactaaagtaacttatgttattttattatggctttaggcttgggctctcagatgcagacagagtggagagactcaaggcacaggagtgtgtcttttgagttattctcattttctgtgacctagaaactctgtcaccattctcaggacgatgcaacagaatatcccttctgatccccattgttttgtaaatgagaaagaaaatagtgcatcctctaatgccctggtggatagtatcctctctgtgaaaggtctcttgctagatttccatttgaacagatttttttttcactccttagttgagatttgaagtgattttaagaccccaccctagtgtcattaaaaatgtttttttttccttctaatttttctcaataagatatcaggtgcaattaaaagaaaaaaaatagtctaaagtcatttgcttatttattttccttttatgagatagtccttgtttctggtgacccagaacttcttgtcctgtcctcaggagcttgtaataaaatattctctgtttctcagtatacctcttcctaaacaataacctccttgtccccattattttcggacagatcaatatcaaagtattgctgtacagtcaggtagatggaattgtctgtgacatattttttaaatactgacaatatgagcatttttgcaaagtgctcgaagccattttcatttttataaatgtatttcacacttggagtgatgctgcatgtgtgtaatcccaggattcaagaggtggaggtaggaagatcataaaattgaggtcatcctaggcaacataggtagttccaggccagccctgggctacatgactctgtcttaaaaagacatccctcaaagttctttgaatctatgtttaaacataactgttttactgctgtgaagagacaccatggccaaggcaactcttataaggatgacattaaagtagggctggcttacaggttcagtccattatcgtcaaggcaggagcatggcagcatccaggcaggcatggtggaggaggagcagagttctacattttgtcctgaaggcaaacagaagactgacttccaggaagctaggaggaaggtctcaaaggccacatcaaggccagatctcctaatagtgctactccctgatcaagcatactcaaaccacagtaacatttttacatagccctgaaaattaatttaataatttcaccttttaaatttagcatagaaataatttacatttttctctcttcctccctcacctcctcttttttccaagacagggtttctccctgtaaccttggctgtcctggaactcactctgtagctgaggctggccttgaactcaaagaaatctgcctacttctgcttctccagtgctgggacttaaggtgtcaccaccactgcctggcagtttataggtttctaatattttacatggttatattttagtgactatatgatattctatcatgttgatatataatgtgtaattttcacttggtataaaaactttatttcttgtttgaaaaattaggcttagggtgagcttttgctttgaaaattggattattagattaataaatgcataatttcaataattactggtactttatcctagtttcttttagattagttgtattaatttgtggttataacaaaactactctgccagttttaccactcagtagtgttgagtattccaacctgtcacttcctctacctttatatatgtgcaggtgtgtgtgtttgaaagccataggacaacttgaggattccttaggtgccattcagttttcattttctcactttgacgtaggatatcttgggctcagccattaaaggctactgaaaagataagagacaggatgtcactggcctgggactccctctatatgtttacatgtatagtacatgtgcagtggctaaactgaactaattaataggtgtgtgacctcacataacttttcttgtattgagatcactttaaaaaccagtgatttctagtactctggtatattgttattaagtctaataattactatattgtacaataaatgtcttcatggaccattaaggaacaattgtatagaaaaacatttttctgctatctcttcattaatactcactagctgcctgttttgagatgcttacaagaataacatactaaatgcatacaagttattcttttcatttagtctttcctaattctggtaggagattttgtttcttgttcccatttactgatgagaaagctgagggttgagtacttgtgcaactaagcattttaagtgaatatttaagtgagaccacaccgatctgagcccaatctgattccatagctttgtacataatcttgttgtacatcacaatgtatgctttgtttttcaaacccttattggagtttatattcagaaaacttacacataattggtatagtgaagtctttatactaaaataaaatataacaactcagagctaaaggaggaattgcaaattaaccatgctttttttctctgtacttctttaatacaattcagatttggtttgtaaatagattaaagaaaaaagataaggtttctaagtttcgttgtctctttctcttgcagagatgctgtccagttaaatgtgatagctacacgacagcttattctccttgcacagcaaatgaagaatctggaagtgttcatgcatgtctcaacagcgtatgcctactgcaatcgaaagcatattgatgaagtagtttatccaccccctgtagatcccaagaagctgattgattctttagagtatgtttgaatttatacacgttgcttttaattctaagactctgagtccaaatatatatacccttcactccctctaacccctgtggtacaaatatacatatgcatgtatttactctgcatatcctctgccatattgttcatggttatgtctgttgatgaggtcaatgtagagttttccctttcgattagctaatgattagagaaaggcctctgaataatttatccatgtgttagaggcttggtttttttaggtagtcaattctagcttcattggatcagagaccaatggctgcttaattacaaggttctaacttactaaaggacctcctctcctgcaatggacaatacctatagagaagctgttcgggttaagagaatcataggaattataaccctttagttacagtcttctctaaggcctggggtctcatcagcagttgttactaaggactacatgtgtatttggtagaggattatgtgaagtgtatacacacagctgccacttgctttttagtctatgctttcttagcatgggctcttgggtttgtttttttgtttttgtttttttttggactacaattatagaggcattccaacagctattacatccttacataatttgttttcaaacagtatatatctctgagttgttttgggttttttttttttttttgttacagtttttgtttttccttggttccatctttcctcacagatattctacttacttttgattctcatcatgccttgatttcttcagaattaaacacacatgatctttaagaaaggcttttcatgttgaggaaatgaattgtaagaaaagcaataccagagatgactgagacatttcttgtgagaattatctacttttattttatgactcagtttcatagatgttcctaaatatatacctcatttaccttacagatcaatagatgtatttggattctggagaaaactgaagttaatgaaacaatactactttttgacttcttagtcttggcttatgcaggcatgtaaagaaatgagaagagcttatgacctgaatcttttttctcctttccttgcttacaaagaaatctatctagtaaatgattgacgagtttgctctgtaaactcaggagaaataaggtttactggcccaagtctttcttcagcaagatttttttgtggggtgtgggtgggtggtagtctcccacctaccaactacctatcctgttcacttttcagaactcatcctttatcatttttctcacattggatatgtatttgcctgcagtttaacattcttagtcttccacatacacaaagtacttccatatgtgaagcattttaagcttccctagttgttagtatgcttagttgttagtgactgtgcagaatctaagtgtatacttagtaggcaaaaagacaagtatctggaaacaagaacacagcgccttagagtaaaggaggaaagactgggacatcacctgactgtggttgttttacaggggatcttcagagctgttgagatcattaaagcattaaacctgcattgtaggttgttaactgatttttcataacatgcttcaatgcttttactaatcctagtaattgttaatgtcacttgtgaagatgtacaattccagtagttcatcttaaatatttagattattagaccttttatattaaatgtaaacatgtgaataacaaatgtgtttatttgttggttactctgttagatagtaataaacatctttaatttctaatgaaatatttgaggcttgatacattttggaatttatttggactttggaaaggagctctaattaactctttgatagtaaattacttcattttgcttttccttagcattcctgatcaccctgatcaaagacacatgaaatgctaaatgtttaaactaaatgataccttctaaagacctatggttggtttaggtcagttaaatttgctatctaacatacgatttataaaaggactattggttcttatttgatccaggcgttgcagattgtggatctgtgattgatatttaaagagaccactttttttcttcagttattttgaaagctgggtgtgctggcacaggcctttaatcccagcactcaggagacagaagcaggtgaatctgagttaaaactcagcctggtttacaagcaaggtcctggacagccagggaggggtgcacagagaaatcatgtcttaaaaaaaacaacaatgacaacagcacacacagagagagaaaagaaaatgttttttttgcgaaaatgtttgaatcagagcaatacataggttcatacaaagttcaattaagtaggtttttatctatgataaaatatttggaatttttgtacatgtaattttttttttttgtttgccagatggatggatgatggcctagtaaatgatatcacaccaaaattgataggcgacaggcctaacacgtacatatacaccaaggcattggcagagtatgttgtgcagcaggaaggagcaaagctaaatgttgccattgtaaggccgtcgatcgtcggcgccagttggaaagaaccttttccagtaagctcttcaaagctgttaagctcttgggactcagagtttcaagttagaactgtgtaaagacttgggatgtaatttaagagcaggtgctaacatgatgaatgtgttttaccatggcagagctaacgagcatagaaagaggtaatattactgatacttatatttctcaggtgcttcttgagtgtatggaatgtagattaacagttttaagttttaattgaaaaatcagaagtattcagtaaagaagaccatggtttcatctgttttcattgcgaaaagcaagccttgcaagaagtgtatttttccatgtgtagattagaaagctaagaaaagtataagagatttcttttgtaactggctactaaaaagaaaaaaaaagatgttgggatacttttaaatcctccagataagagaaggcagaaacaaaagccagtaagtaagctgatacaggaaaacccacaaaaacaaaaaaaccccaagttctgtatacttaccagtaagtgatagcctctcctttgttgttttgataattatcctgttttcttctgatttactcactaaatttgaggaacatgtatcatttttcccttaaaatgctgcattaataaatagtataaagtcagtggggaacagggttaatttaggaaaagtgatgcaaagtatatactttttttttttcctttgcagagacttagcagaactaggtaatcctttaaaaatactttcattcagtcatttatgactccagaggaaactttttgggagattcttggggactaagaacaatattctgcatggagtgtagcgctttcttaggttttgggagaaaactacaaagtatacatttggagttagaactttcaaataataaatctacttggatgttaatttattctcttctctttttttcctttaatttttggtattagggatggattgataactttaatggaccaagtggtctcttcattgcggtaaataaactttttatgatttactattttatatattttcctgtatctttatacatatgtgcacatatacatgttttggctatgtattttaaggtgttgtttttaatttcaacaaaggcagggaaaggaattcttcgaacaatgcgtgcctccaacaatgcccttgcagatctcgttcctgtagatgtagtggtcaacacgagccttgctgcagcctggtattctggagttaataggtatatgaggcaacatcgttgtttactaactgtagaaactgagggaaaggagcttctgctcttcatcccctggtcctggttggctaagttagtggtaaaatgccttttgcatataggaaataccagtgctcattctaagagcttgtacagtggacacaatgccatgtggacctatctgtggtgaagaggaaatgatgtttaatctcatgtatttgcagaatgtataggtttgttaggaactaaaaatggagtctgggagggatccttatgaaggatgatttaagacaaagtcaaacttagtataaactcaagttgaaattcacaagaaatgctccatctgtgtcaaccatggcacactagagcagtcataattaacctgtgagcatccttttagatggtaatagtagcatttatagttaaagcctaaacacttaaaaaataatcccttaagggtaccttttacatgataaaaaaaggtactcattatcatcttgtcttcctacttagatagtacataagatttagcttagacacttttgacttcctcttatgtttccttgctttcatctttgtctttgcagaccaagaaacatcatggtgtataattgcacaacaggcagcactaatcctttccactggggggaagttggtatgattttatctatgtttttgaatgttagaacataaagtgttcactgactttttaatgttagaataccataaggtattagggcctctgagttacaaaggtattcctatttcagttgctgtttgaaaataactaccagtcctgccttgtgatccatctttaatgtttcccaatatgagaatagcctgatgtatgtgttcagtgacctagtcaggccctagttgttctcttgttatctgcagcaccctcatagacttatctgtagcttggggcagtttttttcctaactaatgagcacactcaggcctgatattaccagtctgtagttaatattatttgcacctgtaagagtaggtgtaccagttggtccctagagttaacagtgaaggagttaggaagtaggagacatttggccaaggtatgttcttctaaattcaaagatccatagcagatagtacatttgttaactagctctaaaatagggctagtataacttgaagcatgctcattttaaattattaagtgagtcaaatatgaatgtatttatggcattgctttttgcaatggatcattttatttgtagttgaaattttgctatccttacagagtaatttgtttttaaagtagattggtgctgggaatcagcctgcccctttcctcacccacccactaggtcttgtgcatgctagctacgcacacactgtactgctacgtttctagcccttgttctgccttgtcagttttttgagataaagtctcactaagtagctcagactggcctggaacttgcagtatagcccaggctggcttcaaactatctatcctgccttagcctcccaagtgctggaattacaggcatacaccaccacacctagctaccttaacataatcttatgtgacattatcctagggtttttctgtggcatttgtatttaaatttaaagattgactgttgaagtaagtaagaaaagaactgtagagtgatttcacagtattttaagtcactgtccttcagggatattgaagtggtgtaagtgagtgaggtttttataacttttgttgtgctgtacagttttgtgataaatcaaattcaacattcttcgttggtgaatgcctaagtatacatttccattaaagtattaaaatagaagataccaagtttgtgttgatgttgagtaatgtaaataagctacagcagaggttaattctgggttgtttcaagcttgtctgatgtatgttgagtaactaaatcattcataaacagagtatgatgattttccttttctttttaagtaagtacagtataagaatctggaaagaggaacagaaagaaagaagctatcgtgagaggtgaaatatagagagtgacattattaactgacctaggtaaaacattaagattttcagagtgaatttcagtaaaaattcattcatttaattaaaatactggaagtattttagctccttggacccagcagtttaatacaatcttctcttagctgtggagagtagaaaagcttgttttttaaatgaatgaactctgcctctggtaaaatattttgcattgtacaaacatttctttttcaaaacttcattacatggttattatcaaagctgttacacaacttttcttcctcagaataccatgtaatttccactttcaagaggaatcctctcgaacaggccttcagacggcccaatgtaaatctaacctccaatcaccttttatatcattactggattgctgtaagccataaggccccagcattcctgtatgatatctacctcaggatgactggaagaagcccaaggtaatggtgactagctctgtcttttctgttcctctgactgttaaacaacccatgcttaacactgaaatgcacattaactctgtatctgttcgtgcttatgataaggcttaagggccttttgtgaatgagaagactgttgaaaaagacattgtcagaaaagcaaaggtagtgttgtaagtcatattatttattctaaagtttggataataaattactgtcatattgaattctaggtctaactttaggtgcttttctgaataacaaataatatttaaaatgctttaacacttatttttcctacaggagattatctaaatcattccttcaagatgaatcctttaaaccaagtattcaggcacccctatgttaaattctgttccaacaacctaatgcttcattattggaagggtgtcaaacatacagtacctgcattattgctcgatcttgctctcaggttgacaggtcagaaaccgtggtaagaagaatagcagtattacactgtgtattggtaaggtggtggaagcttgctggagagacaccatgtcgctagcatgagcttacttttagaattactaacccgatgaagtgcaatcacaatcaagatgccaggacatttcctagaaattggagatgtttggaggccaagaatggacctcatcatattgggtcattgattctccaaaatctcattataataggaaatgtcctacttcaggattgtcattgttattataagctgaaattgaatctcttccctctctcctttaataatctaggggtgagtttttatgggggagtcagagtaaaatattttgctttaaagtagatggtttagttttatatggaaaatataggatgcttctagaaaattacttgaaatattttagctacttattcagcttataatatggtaattacagtttttgactaatgttctagtttttaaaagtttaaacacagaaaacttgctattttcatatagttgtaatatcctttctttcttttcttttttccattgaaaccctacaaagttctcctgtcttaatcacatagttagtgaaatgtactagaaaatgtttatttttaaactatattagtatctttgattggcaagttcaggatttgagtatgtattttcaaagaagatgattccaggacttccatcactgctgaaaaaataaaagttaggtatttgccagttggagtatctcaggatgagagtaaccatagagactttcagtatgttgagtagtttaggatgtttctaactatacattcactattgaaatgggggggggggttattgaatagaacaacttatagaacaaacatttcaggttttctagaatgatttgcaaaagtagttttgctatattggtgctttttcatggctaaaaatcagatgaaattaatgatttgctaatgcatatttatgttagtatagttgctataattagggcagaaaaggcaaaactggttccaaaacataaaatagattatataccttatagtatcttacaaagagaatgggttaattcctattaattaaaaattaattcattttattaattctttgagaatttttgtacagtaattgatatattttgatcatattcacaccaactctttctatacccacctttatatttttttgggggggaaggagtattggtttttatgagacagggtttctttgtgtaacaatcctggctgttctgaaattcactttatagactaggctgacactgaactcagtgatttgcctgcctctgcttcccaagttctgggattaaaggcgtgtgccacggccacctggcttatattattttaagtaacccattgagtacccacttatgttgtgtccttatagcattggtgtggggcattccactgaaatatgttggacctacccagagccccatgcctgtggaaaactgactctccctccactgacaactgtcaactatcaattgagctttttagctaggggtggagacacatgagaacctacccctcccttttggatgttaactggctttatcttgttcaggtctaatgaaggcagccacagctgacagctcagtaaacttaaaaatatgtataataaaaaggaaaaaaactccatagttactaagagtatagaaatgatactgctggagctaaaagagctgaagtctgatggaggctggggtattccatcagccagggccaggtattattgtgtctcatcaggattgctttttgtaggatctttttaaggcctaggggttgcctctaagaattaacttttgcatagcagctaaagtggtggaacaagtaaagtggaagctagaaaatcctgcatttttgccttgtttgttctttgagataggatctcatgtagcccaggctggtctcaggttgagagccagaatcataagcaaatgccaccacgtctggcttacctctttttttatttattttttttagttgcaagcagatcacaaatcctcttagatgtaaggaaagtgggtgttctggagaggactcagatcctgaaaatgaggaagtgagaatggcttttagccatttttggaaagtacagtctgtaatagtttaccttctggcccagagaattcacattcttctgcctgaacaatgcagttaatttttttcttctacaaacccctatggtatcagctggatgtcagggttttaccatttaaacctgatccagtcacagaaatggttgtttattgcagatgatactcctcatatgaaagaaaacctatgaaacaaaacaagttagcagctgcccatatattctacatatattgagagaagtataagacagtgtattaaacatgagaaaaatggaaggcacacagcagacactgttctatacagtttcaattgaagtccaggtatatgttgacagctgggtcaactcctactctctgagtattctccaacaaccccccccccccccgtaagactgaacagattactaattctacttcctgcccataaaaagttagattccaggaaaagggtcagaaaacctttcttataaagggccatgttgtaaacatttagaccttgtaagcgcatagttctgttgttacctctctgccttggtgttaaagaaagaaagcagtcatagacagtttataaataatgaacatgattgctttaataaaactttattcacaagatagtaatagagtgtactggctgtgtgggcttttgtttgctgacttatgttacagagacatttttattggtatactttcccttcttatttaaattcgtgtggcttttaaaaagtttccactgagtattctaaagataatccgaagagatggactcagatcagatagatcagagcctattcacaaatctctttgagacaagcctttaggtctcatcaggatgctgtggagcagtacctatagatattaaatattttctccttaaagcctgtcatccaacagtagaaaatgtgatacgtgtctttacactctgaagaagtttttctcatttgttttgtttatttgtttttgtctttctgtctgaaaggtaccacaatgtagtcttaaagaatcttatatctctatcttttatctctaccctgaatttgatttatgctcagaaactatcttttccccttttgtttttatttattaaataattgatgtgatacaacctaaaatttctgaattccagatataaaaattacactttttgaacatttgatgttacttacaattcacagacttgttaatagcctgacagtagattagcatctgtcttctcctgtcttgtcaagtctcttgctactttttactttcctaagggattacctcctgtcttcttttaaataaattcttagcaaactggttaactgttacttgcaagggtgccatcactggagtggtccagtcagctttcagtgtaaaaatctagggaatttctagctttcctatacgtatgtttctcccagcttactgtgtgcagcagttcctttgcggtgaaatatgctgcatgcttttcagctcccaaggcaatacagctgtgttccctctgcctagcactgttctgctattataagcctacagtgtggtacttgcatattagcatactagcttatgtacgtgagtgagagagatacactacagttagaaattactttttaaataaatcctgagtagccttctacattttttccaaatttcattcagatagttcactttctaagatcagctttgtcttcattcaagaaatcttgactagattaaattttaggaaaataggtctagtttttatcttccatgttgtataaattcaagttccgtaaagcttcctgtgactttcttttcatggccctttcagatttcagtaaatgaactcaaaggccacaatagagtcttctacttaattctaaaatgccacaaactttagattttttttattattgccagttcttcccagtactaagatatattactctgttgcacgacaagtcatcacatccataattccttaaagaaagttgtttttttaaatgtgtcacagtgcctgtaagtaaagaattctagaaagattggtgtgaatgactttggctaaaggtctttaagtcaaatggacctgaacactagagagagttgttaagggagagtaaggttgcgtagtagctaggcagctttctctcttcatgtagagttagactctccatgtgttgtctgcacatggtctgctttgagcttccttgcagcgtgaaaacctcaggggtcattgagcagcatgcagagtgactgaagtcttccagggtgagtatgataacgagcaaggcagagcactcttagtacctttcttttccagcctgtgacgtcaccacctcattctagtgcttaacagatatttccccttgtggtgggacgttagtctaggtaacagtgtaccttacaggatgggtgataatagtcttacctgtatcagagcaggaataacctgagacctctctaagtgtataaaataaaagcaacaaggagtagggtatggtgctgcagactgtactttgcgcactctggaagctgaagcagaaggatctccacgcatttgaggccagcctgggcaacagagttccaggtcagcatagaataattaaaacccttgtctcacaaaaacagaagtaaatgaaagcatcaagagatataaaagtttacttaggcaatgcatacatgttaacttatgtctcagtttattctttggatgtttacttagtcaagagtaagtaaatattacaacttatataaccctgatataatacttcattctacattaaactaatgtaattcatggtatccagcttactcatttacatgattttgagtgtaagctagataaaatctgacttgctgtacattttgaaataattataagttctatttcataatatatgaatttttgcttataaagagaccagagtacatatctagaatcatcattaaattttcacttaacattacatcattgctacttaacattacatcattgctacagacggcatcttttgaaaagttgcttcatgtttttttttgttgttgttgttgtttagtttagcatctctgaacctgacatttttcatccatacaattctcagcttgaggacatttgacaatatttggagttcgtcatcacaaaggggaagggcgtgcttctcctcaacccccagtgtgctaaggccatggatgctgccaagtgtcttagtacatagattatttgtgatagctaaggttgagaaaccctagattagataattattaggatctggccttgctgttaactatgagtatactttagaagttattgtagtaaagaataagtacatcctcagcaggtggacgacagtgtagtcacaagcattcactctggcctgatgaaccagagtgatggtgcagttttaagtgtactttggttttctgataatattgtctgttaatttctcctgtatatgaattttcaaatctcccacccccttccctctcctgttttggagacagggttgaattttaaaccatgctcactccacattcatggcagttctttggctcaccctcccaagtgtgtgattataagcatgtgtgagctaccatgcctgggccctctctctcttttttttaaataaatattttttgatgaatcaagggttgatttttagggctcctgtatcacttgaatgaatttacacatgaaaataggcaaaacctgacatttaaggaatcagggagaaaaatgtttcaggagactactaattggaaaaacgatgtgaactatgtatatttgggatgaaattaatgtatattattattattctacctgtgatattgtattgattattacagatttgttacatctgtaaagaaatttttatagaaaagtcttgttttttaaaagcaacttcccccaatctatatggtttattctagataatagccttgggtgttggataattcttttcatgtttaatggaggatttattttggaattctttagtgaatgaaagtttttctttacattgtctgtactgcctcattttctttaagtatttaggttttggggtttctttataaatgtattgaatgtgttatcattgtttcttggctaatgatgctgcttttattttcttcattacttttcatattctgcttttctcccatgtcctccatttgtaaagcccttagtttggggtgtttctaaatttcatatactttaagctaattcttgtgggaatgtaaacggaattcttatatttcttgattatttttctggtgttttggtgtatatttgattcagaagctcttaattactgcttggattagtgctttgatatcaatgacttgtagcaagcgataataaataaaatttcagataagattaaggttccttgcccttaaaaagaaacaaagaagtattatactgttttgtttctctaagggagaacataggtgaggcctgaggagaagaatatttctgaaaatcctcagtattagtcattgatttcatagcacatccagataatcaggagtggtgccaatcactgttgaagagaaagttcttgtatttttttaaaagcgttgactaaatggcaaaagaatatttctgtatatctgcctcagtgatgctggagcactgggattagaacatagttgtaggatccttgttatggattctcctaagttcagggaagctaaaggaagactaaactgaatccttttgcgtagtgtgatatatagaaaatttgaatttaaactttagtgttgcatatcatttgagaattctgtatcagcagaactttatgcaggcaatattaaattttaaattccctttgctgctgcttataatttgtttctccattttataattataaattattctcccaagatgcagaaatattctaattctctactggtttgataacttactgaatcacagttgggaatacgtgattgggacctgtgtggtaatggattttacacattctatatactatatgaatttcttgatttttcttgaaacacaggatgatgaaaacaatcactcgtcttcacaaagccatggtattccttgagtattttacaagtaactcttgggtttggaatactgataatgtcaatatgttaatgaaccaactaaaccctgaagataaaaaggcaagtattttctattttggggttagaaaatgaccagtaggcaccctgaaacctagccatttctaataactatcacataggaaagtcattgatctcatattttctcagtgtttaaatcataatatttataaggagataaaatttgctttgtcttaaaactgatacagagtatttgagagtaacaaatgcttttcagattaagttgttattccttcctataaggttgagttgaaagagaactttaacatctttgtgggttttatgtaaagaattccttgttttctctaaatgggtggggggtcgtgctaagaggaagtggactccaattgcttttttatattgtatgagctttgtcatttcattttgcttatttgaaagtttaaactgtgttccttctgaagttaactcagattttgttttgttttgtttttgttttgtgagacactgtctctctatagctattgtgatactcactatgtggtccaggctggcctcaagctcccaaagatccacctgcctctgcctcctgagtgttggattacaggcctgtgctactatgacccagctaccgcatatattttagtatatttatctgtcttaagttaaacgtatttagttattttactttaggggatagaagtactaggggctgaacctagagccttattctctgtagtttcctccttaaggtagttacgttttgctatgctaatgtcttgagtcctccagggatgtgggagtttacctctaactggttctccaggtcaagccccacaattaaaagacatttgctccatctactttcattcttggagcttctctttattatcatttttttttctgtctgacatgtatttagaataccagagtatggctaaattaggagattgatcatagtgaactttcagcttttgattgttagtctttagttcaccctagggttttcattttgttttgtttttaacactagtgcagcacattaaggattattttatgttctgtcagttttgttgcagttgaaatgtcagttatttgtttttctggctcttttctaggttttccacgtttggttttctgaaactttgggctttctctacctttagatgggtgtttttcagcaatttgggaatttcttaagcatttgtttcttcaaatgttgctacttctctaccttctcacagaattgttatatggtagaccaatgtgtccttaggtctataactgcaaataaatactttgcttttggactaaagtgtaaataatttaaatttttcaacagaaagtcagctgggttgaaaccattccattgagtttatatgttttcatttttagaaagttcaacttaatcttggatatctcctcataattgctgtaaatcctttctctcatagttcacatttaaatgataggcagtgtccgattctgctgtttgagcccagtctaaaaccagggtaccttgtttccaagttgtcgttttgttaatcattattcatttttctttaattcatattctttgaggattctattgaattttgggggatgtagattaaagttgaagctttttataagaatttgctatcaaggaggccttcataaagcagagcctctaaaacatgtgctgagtatttcacctttgttgaggtgaatgcagttatatagaccagaatactgggtcagggttagttttccaaagagactttctgttttccatccagtgcattaatttttttaaagtatttgatttaacctgatctctcaaaaatactttgaacatatcaaaactttaaaataatttagatcatttcagttaatttttcattgacacccaatgtgcctttgcatcttagcatagttcatgttgcttgtgaattccatattgaaagtagagaaccaactcattccactagctcggtagataagaggtttcaatctaaatgttttatttgattttttcctttgctctgaagatacagctcttttattttacttagtgtgtgagtgcgtatgtgtgtttgtgtcttgatatcagtatctgttttctaatacaatgcttacatagaaacagtggtgtcagcaattcattgcatcataggctaaggagaggaacaatttacagaaaatgatttgtgactatttaaaaacatttgtaagaatgaaagtcaaaagtagactgaattgtatttgttatttaccagatttttaaacctgcaggctttgacagcatactctagtaggccttggccaaattcatttattactagtagtaatgtgtggcttgcctgtcttcaactttgtgttcagctagtttgcattcttatcttttagtcaggtgtcttgtaaacaacatagttgttatagttgttattacagtctgttagttattgacccattttggagaatttaacctgtactataacctgtaattttgttggagttacatgttgttgtactaagacagacctttgcaagggggtgagctacatcccaacctcaattttagatttaagttttagtgcttaattttgttgtacctagcttaattatcttttctgttctctttttttccctggtttttagtctcttagacatagtcaaagtaagacacaagctggccttaaactttaccttaaacttcctaccttcttaaacgctgagattgtaggcatgctctatacacctgaccctttaggttgtttgttgtttttcataattttaatttgccacttcctttagttgtatcaaaatgcattcttttccaacttttttagtactttactttagaaaatacaggtattgggtatagtattcaagacaggatttccctggaactctctgtaaaccaggttgaccttgaactctcagagatccacttgtctctgtctcttgggtgttgggatgaaaggcataagctaccaccacagtatcttttcttaagcctaacataaatggatactgtgacctttttttggatagagaataaacaatgcctctattttgctataacaggtcatttgttattagtttttattatttatttatttattattttattatttatttgttgttattagtctgttttatgctggtgtaggagaaaaataggtaatttctaattaatagaagttcacagttctggctgctaagcagggactgacatctgataaatgcctcctcttgcttcatttcatggtaaaagagcaagagagaataggagattgaacttacaaccttatctcctttaattggcattgattcattcatgagggttgtctacccttacaatgtagccgcctcctgttagtcctcccctttcaaaacttctgttaaagattaaactccaccatgtattttgaaaggaacagaagtaaaattagtgcagtctatgcaaaacatactcatataattagtcaggatcatcacctttctgctgccttgattttcttccacctgccggtatccacagagacttctgtggagagtctggaatctggagtcattctacttctgtcctaaagaatactaaagaattcttcattgtggatgataccatatcgctccagtttttattcttctggaaatatctttatttcatcttaatttttcaaatatctttacattggtgtggattgttacattagttgcatcggttacattagttaaatctgttgtatacttggaaaacatggtcttttgggttctactgtatctgttgtctggtagttattttgtaggtaacctatctggacttctttctgacttattcttagatgcctgaatgtgtatgtatgtatatatggtaggtatggtatttaaatttgtgtttggtgtttcatcatttttgcaggcaacatgctcttacgtactgtttgggctcttttttttctcttgtggagctccagtcagttgggtatggctcctttgtgaaatcaagtctgcatctgtgttggtgccatgacactatcttttcatttcagtactttatttataatatttccccctctagaacttgttatttttggatgatggtttatagtgaataatttacttgtcatttcacaaaaatacctgactgcctgtttgctcaagagtactgaacagttataaccctcttacttctcctctactttatagagtagcatttctataaagtctgcttttctagacttatctacacttttcatcaaattacataagagctgttactaaaatcctaagccagaatttatgcggttccgctttttattgtttgtcttagtcactgtgaagagacaccatttaatcaggttcttgcttatactctcaaagtccattgtcatcatggcaaaggcatggcggcttgcaggcaggctctgaaatagttgctgattcttaagcagagaggtagagagcctaggcctggtatgggcttttgaaacctcaaaggccaccccagtgactctttatccaacaaagccacactctctaatcctttcaaagagttacactccctagtgactattcaaatatatgagcctatgtgggtgattcttattcaaaccaccacatagagactggcttcaaactgatgaccctcctgcctactgtgtgctcatataatagtgtgtgccaccatgttctgcttgatttctcttgatgtaaatatttttctctaggagaattaacctttatcctacagaaactatataagaaggggaggctgcagatggaaaaaatttgaaatgtatatcagttcatatgtaagtagttaggagaaatatagataagttgacagtagaaaaggtaatactatatcgaagtgtttgtaatcttttcatttgggattatagttcagaagaataatttttggcaaattataataacttttttctttgtactatagacctttaatattgatgtacggcagttacattgggcagaatatatagaaaactactgcatggggactaagaagtacgtgttgaatgaagagatgtctggcctccctgctgctcggaagcatctcaacaagtaagcacgcccaggcttgatgagccttttcctgatttgtgaactgttacacggttgccttggtaaaggactgttctgaatacaaataacgtagcatattaaaaaatgcttgcccttgggtttgtaacaatgtgatagttatctaacttaagattattaaaagactggagagatggctcagtggttgagaacaccggctgctgttccaaagtaaagataattaaaacttaatatctttattaatgtatgtgtattcctgaatatggactttgagtagaacttagtttcaaaaatcactatttgcttctaataaatttctattgaaaaagtaaaaatgttagcagaaaatgaaaatatcttttgaaccagaagttacttacatatttttttaacatattgcacagaataatggttccttagtctcttagtagaagtagttcttgctgatttaaaacataatacactcagaaaatagaggagtcaagattagctgtagtcagtcattcagagatttagttctactaaggattatcgatttctgagattcatacttttcacttgccaaggccacagcactatggagctggcaaaatgccagatttgttgataaggaaactgaggtttacaaaactatattttactaattggaagggaaactgaaacataaatgttttgactgcttatttaaagccacagtctctacttctacactttcactgctacagcctgtcttgaactgcaatataaaaaaaataaaatataaatataaataaagttcctggaatttataatatacctatctgaagggttaaatttcttcaggcaaccatcaaaagccataaaaaaatgtttagaaatatgcacattgtaacatgcttgctgatctttgaaagcagaaaggtattctatggagctaatgctgcattattcttagatgaggacttgttagttggcttttgagtttggggactattagctattcgaggctcttttagattagatagacgctccagaaattcagcacacacaagagactgttttacttcatttgtttgcttgcttgcttgcttgcttgctcactctcttccttcttgcctccttttcttcctttccagatttctccccacacctttttatttctgacagaatctcattctgtggcctagtctgacctcaaactcagatcttcctgcctaggttcagcctccaaaatgctaggatcacaggaatgaggccaggcttggcttaacctgtagtttgatgatgtctaccataggaattggtacacaggatgctcagtttgattgatgcttactaagtctgtagtccaggtacactgacaagatgttgttgtactccttgttgctagagtaatgcattgatgtgctactgtccagttgtaggcagatatgtttgaaatgtgctaacttgaatttaataactttagttttgtttagtttttaaatattgaaagttaaaagatgttgtagaattttgattaaatttataacttaattagctcctatccaaaaataattttattatagaaaatacttagtgtgtcttttgctttgcttttcaggttgcggaatatccgttatggtttcaatacaatccttgtgatacttatctggcgcatttttattgcaagatcacaaatggcaagaaacatctggtattttgtggttagtctgtgttacaaatttctgtcatacttccgagcatccagcactatgagatactgaagaccaagaatttagcattagaacatctatgcatatggtgatctaaatgcacaaaatgtaaaatgtacttaagacatctcaccttttgttaagacattaaaccatcttaaattggagcgtggagtaaattatggtccattttatgtagcattttaatgtttatgctcaaaacctagtgaacacactgtggtatgccagctcagaactgcagtagtcactcaaattatgattcaacattttaatccttggaatgcaaagggtaggaagggggcagaagtggggctatgggagcattgaccagtataactgtgcagttctggaacatattaattaaaacatgccttaacatgcagtcctaatattcagtgcaatggaaaatgtgcagacagaaggcctagataaattagttaaggatttgatttgatttgattcttcaatgttgattttttttttctttttaatcctttgagaggtggggtttaattttgctaagaccacagccatgtgttttttcttcctgtaagttacaggtggtgtcaaacgcaaagactcgttctgattttctttctgaataaatgtgtgttgcatatcattttttataagtaattagttgctcttatgatcagaaggccaaatattattctaaagacactaatagatctggatgaatttaagattctgtatcaatgtatactctgcatttgaagcaaagtgaaaacatgcacggtaaaggaaaccacttttctagtctgcattttgatcaaatggaactctggtgagatgtgttttcattttgaagaggatttcttgagacgtgatgagaggtgggattggggaaggattcattatatttatcctctcctccttataaattttcccacaggacttgccccatatgaacatgcattattatgaaggaatgtagttgcagcttttaacattaagaaaatgtcctcatgtgtttgccaacacacactaatttgatcttgaaagctgaattcctttaaaaatgaataatgcataagtatgtgtataaaattaaataaaggattttaccatgtaaagtagcaaactgttgaatgagtttcaagtcatcatttctttgcatgttgttttagctttagaaagacatgcgttatagaaacaagtaatagcaaaaaattgatgtatatttattgattcaattccctttaaatcttactagtttgttactattttatccatatttttaatggcttgttcagcataacacagttataattaagctgatcaagttgtactacatttaaatcatcagcagtgtatcttgaaagtgcttaaagggttagttcatagtacaagaaattaaatgcaactttacattttaattttttgtcaattaaaatacaatgtagaagtttattttactattgtggacacaaaatgtaaaggaaaccaactttttccatactgatgtataatcttgaaaaggaaaaaaaaaaaaagcttctctgttgaagccagactttgtgtagtaaaacttttaaacattattttaaaagaaatatgtatataagtatctgtgtattctttggaatgattctgaagtctctggtctaggaccatgcctgtataaggtgtgagagaccatgatggtgtgtgagaatggaataaatgatgcctttgatttaaggtggcccatataatatacattgagtactccatgtctccaaatggatttccatgatgtaatgaaaacacactaacctttttatgatttttatacatctgccaaaatatactgagaatctgataaattgtctttgggtctctgaaaagaatcaggtgcaatgtgggcaggcctgtaaactgaaccagatatgtgtcttctattttattgctcttgtaatctaatgtaaagaattgctaactaaggctgtgctgaggaggtcaaattaatttttatttgtttagaattctgttgtcaaaagaaaggtaatgaataaatgatgctcatcctagaatgtataattttgaaattagtatggagtaaaatgtgagagcgttgagctttatcagctacacttgcattcaagtcatattgtaagagtttggagatgtatgctctttgtaatttgctacagtgtttttagttctgattatatttttcatatagattattcaataggacaactctgttaaataaattaatttcattcacctcatttggcaaaactgtattctgaaccatttagggtttttcccttatctttccttctctgaactctggcatacatatttgtacactgtaatgtcattgtaactgtttaattgccttggcaatgctaatgtatcgtaacacttagttgagaaaagcatgaccgggtcatatgttgtttgacttaagggtaacatagaataagtgtttctccagtctgccagacaaagcttggtagtgggaggggactctgacctctcccttttgtgtttgtctataggaattgattgggaaacttttgttttgtgttttttgtttgtttgtttgaagtgtaaactgatactcttttataagaagtaaatacaaacattattgggtgcctttgtttgtaaaccaaaaagtaataaatgaatccctatatttctattatagcatctattgtatttttacattgtggaaaccatccatgagttaaaatggctacgatggcaaaagtagtccttggatcttttttctttcttaggtgtcctcatctattctcatcatctttttatttatgtcttgagttgttcacacagcactttaggggaagcatataggcagaatgaacatttatttaaaagtatttttatatagtgattaataatgagacagatttttttttaatgtaaataaaaccgggagaccaccagcgtgttccaaggatgaatgacattatgttagtttataggttcttcaccagtagtagatctgacttcatttaaaggattattcattttcatagagattgagtgaagtacttggcgggggtgctgagagtgtgtcaggatggggttagagtgtaaatggctttgtaagcattcctttctaggctgacttccagctctgacttgaaaccgtttgcaccgacttgctctgctttaagaaaaacattctaactgcatgagaagcttagagaaaagggtatgtgctgcgtaacttactacaaaaaatgagtttatcagtctgtttatatatgaaatattttcttaataaagaaaatttgagcaacattaagtttgatgtactcctttgcaaattgatgagtctaaaaatgcatttacttaaaaaagctccaagtggtctgacaagtttaatacctttccattggcttgggctctgaggaagaaagctctcttcattctgtgtgtatttgcgctggcctgaaaatcatggactgttagtcaacattcctttgaaatattcttaatatcttatgataaatatgctaatgactttgacatagtaaaattgtatatgaataaaccttttagaaaaggaaacatgcatgttaacaggcaaatagttttatttgaagtaattgtccagggagatcatatattttgttttgtcagcatttagtttgatattaggttcctgctttatgtcacatctttctccggttcttttttttccaacttggttctttgcatcatgagagcaaatccagcctgaaccttggatgttgtgaatacaccagctaacgctttttgagtgcttactgtttgttaggcacagctctaagtatttccatgtgttctatttttgctttcctattgttcctgttttagaagtgagataaccaaggcatgacacatagtcctaccacttgcagagccaggacttgaactcattttcctctgaagcctatagtcttttccaatataactatagctcatcctccatagccacatctgtgaatttaagcaaccatgtcttgaaaatatttttttaattacttgtaaacttcagttccatgaacaatatagtatagctttagtcttgtgcccttaattacctgggtgtgtttctcaggtgattttgttgtgtcaaccagtatgtacttaaacctagatggtttatctattctatacttagggcatgtagtatatactgttacacgtgtggcctatcatttgaaatgttctgtgctgcatgactatttactagtgtttatatcatattaggtataaatatttcagaagttcttttttgtgtaccagtcagtgtgcacacaccagacaacttctgtaaacgactcaggcatccaaagattttgaatttgaaactaattcactgtttagaaaagtttcttgtcagggttcatttttcatgcttaaaactcaatattcattccttcaacgaatattgaattcctgtttgcttaggaaccattttatatcacaaatgtataaacaataagcttcaaagtgatccattcctgaatgtgacacacaatctttccttgaaaactttttgatttgataaaaaaccaagttagtatatatcccgaataaggacaaaatacagctgagaggagggagcacttactggtttaagaacatctcatagaagcataaaatacttgggttgtgatttgaatacctaacaggaagagggtggtgaagagatttctaagctttaggaagtatatcttcaaagacaagaatgtggtgaaccacaagatttgggggagggtgggggtgataaaagacaaggtcgtctgggaaagttgaagctgttaagggagggcaaatgtaggacctttgaagtcactgttttaaactcaaacacttaaagattttcctggactacatatatctattaaatatgaatagacttaaataaaactgtccaagagagaaaaccgttgatttagtgccactatgttttttcgagtataagccacatctatgtttaaataaacctttgctttcagttttctccagtttgtattctccaggtagcatggctatctcataggaacccagaaatgtacatctgagtcagagccctgggttcagcagtctgtttttaagactcatcatgcaatgctgaggtccaccaaagctggagagagctgctggttgagtcagttctagtgaggtgcagtgttctaggctagcccatggggattttgaagggtcaagaaaaataatgatgatgggatatggacatatgtaaaggtctgaaatggcctgaactgaggagaccaaatactagatgctactgcctgtggagagatggggtaagctagtttttttttccccaccttttcttacattctttgttctgccatgagcatgagttgtctttaaaccaaaacaaaatttatgttttaagttccagataaatgcataatatagagggcatcatcctgagtgaggtaacacattcacaaagaaactcacacaatatgtattcactgataagtggatattagccccaaacctaggatacccaagatataagatataatttgctaaacacatgaaactcaaggagaatgaagactgaagtgtggacactatgcccctccttagatttgggaacaaaacacccatggaaggagttacagagacggagtttggagctgagatgaaaggatggaccatgtagagactgccatagccagggatccaccccataatcagcatccaaacgctgacaccattgcatacactagcaagattttattgaaaggacgcagatgtagctgtctcttgtgagactatgccggggcccagcaaacacagaagtggatgctcacagtcagctaatggatggatcatagggctcccaatggaggagctagagaaagtagccaaggagctaaagggatctgcaaccctataggtggaacaacattatgagctaaccagtaccccggagctcttgactctagctgcatatatatcaaaagatggcctagtcggccatcactggaaagagaggcccattggacttgcaaactttatatgccccagtacaggggaataccagggccaaaaagggggagtgggtgggcaggggagtgggggtgggtggatatgggggacttttggtatagcattggaaatgtaaatgagttaaatacctaataaaaaatggaaaaaaaatgcataatataatggggagaaataaacaaacaaaaaaatggcagaggttaaaatgtggatttgctccgttaaaggacgaccagggtgtgttcattttggagtgttggcttgaggaagaatgtctagctcacagatgggaatgatttacagcagcttttctgggtcttgtgttttaatttttcctaagtattctcatagttaaccaaattgtgactcagcctatctatggtcatcttgtcagctaggagtagtgcctgtctgcagctagtcacagacctcagctagctttgttttctaatgataatgccgtgttggcattctcatttataaatagtggacattgagtttatagaatggactagcctagaggtggttcctctattagtgagggctgagaagagatttctggtctttaaagctgagttctagagtcctgtgtcatggtagcatctcaccaccagaacatgatatagccagttgaaagtaatgaaaatgttagtactagttgaggaaattgattgtttttgttaccctctaagaaaaacaggacattttcttacaaacccctttaatggaaaatacctattcatgtttcctctattccatctgtgagctctctcagcaggtagactctactttgtaagataattgtcatagaagttacttactactaaattcaacttaaatgatgaaataaggttatgtacaagattttgcaaagaggataatacaacttcatgtcaataacctttgttatttaatctagacatgttaatacaagtggccaaattagaaactttacagttgttctagtttcattctttgctgtaataaaacactctgatcaaagcagtttaggggagaaaaggatatatctgacttgtactttgcagtcataatccatcactgagggaagtcaaggcaggattttgaaacagaaaccatggaggaacactatacgcataggttcattcttagccagttttgttatatagcctgtttagggaatggtgctgcccatagtgggctgggttcacttacatcaatgcacgatcaagggacattcctacagaccaacttgatataagcaattcctcaacccaagctttacacttagatgattccaggttgtgtcaagtgacaaacttgacaacagttgacaagctccattgaatatacacttgtagactatttgttaccatcttctaagatcataaaagtattacgtggactttttgttttgccctttttggtggaggtggtcttgtgacatttagccaaagaaatttagttgtatagattaaggacccatttgattctttcttagctcagtaatgctaagctggttgggaaggcacactgacagcacagtagggtaatctgccctcatgctgacctgccctcacatatgtcttctcattaccagaatgcatcactaggcctgggccagtgtactgtaaaacactactcatccacttagatgtcacccaacatcacgcctcagttttctcttttcatacttgtaggatgatttgaactcataccatgttaggggttacctcttaccttggatgttagagacattccctacaagcgcattgtttatatccatattcttgttattttagcagactgtccagggtctaggtcaccacagaacatataagatggtttcatgaggaaacaccactagttgtttacaggatacctgcttggcactgagatgagctagcacagtttcataaaggcatcttcaaaaccactccttaaaaagaaaaatggaggagtttcttgggtcagagaagaaatcagtactctttttttctcaacaagtgcagggggagggggctgtggatgtggaggctctttaaagctccaccgtggaccatttcttcttcctcaaggccaggcatatgggtttacctacctacatctctgagggctgtgcattgtctctgccagcctggtcccattgctgctctgccccttgcttcatatttcttggttaaccctctatctggtttgggttcccacctctcacttgactttcagaagcatctggcatccatttcccaattcattgggtaacaggcggaataaatacacatgaagaacagatgtaaggtttgggacatagtcacaaggttagatcgggattgatcatttctattgatgacttgattctacttgtcagcctgtgggttcttttccttttattaggtaactcagcaaataagagttgttatcagagaaaagatttttcacacatgcttattgaactccttttaagttggtttctctgaccttacatacatcatcacatttctagggttcttgaaccactgggtcacagaaactcccaacttaaaatgccttccttccctgagtgaggcaacctgtaaaccacacaccacacaccacaccattcttccctgctaatcccttaagccaaagctccagagctgaccagtgaccaaaataaccaggataacatttcaaacctgaatgttcttcagacgtacgctggagcttctagccagtgctaaagagacgcttaagagcctgaatagacgttttaaactcttctggtgattctgatgatgagtcagtttgcctttccattccctaatcaatagaatcatgctttaaggaagtgcctgagcccaacctagggagctggcatgagtatttctaagaaggcttgtgcctagggcgaccaagaaccaccccaatctttttgaagagttgcccttactactcccacagtggggaaagatccaccatttcttttccaaatgcagaccacagcaatgtgcaaattaccattgtttagcattttccaggaaatcccagtgacccttttcagtaaagaatgtgcagttgtttgtaagtgaacatgctgcattgtgtctgttggtgactgcagagtggaagttcgtagtcacttctaaagaaaaaaggtaaacaaaacctgttctataagaacagaagctgacagacgtctgtacagaatatagtgtttagtaatttccctcagaatcaccaatttttcttgaacttgttacctaatttatattctctactgtataccatggtctttccatttttagtgttttcttttacatttcttgcctttaagaaatacacatttttatattttgagaaaaatattaaaattcagttttcttctagtgtccatagcagttccattgagcacccttacctgttggcttttctgcaaccaacggcccttgcctgggatagttctttcaaaacaaccccacccaagacagtgtttccacagtcctcacccaatgacagaaggattagcccattttaaaaccagctgttcccatgggttctgttaggcacaccttaagacaacacaccctgtgttccagttcccgtttgtagcccagcaattgtttgacaaacaagttggtctttcctttcttaaggggccaagagatttgtagctggtgacctgggttccatttgtgtgtcaagaatgttttggagtttccctcttgctttcctttgaaagagaaagctaagatgtaacaccacacacacatacaccaattgtgcagcttgactcttctaacagaacttcacatgccattagcctgatcatcttgatgctgaaggcatggtgcaaactgtgccctgtaattagtaagaacttcaaactccagaagctaacttagagccagccaaaagggaggggaagtcacaaataggataggaaataaatctatttggaagaagaaggaagagggggaagagaaaaacatttccaatttgaactagattcctttctcagaacccaagatgttccatttataactacgagttataaggtacattcatttcaaagctgttagatcatgaccttggtctgcatttggatctggctactctgtgctctccacacagcgttttcacttattttaaaaatgggcagttttccacaataagttacccgcttttaaaattttttactattttatgcgtgtgtatttcttgcatgaatgtgtgtttgtgcaccacaatgcatgcttggtaccttgaggaggccagaagagggcattggtttccctgaaactggagttacagatggtcatgagctaccatgtagatgctggggattaaatctaggtcccctggaagagcaacccagtgcttccaactgccgagagattattacaacccatcagttgtttttaaggcttaaatgactctttccaagtcaatagttaataaatatctctctctctctctctctctctctctctctctctctctctctctctctnnnnnnnnnnnnnnnnnnnncccccctctctctctctgtgtgtgtgtgtgtgtgtgtgtgtgtgtgtgtgtaagccagaggaaaccatcagctgttactcaagtgtggtctaccttgttttctctcactggcctggaactagccatgtaaattaggctcattgagccccagggattctcctgtttccatctccaagatcaaactcaaggtttgcaaagaaagcactttactgactgagcaagccttttccctccacagcccttaattattttttcttggccagatctttataattttagtattttctaactgggattctgtatctcttagaagttccccagccatctccctttcttctctctgcattgtcctcttcttcacactgcacttgccacagcaaagtgaccttcgtgagacccatttggactttttgtctttagcttccagttgagttcagtccatgagagctgtctgctagagtagaggacccgaggagaaagttcattttctgagttctggcttgacagtgttacctgcctgactgcaaaataccagggctgttacacctctctgcccactgctctgtgcagcgtgtttcttggagttagagtccttgccttgtggcattcccatcagtcagtcaacagtgcttcaccattcctttttggctgtcataacacagcttacacttttgtagactgtttgctctcttcgtatcaagtctgaaagtcctaggcttttcatctactaaaaaaaaaagtccttcatcctttctgtaggagcagttcagctctggaagagattgccgaaggttacccaaagagggtgttctctcttgcacctacacaccttgtcccccaagaattctgatgtgtcccatccatagagatcatccacgtgagctagaaatgagaatcatccttgaatgatccacctccttatcctaaatatagtgtctctggccacgggaagaggcaagcatccatcttcactcccactctgtaatacagaaggcctatactttgacccagattacaatgtttctaactggtctccatgcctatagtctgattcctccacaatatatgctcttcagctgccagagtaaattttctgaatcacaggtctgattattctagctcctatgtttaaactttccgagcagcccttactgtctgcacatgtcacctacgaccaaacctgcagcttctgaagctcatgatatgaacagaggctctcattccacatctgcttctcttgccttaagcactttttgtcctttcagagttgtacttcatttttggtcatggtgtccttatgcctgagacgtctgttcttacctgtcatgcaggtttgagtgtagacttcaagtccttatcaggaacactttcaactgcaaatataggaaaggccaggttatagatcgtttttcttcagcaaggagcctggacataggcagattcaaacagtgattcactgttgtcatacattcataacagtaacttacaaaccacacttttagtctttagttactcatctttcatgtatcattttgtcttaattttaaaacttaactctactgtgtgtgcacatgtgtgtatgaggtggggggaggggggagggaaagtgaagaaagggagagaaagaactgtgttgaatgcagcaattgtgtgctatgacacatgcacggcactggggacagccttgagtgtcagaccttgcctgcctcatttgagacagagtctctgttttctgcccactggacacaccaggtttctgaaaggcttgcttcttgcccctgaacttggaggaggttgtattaaggagttggctagagttcatttttatggccaagatagcaaaccaatgtcagagtgagtgagaaagatgaagtttttaatcagttcaaattctctccacatagcagagactgcatcccaaggcatgaagccacctccatataagccttcccccaagtctcagaagttgcatctgggctatgctcttctccagttaatggccccaggacatccacctgtcaactgtcacttgacttactgaaaccttcaggggagggccactagaggggaacaaagactagttctcacggtgacaaatgctctggatgtgcctcagtctacccacagcgtttctctgcttccaactttactgtctgctctttaccctggaaatactttctctgtctgctgtagagacatagctcctgtgtccatgacagacgcagctacaatgcctgcagagccaggcagactgtcaggaaagatggactttgtcaatttgaggctctcactgatttataactgttgcctgacagtggccctcagggacctttggaagtcccagggtatgtgtatgctgactatggattttctgttggagcattagcaactgctgcatgagtggtgtagaaagtagagctgaaggtctcagaagactgctgtccctctgagaaaagaattctgggtgctgtttctgctaggggcaaattctcaccaagagaaaggaaagccagaaggaagttaaactaaacagttctgagtggccttgggggactgcctaaccaattgtactgtaatggttattttgtgcctgctccattttcagtgacttgattttgagacaggttctcctcacttgcctggaactcatcatgtagtcaaactggcctacaacatgatcttactgtcttggcctctggagtgttggaattactgtggtggtttgaataggtatgccttaccccatagactcatttgtttgaatgcttggccca

SEQ ID NO: 959 - DNA, 4394 bp, Mus musculus
ggtgaaaagcgagtgaggagagcgcgaccacggcgtagccatcgctgaagggagagcgaggcccgagcttccgcgtcgagatttggtgactgaggaaaggacccagagactccttgaacaactaagacaagtcaggatggtttcaatcccagaatactacgaggggaagaatatccttctcacaggagccactggtttcttaggcaaggtgcttctggaaaagttgctgagatcttgtcccagggtgaattctgtctatgttttggtgaggcaaaaagctggtcagacaccccaagagcgagtggaggaaatcctcagtagcaagcttttcgacaggttgagagatgaaaatccagattttagagagaaaattatagcgatcaacagtgaacttacccaacctaaactggctctcagtgaagaagataaggagatcattatagattctacaaatgtcatattccactgtgcggctactgtaagatttaatgaaaatttaagagatgctgtccagttaaatgtgatagctacacgacagcttattctccttgcacagcaaatgaagaatctggaagtgttcatgcatgtctcaacagcgtatgcctactgcaatcgaaagcatattgatgaagtagtttatccaccccctgtagatcccaagaagctgattgattctttagaatggatggatgatggcctagtaaatgatatcacaccaaaattgataggcgacaggcctaacacgtacatatacaccaaggcattggcagagtatgttgtgcagcaggaaggagcaaagctaaatgttgccattgtaaggccgtcgatcgtcggcgccagttggaaagaaccttttccaacctttaatattgatgtacggcagttacattgggcagaatatatagaaaactactgcatggggactaagaagtacgtgttgaatgaagagatgtctggcctccctgctgctcggaagcatctcaacaagttgcggaatatccgttatggtttcaatacaatccttgtgatacttatctggcgcatttttattgcaagatcacaaatggcaagaaacatctggtattttgtggttagtctgtgttacaaatttctgtcatacttccgagcatccagcactatgagatactgaagaccaagaatttagcattagaacatctatgcatatggtgatctaaatgcacaaaatgtaaaatgtacttaagacatctcaccttttgttaagacattaaaccatcttaaattggagcgtggagtaaattatggtccattttatgtagcattttaatgtttatgctcaaaacctagtgaacacactgtggtatgccagctcagaactgcagtagtcactcaaattatgattcaacattttaatccttggaatgcaaagggtaggaagggggcagaagtggggctatgggagcattgaccagtataactgtgcagttctggaacatattaattaaaacatgccttaacatgcagtcctaatattcagtgcaatggaaaatgtgcagacagaaggcctagataaattagttaaggatttgatttgatttgattcttcaatgttgattttttttttctttttaatcctttgagaggtggggtttaattttgctaagaccacagccatgtgttttttcttcctgtaagttacaggtggtgtcaaacgcaaagactcgttctgattttctttctgaataaatgtgtgttgcatatcattttttataagtaattagttgctcttatgatcagaaggccaaatattattctaaagacactaatagatctggatgaatttaagattctgtatcaatgtatactctgcatttgaagcaaagtgaaaacatgcacggtaaaggaaaccacttttctagtctgcattttgatcaaatggaactctggtgagatgtgttttcattttgaagaggatttcttgagacgtgatgagaggtgggattggggaaggattcattatatttatcctctcctccttataaattttcccacaggacttgccccatatgaacatgcattattatgaaggaatgtagttgcagcttttaacattaagaaaatgtcctcatgtgtttgccaacacacactaatttgatcttgaaagctgaattcctttaaaaatgaataatgcataagtatgtgtataaaattaaataaaggattttaccatgtaaagtagcaaactgttgaatgagtttcaagtcatcatttctttgcatgttgttttagctttagaaagacatgcgttatagaaacaagtaatagcaaaaaattgatgtatatttattgattcaattccctttaaatcttactagtttgttactattttatccatatttttaatggcttgttcagcataacacagttataattaagctgatcaagttgtactacatttaaatcatcagcagtgtatcttgaaagtgcttaaagggttagttcatagtacaagaaattaaatgcaactttacattttaattttttgtcaattaaaatacaatgtagaagtttattttactattgtggacacaaaatgtaaaggaaaccaactttttccatactgatgtataatcttgaaaaggaaaaaaaaaaaaagcttctctgttgaagccagactttgtgtagtaaaacttttaaacattattttaaaagaaatatgtatataagtatctgtgtattctttggaatgattctgaagtctctggtctaggaccatgcctgtataaggtgtgagagaccatgatggtgtgtgagaatggaataaatgatgcctttgatttaaggtggcccatataatatacattgagtactccatgtctccaaatggatttccatgatgtaatgaaaacacactaacctttttatgatttttatacatctgccaaaatatactgagaatctgataaattgtctttgggtctctgaaaagaatcaggtgcaatgtgggcaggcctgtaaactgaaccagatatgtgtcttctattttattgctcttgtaatctaatgtaaagaattgctaactaaggctgtgctgaggaggtcaaattaatttttatttgtttagaattctgttgtcaaaagaaaggtaatgaataaatgatgctcatcctagaatgtataattttgaaattagtatggagtaaaatgtgagagcgttgagctttatcagctacacttgcattcaagtcatattgtaagagtttggagatgtatgctctttgtaatttgctacagtgtttttagttctgattatatttttcatatagattattcaataggacaactctgttaaataaattaatttcattcacctcatttggcaaaactgtattctgaaccatttagggtttttcccttatctttccttctctgaactctggcatacatatttgtacactgtaatgtcattgtaactgtttaattgccttggcaatgctaatgtatcgtaacacttagttgagaaaagcatgaccgggtcatatgttgtttgacttaagggtaacatagaataagtgtttctccagtctgccagacaaagcttggtagtgggaggggactctgacctctcccttttgtgtttgtctataggaattgattgggaaacttttgttttgtgttttttgtttgtttgtttgaagtgtaaactgatactcttttataagaagtaaatacaaacattattgggtgcctttgtttgtaaaccaaaaagtaataaatgaatccctatatttctattatagcatctattgtatttttacattgtggaaaccatccatgagttaaaatggctacgatggcaaaagtagtccttggatcttttttctttcttaggtgtcctcatctattctcatcatctttttatttatgtcttgagttgttcacacagcactttaggggaagcatataggcagaatgaacatttatttaaaagtatttttatatagtgattaataatgagacagatttttttttaatgtaaataaaaccgggagaccaccagcgtgttccaaggatgaatgacattatgttagtttataggttcttcaccagtagtagatctgacttcatttaaaggattattcattttcatagagattgagtgaagtacttggcgggggtgctgagagtgtgtcaggatggggttagagtgtaaatggctttgtaagcattcctttctaggctgacttccagctctgacttgaaaccgtttgcaccgacttgctctgctttaagaaaaacattctaactgcatgagaagcttagagaaaagggtatgtgctgcgtaacttactacaaaaaatgagtttatcagtctgtttatatatgaaatattttcttaataaagaaaatttgag

SEQ ID NO: 960 - protein, 375 aa, Mus musculus
GERDHGVAIAEGRARPELPRRDLVTEERTQRLLEQLRQVRMVSIPEYYEGKNILLTGATGFLGKVLLEKLLRSCPRVNSVYVLVRQKAGQTPQERVEEILSSKLFDRLRDENPDFREKIIAINSELTQPKLALSEEDKEIIIDSTNVIFHCAATVRFNENLRDAVQLNVIATRQLILLAQQMKNLEVFMHVSTAYAYCNRKHIDEVVYPPPVDPKKLIDSLEWMDDGLVNDITPKLIGDRPNTYIYTKAEYVVQQEGAKLNVAIVRPSIVGASWKEPFPTFNIDVRQLHWAEYIENYCMGTKKYVLNEEMSGLPAARKHLNKLRNIRYGFNTILVILIWRIFIARSQMARNIWYFVVSLCYKFLSYFRASSTMRY

SEQ ID NO: 961 - DNA, 83631 bp, Homo sapiens
cttctactccagccatgggaagtgccggctcctccttcaccttctgccatgattgtaagtttcctgaggcctccctagaagcagaagccactgtataggcttcctgtacagctggcaaaatcatgaaccaattcaacctttttttcttataaattacccagtctcaagtattactttatagcagtgtgagaatgaactaatacagaaaattggtactgaggggtgatgaagtgctacaaagaaatgtggaagtagttttggaaatgtggaagtacctggaaatgtggaagtagttttggaaccaagtaacaggcaaaggttggaagagtttggagggctcagaagaagatagaaagatgaggaaaagtttggagcttcctagggacttgttgaatagttgtgaccaaaacgcagattgtgatatggacagtgaagtccaggctgatgaggtctcagatggagataaggaacttattgggaactggagcataggtcacttttgttacctcttggcaaagaagatggctgcactattgcctctggccctatggatctgtgaaagaactttagagtgatactatagggtatctgatggaagaaatttctaagcagccaagtgttcaagatgtggcctggctgcttctaacaacctatgctcatatgtgtgagcaaagaaatgatgtaaaactcaaacttatatttaaaagggaagcagagtataaaagtttggaaaacttgcagcctgactatgtgttagaaaagaaaagcccattttctggggaggaattcaaaccagctgcagaaatttgcataactaaaaggaaggcaagtactgatagccaagaaaatggggaaaatgcttcgaaggcacttcagagaccctcgtggcagcccttcccatcacaggcccagagccctaggaaaacaatagttttgtgaaccatgcccagggccctgcagcactgtgcagcctcaagacactgatccctgcataccagtcactccagctccagctgtggctaaaaggagcccaggtgcagcttgggacactgcttcagagggtgtgcaaccataaaccttggtggcctccacatggtgttaaggctatgggtgtgcagaatgcaagatttggggtttgagagcctctgtctagatttcagagaatgtatggaaaagcctggatgtccaggcagaagcctgctgcaggggcagagccctcatggagaacttctataagggtagtatggaagggaaatgtgggattggagcccccatacagagtccccactgcagcactgcctagtggatttgtgggaggagggccactatactccagaccccagaatggtagagccaccaacagcttacaacatgcacttggaaagccataagcactcaatatcagcccatgagagcagccttgggggcagagttgccctaggccttgggtgcccaccccttgcaccagtgtgtcctggatgtgagacatgaagtcaaagattattttggagctttaagttttaatggctgacctgctgtgtttcagtcttgcatggtggctgtagcccctttcttttggctgatgtctcccttttggaacaggagtacttacccaatgcctataccctcattgtatcttagaagtaaataacttgttttttattttacaggatcataggcgtaaggaatttgccttgtctcagatgacactttggacatctgagttaatgctgaaatgagttaagatttggggggactgttgggaaggcatgattgtatgttgcaatgtgagaaggacatgaaatttgggagggatgaggagcagaatgatataatttggatctgtgtccccacccaatttcatgttgaattgtaatccccaatgctgtaggtggggcctggtgggaggtgattggatcatgggggtagtttctcatgaatggtttagcaccttccccctagtgctgttctcaagatagagttctcatgagatctggttgtttaaaagtgtgtggcacttccctgccccacttatgctccagccatgcaaagtgctggctcccactttgtctcctgccatgattgtaaattgcctgatgcctcgctagaggcagaagctgatatgcttcctgtacagcctgcataacttgagccaattcaacctattttcttataaattacccagtcccaggtattttttttatagcagtgttagaatggactaacacaccaagctatttgaaattccctttttcaggtccctcatgtgatatcaagggcgtcaagagaaaggagggacagacagatagaaaaacagaattcagtcaactgagaagttttacagagaaaacagaggtcttaaaacagtatatatgtacttttgaccatagagctctttaaaaaacacgttttaaaagtgtttcctcaagccatcttactttgcttctgctggtagctgggcttccattgtcaaatggacagcccacagaagcagcaatctgactgcatcagctactcagcacccttccttacagcagtgtgatgtgtgacagatggctcatagttaacgattgctctaaacccatcagcattttcagggtgtttctggatttgctttgtggcccaccaatgtctaacaggtaagccacaccactccacattgaagtggctggccagcttgggatttcccccatggatgctttatttcctttgcccatttcttgttctctcagctcctgcctgccttgccacatttctgtggtaggcaggtctatgcaaatctacccccagaagtccaagggagctgagaggctgaagaaagaagctgaaaaactaagtttctcaaaaacaaaacaaaaaaccatttaatagggacttacaaatggaagctatgtctgtgttttgggcagcagcaagacaagaaggtggacccccccataacattacctcctggacacagggcttatacaccatagggagggaatgtgtagggcaattgtaggaaaagccaaaaatgttacatgaatatacctagggtctgatttatggtcaaggttgttttgacctaaggacaggatttaaggtaggtacatgctcttacacaaggaacagtacataaaatagaaatcttcttcttcttttttttttttttttagacagagtctctctctgttgcccaggctggagtgcaatggcacgatctcagctcactgtgatgtccacctcctgggttcaagccattcttccaccacagcttcccaagtaattgggattataggcatgtgccaccaggcccggctaattttttttttttttttttgtatttttagtagagatggggtttcaccatattggccaggctggtcttgaactcctgacctcaagtgatccacccacctcagcctcccaaagtgctaggattacaggcactgtgcctcatgcctgatgtctagtaaatgttttaaactgaatcacacaacgttatgacattgtcactggcagcccattaagcaccaataccctactacctggcacccatatgggccttcagtaatatttgttgaatgaacagaaggaaattgtcactctagcctagcctgtgacctagtaggaacacttctgggcatctctcttaattcctctctttcctttacttctcctacatgagttaccagttttcgtcaattctacttctgagataccttttgtggccctgtcctctgcattctcactaccactgcccaaaattatagccatttaaacttcctatctttgtttcctattctcccaccccaagtcttttcccctctttagttcaacttccatgtgaccactggagttatctttctaaagctcaagaaacatcaatcctttttattaaaaatatcaatggtgtgttgctttcatgacttttcatatcttgctttaatctatttttccaacttcatttcttactacttttcagcgagcaccctgccctctatgccaaacttgagaaacagcaagctatttttaacatttcaacttgctagtcactctttcatgtttatgtaacattctacatgctcatcttctgcctgggaaatacttatcaatatccttactcactcattgggattcaagtcatatattacctcctctgtgatgccttcctagaatctcctacacagttgttcctctgtgtgcccacaatactttctattgacttttcctatagcagttatattttattgtgtttatcttttttgcctttttttttttgagactgaatcttgctctattgtccaggctggagtgcaccagcactatcttggctcactgcaacctccgtctcccggattcaggtgattcttgtgccttagcctccagagtagctgggattacaggtgcctgccactacacccggctaatttttgtatttttagtagagacaaggtttcactatgttggccaggctggtcttgaactcttgacctcaagtgatccacccgccttggtctcccagagtgctgggattacaggagtgagccaccacacctggccttttttgccatcttgacaaatgctgtccaacaggaagataatacaagccacatataatttatttttattgttttttagaaagagtcttgctctgttccccaggttggaatgcagtggtgtgatcatagctcagtgtaactaacctcaaactcctgggctcaagtgatcctcctgcctcagcctccctagtagctaggattataggcatacgctaccattcctggctaacggccacatataattttaacttttctagtagccacataaaaaaaaaaagtaaaaaaaagaaacagatgaaagtaattttaattatatatctataaataactggctgctctaagaaataccagaacagaatgattgaatggctttgtttatggagaaactgtaatctgtgcactgttctctactttggataactggagattagcaaatgagtcaaatgttttatttccttagagtcatacctttgtagacactgacaagcttttttacacataggtgtggttggctgtgtgaagttctcccagtttagggcctttgtttgcaaatatatccaggaggaggccttaccttagaagcccaagggtgtgctggtagtgactttagggactttaggtactattctcaagaagcaccacccaaagaacagggcaagtcagagtctggggcttacatcttggacatgctatgaccttagataaaagatgtcgaattagtcattctcatttctgggcatctgtggcagctctgttctgactcatgtgcaaagggagtaaatccctaagaaagaaagaaaaagaaaagaagacaggaaaaagaagaataatttccagagttctatacagttactattgctcccaaatgagctccaaatcatggcaatgctacccacaaaagacagacagaacaatgaccatctaatgagatgtggaaataaattggccaacaagatgccttcttttcacaatgatgcttgggaaattgacaacagatggtatctaaaacatgttacaaatactgtgcctcttctttccaagacctgggagctgggtaataccagggcacttttatcaatcaacaacgtctagaggagatagtcgagaaccagaaagtcaatagtcaagacacaaagaataatttagaagatcgagggacatagcagctccatttttgttccacttagattaaacttgtggaatatctgagggtcagagcattcccctccagatgaaaaccaaacttatttcacagacctctgaaacacccagaacagatactggggaaatgaagccacaggaacctgtgtgtacttgcctagacaggcaatcaatgtactggtggaaatgttaaaaccttaataggatttttttgtttttgtttttactaacaggctttaaaaatatttttaaagcagacctattctggaagtcatgattgggtgcagggcaaggcagataccataaaatgaactacagagaatactgctctcattaaaatttagttcacttgggaaaagttgcctgtaactctttctatgctgagagtgaacatctctggtgcattctagacagttatgatgggttttccacagcaactacaaagaaagttgtattctcattagttttatcaaaacaaatatttttaatgtgctacagttacttttaaatagtttatactttctattgtcatgcaatctgtaaagtaaagcatggtgaaaagaaggattaatttggtgaattccatgatgggtgtgtatataagatgctgggccaggcgtgctggctcacgcctgtaatcccagcactttgggaggccaaggcgggtggatcatgaggtcagaagttcgagaccagcttggccaacatggtgacaccctgtctctactaaaaatacaaaaattagccaggcatggtggcaggtgcctctaattctagctactcgggaggctgaggcaggagaatcacttgaacccaggaaggcagaggttacagtgagccgagattgcatcactgcactccagcctgagggacagaacaagactccgtctcaaaaaaaaaaaaaaaggctgaaggctgggcacggtggctcacacctgtaatcccagcactttgggaggccaaggcgggcagatcagagggtcaagagattgagaccaccctggccaacatggtgaaaccccatcttcactaaaagtacaaaaaaaaattagctgggtgtggtggtgcgcacctgtagtcccagctactcgggaggctgaggcaggagaatggcgtgaaccggagaggcagagcttgcagggagccgagattgcaccactgcactccagcttgggcgacagtacgagactccttctcaaaaaaaagactctgtactacttattgtgagggatacaaagatgtataatgacaagacataatgacttggtctggttttggaagaggcaaatgaagcataagtagaaagataatggggcttgccatcaaatctatctagattttaatcctacttctgccacctaacagctatgtgtctttagacaagttacttgcctcactgagcctcaagtttgtcttctacagaatttagatgaatagatgaatacttgcatagggctgctgtgaggataaagtgaagacttcatcagaactatactgaataagacatttccacaaaaaaagtgttagaaaatgacacatgccagaagaaaactgtttcctcagagcagtatttgcataaaaatgcttgaacttgttttttgtttctaaaaatgttatgaaattctgagagtcataatagccacgttatggccaatatgccaaccacgttaagggtagcatattcgttttggtctttattcctatatattttctcaatgatatatagtatctccctttaggctagaaactataatggtacatttttggcttggtgtaatttaccttcatttaaaagatattgtttctatagcatggatcaaaaagatgtagagttgtttcatgtttgaataaaattataatgcagttgataccaatatatggcgcccaattttcagggatcttgctgaataaagatgggaaaggcagatgaatgaatgattgatgtcattacatttttctagtttaaactctggtgcaaaatctttcactgccttttattactcactttttgtagatttattaattctctgaattcatttaagaatgatagtatattatggaagattcgagtcatacaacatgccttacccatgaaattgtaccatcttggagagtgatccattgttttttaaagtcttcctccagaaagcactctgtccatttgtgggggtctgccggaggcacacatttcatacacattgacttgaatcaaatgagatccctttgtgctctcaagtgtacggctatttttgagaatcatttattaagtgattacttaataattacatcatattttcctcagaactaagcattactttgcttttgtacttatatcaatttttaaaattaagacatatgcacaaacaacaaaaagtttatgaagtattttctggaaatagtgtctatttcctatagtgatattaccctatcagtatactgataaaccttagcagtggttaacttagctacacatgttctaacatgctcctgaatcccccatgctgggttacatcctctttctaggtattccctcatcctgtattacactggcattgtttatgtctgtctctccattaaaccctatgttctgtggaatactgtcatatccaagtttatatgcctagtgtagtgacaagcactttaaataaaggcatttacctgatttaaacaacttaatgactaaattaataaatatgaatactgtaatctttgttttgttgcttgtgttcttttacagattagaatttggtccatagttcttacgtttgttttgggagaatattttgacccacttctaagaagtgtttcacctgatcctggctatttatgactatggctattggactggatgggttccaggcatacactgtcttgcctaaagtagcggaatgcgacatccctgagggtaagcaagtgtgttagctttgtgttctgtgccctcctccagaaatgacagtacttgctgcaagactgtgagctcatcgaggcagaagccatggcattcaaattagtttcctgagccagaacttaacatctgccacaaagtaggcagttcagtgagcttttgtagtttccaactggatgcagcactatgactgcttttagctactaacagggccaggcactgaaacaagctctaaatccccacagaaaaatcactctgagccatccatccctaaataccaacctgtgcatgctattcaccgtgccaagagcgttcactcatttttgcttctcacaaatctttttttttcttcctatggcttgcatgttttgaatgacagctaaatcctaatgcggactgtttatacaatggagtcccacggagcccaaagattgtggtaatattattacagaattctcatgatccttttattattttttaaaaatgagccgtatgaatgtggtaatactattaagtgtccggctcgatgaattcctccatgtgtacacagcccggaacgaccaccaggatcaagacgcaatgtttccagctttccataggttccctcgtgccccacccctcagaagtaaacgttattctaactcctatcactaccggtaagttttgtagggaattattttggaggaagtggaaggtggaatgaatgggcccacagtcccctgggactgggcgagacccgtggaggctccaggggtccgtagagctcttcgctctcaccgacccgggccacacccgccaagctggtagttctccgaacggatccctcacgcccagcaatggccggagggcccccgggccccaccataatagcgctaagcacgccacaatggcagccccgctgtctcccgcgcgggcctcgctgcgtgctcccaaccttgggagttggcgcccctcccgcgcgacggacagccgggcgtggccctgggcgcgacccgacaggacgccagcagccggcgggggcgctccaggactcgagatgtggggcgcgggcccattggctgagcattcccccgcgagcctcccggccgcagggcccacctcccggccctctctccgcgcccccattggccgttcgcgttccgcgggcgtccgctcccgccccactcccgcccggagggaaaccgggttgggggtgagaggctaaagcagggaggaggatgactggtcctgcggataagggtgtgcgcgagagccaatcaaaagcggatgtcgaaaagaggcgccgctccagccagtcacgtcgcgaggtgcggtcggggccggctgacgcgactgcgggcctcagccaatgggcgtgccactgcccgtccgctcttcagcagccggtcgcgggcggtggaaaagcgagtgaagagagcgcgacggcggcggcggcggcggcgcagctattgctggacggccagtgggagagcgaggcctgagcctctgcgtctaggtgagaagggggtgcgccagcgggagcggccgggctgcgggctcctcctcgcctggctcgggaagtggttgcgggagctcgggctgcaggcctggccgaggcgggggcgccgaccagccgtcccgcccccgcccccgcccgggtacgcccagaagtgagggcgcccgcctcaccccgggtggtctctgcccctctttgccccgccgccgcccttcacagggccgggaccgcgtgggggacgtacggtggggcctggtttgcagccgcggagcccggggagccgcctggggtgggaggccgctagaggtggcgaaggtggggcggggtggttagccgagcagcgggctccgcgtgctcgcgggagggtagcggcaaagggaggcctagtgattgcaggattccgggtctggggaggaagaaagtggtgggaaataggtgatgctcagaaaagggtgctgagggagaaggcgcggggccggggagtgtggttggcctattagaagtaaggattgatagggcctgggtggagatcagctgggagtgaaggggggacgggcttgggttttgaaggtgaaggtctctggagaactggggacacgtggatctggagtaagaggcacctactgaaaccggaaggtggctgagaaggttttatgtgaggtgtggacgggaggctattggactagaaggcattagttggtctgttaggacaaagtatacaagcagcaaacgcggtagatttatgtgtggtaggtgaaggctgtgaatcttttatgagtagttgagcaagaacagttgtctgattctgcggtgtcggagagtggagggtctcaggtagtgtcttggtcaggtttgaaggttaatttactgctagtggagggccaaatactcaaaagagtttttaattctcactactggggctgatcctcctcctacactccacccctcctgccatccctgtgacagttcatctcgttttgcctcagcagcacaagaactcactccctccgaagtaatggcatacatattgtttgcttttgactagatggcagtcaggaatcccttaattctttatgttaaaaaaaaagtgttggtttaaagacaacatcagaagatactctcagaaaatctgccctccaggggagtttctcagctgtcatgttgggcatgtgtaatatagcataaaaatgatgcaagatctcttacagtaatacaagtgagaattaacgtataagtacaatcctgatgtatttttttcaaattaatttaaaaagtaaacagagacagggtttgctgtcgcccaggctggagtgcagtggcgagatcatagctcgttccagcctcaaactcctcggcccaagagatctttccaccgtggcctctcaaaggcttgggattacaggggtgagccaccccacccaggccctgttattccatacattttccataaaattattttataatttttgttttgttttgtttttattttataaatttgtgtgtgtgtgtctcgctttgttgcccaggctggagtgcagtgacgcgatcttggctcgctgcaacctccacctcccaggttcaagtgatcagctcttgcctcagcctctcgagtagttgggactacagagacatgccccaccgcaccggctaatttttgtatttttagtagaggcggggtttcaccatattggccaggctggtctcgaacccctgacttcaagagatccatccgcctcggcctcccaaagtgctgggattacaggcgttagctgccgcgccggccaaaattattccataaatttatccataaaaattccacataaattttctggagtttgattatgtattaggcttgttgggaaatttattacccttgtgaagaattttgtagctaagtagcttgagggtttttttttttttttcactcaggaaagacatggtatgtatgcatcactgctattctatttgaagcttttggaatttttatttatggggtgtggatagaggctggaggcagagactgaggtcagagaagaggtagtagaaaagaaggtggcccactaccatatttccagtgtatttaaatgggagatagagtttctgtttgaggataggacaaaaggtttgtgaagagttatagagtcaaggacagaagccaaagagagcatttgctgtgtaacatgtttgcttgttaaccagatcagcaaagcattttaactaatggaccattatttatgatctagaaacaattttgtgaaagcgatttcttagtgatgctgtttactgtgatcacatttgcccttagtataacaatacctaagtgctgaggcgacttgcagtagagaagtaatctgagtggcgtggagtgaatcagggaaggtttcctgaaagaggtgagttttgagccatcatgtgaactagaagttgggatgtgggttattacaagacatgaggatgacattccagtagtttgtacttggtataagcaactgtggacaagagtgacaaattaaaaatggtttttaaggatgattgaagattcgaatgaagatttaggggtttggaaatcaaccaaggctatgttgcagcttagctgataaataattttttatgttggttaggagagaaaattaacagttgataatggattggagataggtagtaaaggaaagagcataaaatatttgatagttataggagaatgaagtgaaagtaaggttattgagaggtaggtttaacagtcaaccatatatcataagttggaaacatttttgagtcctgtgctagagtatattgataataatagcaaaatttattgggtgctactttgtggcagacactgttttgaaccttccaaatattatctcatcttctgattatctgtattttatagatgagggagataagactcagagagatataacttgcccaaggtcacacagctaggaggggacaggtcaggattggcagaatcagtcagtaaatgttaattgagcatctgcttgatgccaggcactgtagtaagtgctgggtgttcaatattgacaagaaaattcaagtcagacctcatctattttctagagattgtcagtttatgtaagaagagccagtgaagaaagaaaaagattagttggagagatttctgtagatactgaggaatacactgtttagagaaacctgggatagagttttaaagaggtggtggttagcaacaaagtatatagctgagagactcagaacgattgagaagaaaccattgagttaagtaagtaaaaaagtaatgtgaatttagtcacaagaaagctggaatgaagatattaatgtttgggctggtagttaattgtgtttagtggcaggtactctatacaaatttaaatattttcacagttatggtcagattcataggaaagatgatggtatgaccccttgtaatgttttaatctttggctggaagatcatggatgctttaaaatgcttgcactttttagttttttcaaatttaaaaaaatgagcaggcagaccgcctgagctcaagagttcaagagcagcctgggcaacatggcaaaaccccttttctatccaaaaaaaaaaaaaaaattagttgggcaaggtggtgtgcacacctgtaatcccagctacttggggggctgagatgggagcctgggaggttgaggctgcagtgaaccttgatcatgccgctgtactccagcctaagtgacaaagtgagaccctgtctcaaaaaaaaaaaaaaaagtgagcattatttttataattagtggggacaagcattcaactgaaatgagctaatactcaggaaaatgtgggtaggctagtctgaacttggggtaggagagaaatagtcttatttcagtccctacttggtaagagccaccttggtaggtgtgttcctatcttggaaatgactggattgtcactgatggaaactgaaactgtatgtactgaaaggtggtatttgcttaacctgaaggatcaagttactaacccaccctgaatggtggagatacagtctttgttttcctgaacacttgttttcttagagtttaatacatgaatttaaggtttaaaaaaacccaacaaaccactgatagaattgtgtcattttaactgcttcttttggctttatatccttcttcctacacattggttctatagttcctctcattaatgggtttgcaacaggcttagagtttcagttcagtaagacaaaatggaagtgctggatttaggtatagctgatcaacttaaacacttataaattcaccattgttttcggttcccaatttgaagagtggagacagaagtcaagaaaataagcttttcttattcaaagaatgattcccaaaccaataggatttgccctaggatcagtacagacttattacagtctcctaaacagagaggaaagagttgcgtaaattcatctagcttttagtttaatttcacttagcccatagggattctgagaggaaacgatattaatgtgattcctatttcatctaggcactgtagcataatccttcaacaaattaccacatttgattctcatataattctctaaaatgtgaataccatattacagatgaggagagtgagactcagagaagttagtaactttccaaggttggagagctaagtgacagagctgggattcaaacctttctttgtctaactccaaaactccatgcttgtgaaactaatagcacggaggactgatttataccttcaactgaaaaaaaatgccacaagccttaggtatttgttaccttagaagatgagactcttgctctgagtgtttgtgctctgtgacactgcctctaaataaatgacagtgattttttagtgtctaataggataccttatattttcttgctttagagatgtatgttttcatattttagaattttttgaagatgtatattgtctatatttacttcaaaatgtttgtgaaatggttactatgtcttaaatgtatctcaaaattgatgaagcatggcatatgcctgtagttttcacacataagtatcttaccaatttgttgtgcactttttcttcccagccttccccatcttatcctattatttttttaaatatgatttaataaataattgaaatatatactaccaataaaataactcattctctttcattagttaacattacagtgtacagaaaagcattatgatgtagaaaattcaaattgggccgggtgcggtggctcacgcctgtaatcccagcactttgggaggccgaggtgggcggatcatgaggtcaggagttcgataccagcctggccaatatggtgaaaaccccatctagtaaaactacaaaaattagccgggcgtggtggcgcccacctgtagtcccagctactcgggaggctgaggcaaaagaattgcttgaacccgggaggcagaggttgcagtgagccaagatagcgccactgcactccagcctggacaacagagcaagactccgtctcaaaaaaaaaaaaaaaagaaaaaaagaaaattcaaattgaactgtgaatcagcagatctgagctttaattttggttttgttagctacttgatgtgtaacttgctaggcaagtcacttcccctctatgggctttagtttcctcatctgtaaaatggagggggaggagaaattttaagcccgtcttccttgaataggttgtatgccttctttctaattaaaaacatagatgccctagatgcctttcttaaaaactgtattactgcattttacaatattttcttttaatcttccttctttcccttcttaatttagtagagaggataaattatttttggtatcctacatttaccaggacagcatatcttaggaagcagggacccagaaaataatgaatgagtgaatatatgttttatttgagctaatgaaaaattttttaaataaagtaccgtcaaaaagatgttgaagtttcattgaaaagtagttctacctaaagaatgaaacgtgtttagtaaagttcaattggtctgttctgtattggatagatgtacaaagaagaacactcttgaacttgtctttaagaagccctcttactagtaggagaggcaagcttctaaactttgtattatggaaaattgacagcaataatacacacatcaccaactttaagagttactaacttgtggtcagtcttgcttcatccatacctccatccacttccttctttattttgaagcaaatccctagacttttttttttttttttaaccagttgttaccatgcagtgtgataagtataataatagacatgttaatccaagtgaggtgcaaatttgttcatataaatatattttgagacttgagcattatactgttctgggcacgagaaattagatatagtaagctactgtagggcagggataatataattgaagagactgtacatatgtgaaacagaatgtagcaacactggatcatgtgccaaaattggtggtagagactcttaagtgggaactgacattattttagaatgaaagtagaacttaaacaagtggcgatagagagaaagaacattcagggataaggtgagggtaatcacatggataaagcgtgcggttaggaaatctaattttggcgctatagaataagttatatctaaatctgtatctctctatctttatcttttagactactacaacatgtaattggcatactgtagatgttatatcagaacttgaacaaagccggttgctgtagcagaaattaggacacactactttgtgaatatatcactgttcgtggttaattttttggcacgttctgttaaaaagccttctaaatatcttaataccacatgtattaatggatccattcttgttagaatgtttgtgggtttgtgccatcagctttggtgtgcagttgtgtgtgtgtgtttaacttaaatgttaactatttgacaattttaagattattttgaaatatctagtttagatcattcttgtcttacatgaaattttttccagaaatgttggcataattcatgagaaatccttgaatttagggaattgttaccattatagcttattttgaagtattctgagaataaaatcttaaagtatattccctaatgcagaaattgcttgtcaaaggtcatgaacttctctgagcatctcctcaaagtgttgtgctatctcatcagaaaaatgtacgttcaaatatccttggggggtctgtggattctgtcttaataatttattctttaatgtgtaggcagaaagcatactgctaaaattcaactcaattatctttctgtgtgttctgcttgccttttacaaacaagtgtttttaattattaagagtgataaaatgataaagcttattattgcaaatgcctaattaaaaaattagacattcttaattgaattcttggggaaaaacaagctgtagccagtttaataaataggaattatttcactaaagattttggaataagcatgtggtactttatttatggctcctgtccatcctggattaacaggaagtagaatatatgacatatgaatgaataaatgcataaatacctttttttcccccagaagtaaaaactttgacttactgtgtccttaggcagttaagatctgtggaggaaaggatctgctaaagtattttgaggttcacatctgtgttgaaacaaccagaagtaatgcaggagcttagaaactgtttttggctgacaaaggattgattctcagtggagccctgagatacaagtgctcatagttcacttagtttgaggaatggccctaaatgagtttcttagaaataggtggttttaaaaacttgtggattgtaattaaaatgtaattatgataatgattatgagcataagcagaattctcaggagataggaacaggtgaattagctggtaatgggacatttgaccccacagagctgtgcacagactgttcgaagttcagtgaatattaggtgaattgctttaaagtgatacccttgtgacctgttggagttaataatttttcaagtacctaatctactagtaggaaacaacttattccaatacatagtagtaaaaatacagactgtgaaagccagaagagattttaacaatcagtgatctggcctctccttcaataaatttaaagagtgatcagagaggttgacttgcctaaggtctgttggttatggcaatcccaacagcgttgtttctcattacctgatttttggtaagtctattgtgcttatttattttgtttgtcttttcattctggatctcagtatttggagaaggaagtatattaactttagcatggtaactagattattggtaaattggctaagaattccctgaaatgttataccataatgtttttactttgccatcatatactccttccatctttaacataataacccatagttacaagatttattagggtaggcgtgttttaggagcttaattccattccacagttggaaacagatattaagaatccacagttcttaaaacattttcctcatgcttttttatacctttctaggatgatctttgcctaacagcatttagttgcaagctgtgtctatgaacttggcaaagttttaaaaataaactaggaaaagatttttgagaagagagtttgttatgggatttagtcatttaaatacattcctaaaagctgttttttccccactcaaaactagacactggaaggatcattgacatccaggttcaaagaagttactgcttacatgactgatcccgattctgagttcttttgccacatttggttcatgtggaaaggctggctggggctaagacttgcccgtacattagcgacatcatagccagagtgaggacccttagaacagtgcctgtcaagcttttttagtcctagccttttggctgagtcattctttagctcaataatttctactttctaatggaataataacacttgtcaaggtataagcattttttgggaagagctatatggatggttcctaattgaatcacaaaaaatatgcttgtcataaagtctagactaattagaaaactgcaggcctcaaatcctagtgatggaattgtatcaatatattctctacagttataataaaataaccaaaaactaaattgataacgatgagccaaacctaatggtaatttaattaaaaggcaagaataatgacaattgaaaacgaagaccaactaaagacaacacagtttcactgatggcaagtgcccctcttgaaagttacggacttctacgttttgagtatgcatatgtggtaggagcttgcagcattgccagttgcagcaactggatatactagtggaatacaaattgaagtttttggtacattctagtaaagtcttcatttttgcaactcttggtaactagcttaatagtttattcataagtagctttatggattaaaggaaggtcatgttttctttttttttgagactgagtctcgctgtgtcgcccaggagggagtgcagtggtgcgatctccgctcactgcaagctccgcctcctgggttcatgccattctcctgcctcagcctcctgagtagctgggactacagatgcctgccaccatgcccagctaattttttgtatttttagtagagacggggtttcaccgtgttagccaggacggtctcgatctcctgaccttgtgatccacccgcctcggcctcccaaagtgctggggttacaggcatggccacgaaggtcatgctttctaaatcatttatagtccatcaggaggcttggccctttcttggaaaatcattacttttgaaggctggtttagtaatccttgagcttctcatgagcattatttccctagctgtgttgggacatttatgaagagcagggcttagatagaatttagtgggtcttttttttgttttttacctcaggacatttgtaatctttgatatgctaatatacatctttaatctggttgggataaagcatatagtttcctagcaccatttaccacaaatgctgccttggaggactgagtcctgtttttaggttcaggcttgagaacaagattcagaaggcagccataagaaagtgacacaagaaaaatagaaaatacagcatatatatgaagcatacataatttacctttgttaatcttgggcgaagcggtatgtagtatatatgtagtgttcagggtaaatatggtatgttttcctataacatcggttttacttcagtaatttgaaatattttatataaatcttcaggtatattgtgaagtcaaattttataaattttttttagcaaaaaagatattgcaattctgttataaaagtttgaaaagctctgtctttggtagtacagttaaaatattagtatatctttgtatattgaaatactgtgtttcacttctctgagtctgaaagtgttaggattaaaatttcatgtcttaatatgaaaacattattattaaggtaaaaagtgatcaagcacaatagtttacctaaaaaaagagtcatgtatgacttacgggaattactttatttaaaaaaactgttttcttcccctagaaggaaattgaatacatgtttttgcaagcagcagactgttttttccccctccaatttctctaacttaactaattgttagaactatttacttttttgttattttgggtgcttcttcctgtttattattcagtgttatcaagctgtgtgttaacaagaacacagcccaccttctgtaggctttatagtagagaagttaccctactggttctggccttaaggacagaaacagaaacaaaggaaaatgtatattattgaaaaatttgttttctgatcagcagataattttagtgctacaaaactgacatttcctctctcatagagtagaatttgactttttaaaggtgtctttatgtttgatttttacatcactcagaggaattctgaatcttatttttctcagtgtgtaacatttcccaggatagtaagatcctagaagcattttaactcttgtcaaagtgccatgcttatggaacagcatcattatatgaaacagttgtatagtggcctaagaactaatgaacgtctttagattccttactaccgagaagtgccttggggggaagtattggggaaaataggatatagacagttaaatattggtaaatcagtgcttgtgtaggcaaacaaagtggccattatatctacttcaatgggtacttaccacagggttggacactagcatcttttattgaaaaaagaaatgttaaccaggatgctacagctgatctttatttgtggaaaatgctcaataagccttaatttttgaaaaaggaaaaaggaacccactgttattaggagcttgactacactaaataatttgtacactttgggtttgcattttggctctttttttgttgcttatagatttctttcaggtgaggttttcttttttgagataggttctcaccctgttgcataggctggactcaaactcttcgcctcatgcacttcttctgcttcagcctcccaagtagttgggcacacagttgtgtgccactgtgcctggctcagaggatgttttctttgatgttgagtctgtcttagtccatttgtattgatataaaggaatacctgaagctgggtaatttgtaaagaaaagaggtttatgtggctcacagttttgcaggctgtacaagaagcacggcatcagtatctgcttctgatgagggcctcaggaggcttccactcctggtgtaaggtgaaggggagcaggcatcacacagtgagagaggaagcaagagagaaagaggaagagctgccagtctcttttcaacagccagttcttgtggctgagaactgagccagttctcactatgagtgagaacgcttagtggcaccaagccattaatgaggaatctgcccacatgacccaaacacctcccaccaggccccacctccaacattgggaatcagatttcaacatgagacttggtgggaccaaacaaaccatatgtaaaccatagcagtcttaatcaaaacattaagtgatgattgcagttaccaaaatatagtaggaaaaacactggaggattggttttcaatgcttcagatgggaatctatcagaaaatcttaatggatatacttagctcgaggcttcttcataatctaacttctgtaaaacaagttgtcttgcttttgactagaggtgtgtcaactccagatggtaatgctgcagaactttgctccttagttcagctaaaaccaggttcaggagttcatagttaattgaacatgggaaagttaattgaacatgggaatgtgaaattctcgttcagtagatgaggttattgggtagacagaatatttcaaagtgtgagatccatgagtccatatttttaaaatgggttttgagtggctaaaaaaaacagtaagaaacaactcttcgttgtaccgtagtcctgtgaaataggtccaacatgggttggtggttgacagtctcaagagtaacaggcagttacttgatgctgtttgtgacagactgtattttctaaggatggttgcaacagtattttccatcgcacatgtgtgagcttgtacagaccctaactgttctctcattctgaggtgggatttaagtcccttgaatttgggcagtcttgtaaatcacttgtagccaatagaatgtggcagaaaattacactgtatgacttccaaggctaggtcagaaaaggtgagagagcttttgcctagctcacaagaatactggtctttaagccattagcagctttgtaagtatctgactattctgaggtccccatgctataaggaagcccaaactatctcatggggaaaatcgaagaggctaaagtccggagctagaactgctcagccagaattgcttagctgagccctttacaaattcctaactcataaaaattgtggaagaaaataaaatggtggttgttttaaaacactaagttttagagtgattttgttatgtagtgataggtagccagaatactccattccatactactttcccatccatacttttaaattctgtgcttttttattattattattatatcaagtttttgaacaaagtagtgggcaagagtttctctgagtttgtgacaggattatgttatgtgctcttcttcacttgtagtcttttctgcaaaataatacaacccaagcctcatccctgcatatcttaatgggctttccttttagaaatacagatttttaaaaatatatatcttgaaaaaggctataggtcatgtcatccttttgcattcagcctctggcatatctgtatttctgaagcctggcattaatgtgttgttttgttcatgaagatattattgtatcaaacaagcatttgttggccattttacagtgtgtcagtaacaatagtagtagtgaaatcatagacaacgaatatttagactgtactgctttcccattgatgtctttctcatttatacttcatttttctgaatgtttgtggaatattggaaatcattgtttaaaacagaggttggcaaactatggcctgcaaactgtcttcctgtttttttaaagttttattggaacacagccacacccattcatttatttattatccatggctgcttttctggtacagtggcagagctgagaagttgttgctgagattgtatggttcacaaagtggaaaatacttgttacttggccctttacagaaacctttgccagctcctggtttagactgtttcttagaagttgattatcctttttacttttttagttttttacttttgaggcagggtctcactctgtcacccaggctggagtgcagtggcacaattatggctaactgtagtctcaacctcctgggctcaagtgatccttccacctcagcctctcaagtagctagaatcacaggtgtgcaccactacaactggcttatttttgtatttttttttttcaaggtggggttttgccttgttgccaaggctggtctcaaactcacgggctcaagcaatctgcccaccttggcctctcacagtgccgggattacaggcatgagccactgcactcagccagttcccccttttaaagggacatttatttgaagttattttttcttctacttttaaagacatgcaatctaatgaatattaaaagattatttaacgtaactttctatctgctgcttgaatttctttcagtactcctaccatatgatcttccagctgaaagggataagataatgagataagcagaattaattaaataatgacagctgggagtggtggctcacgcctgtaatcccagcactttgggaggctgaggcaggtggattttttgaggtcaggagttggagaccagcctggccaacatggtgaaacctcatctctactaaaaatacaaaaattagctggacgtggtggtgggtgcctgtaatcccagctacttgggtggttgaggtaggagaattgcttgaacctgggaggtggaggttgcagtgagccgagatcacaccactgcactccagcctggctgacagaacaagactccatctcaaaaaaaaaaagacaaagcagcattggatatgggtgtgttaaacacagaaattgcacctgattgggagtaaaaaaaacatagatgaaatactaatattttgttatttgtccatttgctcaaaactgtctcttcattggtaagttttttgtttttttttaacaatttttcatagagatggggtctagcgatgttgcccaggctggtctcgaactcctggcctcaagtgatcctcctgcctgggctcccaaagtgctgggatcacaggtgtgaacaactgtgcttagcttcattggtaggttttgactttgaatttgtttacttgcagaaggcacagaagagccaattttaatagaaaaaacacgtaaatgggctggacttccaggtatagctataggtggtagaaatttttaggtagctggatttaatggttagatattcaatttgagactttccattgcagtacttagtttccctaaataaatgtgtagcagctaaaacatggaactaaaagtccttacaaatatacctgttgtgagttactgggtttgtacaataaatgatgatacagaaagatgcatacaagtagagccagtctagacttgactgcagtactatattgtgtattgtactatatttgtatattctatgtactttattgctttgtgaacatggtgaacattgtgaatgaggtgaatctcacaggagatagaagaaggtacatccatttccaagatcaacattatctcgagagggaaagtaatttttcacattccattcaggaaatccatcctgttagagtcccgttaattatttgtttcatacataagtaaccatctaatgtttttaatacattttccatctaataaagaaatggaatgaatttaagtaataaagattagtaaaagaaggaaaacataggttgagcatcacattaaaaatttttagactatttctgaaatattacagatcagactgacagctgaaggaccatactgagaatcattaccatagaagtaaagggaagatgcataaggaaatgtaattgtgtgcccagtcttttgtgtttattttcacaaaaatgctataaggtggagttgggtgggttggatgttttatctgtattttaaagataaagaaactgcagacccaaacaggtaagcaagctcaacagcaaggtaaacaggtgagtttagattctaacctaaacctgctagacttggagtcccagggatttctattgtgtcttggtgctggattatctgaaaggcttgtttctataaagggcctaccttatttaggaaggagcagtttataagctgggcctcatttcattcagtattgaaaatgttttcactaaacatttagtttcctaatagctcactagtctgtgtactttattgctttgtgaacatggtgaccattcaagtttaaggcatttaagttacagtatatattttcaaactgaagtgatccataggattaccttggtataggaatttgtagaaacatgtttgaatgtattattagtcttaagcaagaccgcaaatcttcttgttttctaccttaccttattaactctactgccttgggggttttttgtttctaatatttcaataaaagattctatctaggtaagatctctctgtggatcaggtagggtggagttggaaataaagccactgatctttgatatgtgcgtcttacctgaaaatgatgtctttttattcaaattgatagtgacaataattaaatccacctagaagatggtcttctgagtagtgttctaaggttgacagtagacttttctccctcttgttttggctgcctctggaaatggccctcagggaaatcctggtaaagtctaattgcctttagattttaactacctgatttttttttttttgttttttgaaatgcaagatctcacatatttattattgaacccagccaactggcaccttcatagcacatacagagagaaaaaatatattcccaataagacgtgtccaactgtccagatagtggtgacattttcagcttgatatggtaacatggttgtgatcttgacatagcataagtatgtgtgccatctcatgtgcaattctttatagacccagtctggttcttctccagtgtttccttttggagttgtacctgattttattaccagttttcatctaaatccactgggagtgggacaattttttgcttttgtttcttggccaggaaacacttaatccggaaactcttgtgagaagacatggtgagaagccaagtcgagcacacacaatgatggtggagaaaggaagagagagcctgaattttttaacagtaaaatttctatactgagttgctagtttggcccatcaacttttaatgcaatgatgtggaatttttaaggattctcagcaagaggttgtcttatttcatatgttaaaattttctgtggagcagatttttgtccattgtatgcagttagtaaaagctgaggccttgtagtggagactgctgttgtttcctcctgtcgtgagtcatacaactttagaactgggtaggacctttcagatcatctattttaaccccttcactttctctgaacttctcttctagcgctgtgcactcaattctcattcatgatgtgatgccttgacctcgctgaaggacaagtagaaactttatgtgccttctctaaaagtgggatttagttagaagatttggttccaatttcaccctacccgtatagacgtgctgagggacctcaggcaagaaaagttattaaggagacttttggaaaatagtatctgaaggcatgagagagagacagtttgtgctaaataaatttttctttccctttcttcccttaactatgtatttttctcctcactggtgagtcttctttaaaacttcattcttattctacctggctgacccatggaatttcctctcatttcctttccgcataccccacttcttatatatttgttcataatttgtcttactgcttagcaagtatctgaaataatcagctaacattatgttaaaagttttaattaatttgagttgttttaaattctaatacagaaaaaggaattctcatttctcggcaccaaaaagctgccgtttaaaaaaaagtggtaattttttgtgctttttaaaaaatgactagtcaagtgcaatagtgagaagaagggaacaagtagagcaaagagttcagtctataactgtgaacaatcagttgtgataattcactatcttcggaccagctttacacttttctgattattggaatactccaatctctccttttaattgttttatctgtttaaaaaaactcttttaaaaagttgaagatgagaggatcttgtctttaattatccagaagtttctaaaattaatgaaacaacatgattagccttccattaatattagggcatttattaagagaatacaatcatgttacaaaagtgcaggtttatattgagtggggtgttaccttagaagttctctgtgattctccatttgtggtcatttcaggctcttttggcccatgagacctgcgtgttcttttgcaaatgaggaaacaggttcagagtagtagctttatcttaggatctcatagctgctaaattgcagagtttggacttgaactcctagcaagtaaatatatcttaagtagctttgtattatgtttctcttagtgcatttataaatgcaaatatgtgataattttttttacagccactaggaaaacccactttgtaagtaagcctaagtgaattccttgaaaataatggtgatacatggtactcagcattttgctgatcttcagaaagattgcttctttaacttgagtcaaaagataaggtgtgttttgaacaaaatagctagctacgactgctaggtgctatttcctaaagcagctcaagaacagtgaaaataaatgtaaattacctttcacagtcctgtcgtccccttccccaagtgtgtgggaatgctaatgctgcagcttttctcatattgcagtggtgcagctacttttcaacagatgacaggcgcttgtagatatcttgctgtgtagcaggaatctgaacagcatgctctggaaggattgtcagcattcctttcatggcttttgcttttctagttgcttctggccactctggcaggactgtggaagataggacaagtctgaacttcccttaaaagaactctcatttttattggctttgccaataagtttgtagggtgaagtgtattggttgaatggggaagccaagaatacatttcttttcaaattagtgcggctttcctttgagccagaggcagagtttaaaaatatttagtgcttgtcatatacaccatggaatactatgcagccataaaaaatgatgagttcatgtcctttgtagggacatggatgaagctggaaaccatcattctcagcaaactatcgcaaggacaaaaaaccaaacaccgcatgctctcataggtgggaattgaacaatgagaacacatggacacaggaaggggaacatcacacaccggggactgttgtggggtggggggaggggggagggatagcattaggagatatacctaatcctaaatgacgagttaatgggtgcagcacaccaacatggcacatgtatacatatgtaacaaacctgcacattgtgcacatataccctaaaacttaaagtataataataataaaattaaaaaaatttgaaaataaatatcaaaatgcacaataagaaaataaaatgagtctcttgttggcagcaaaaaaaaatatatatttagtgcttgtgaagtttttggtggcattatgctaagttgtgggaattgtttttttttccctaggaggaaaattgtgtaagtcattatagtagtataaaatcacttgttaatagctttgaaagaagccgcttcattctacaactctcttagcaagcaatctttattctgttaggcttgaggagaattaagcctaacagaatatttattttctgctatttggtggtgacagattagctgtttaggctttggtagggcagatgtcttgataactgaaggaagtacatcattctgggttttttttagggttgaactcatcccaggctctaatttctcaattgttagagggaaaactgcttaatatctttccctgtcttacatgcatatgtacacctatggaaaactttctggtgcctggtacctagtaggcccttaataaatatttgttgaataaatttttacataagaaaaaaataaagctcaaagaattagctgatctaggtatgttctcagtatactatttaatatatattgagtatgtaattgtcattaatacctacttgttaggaagtatattgatgcagaattattcttcatatctcccatatgaggttattgacatcaaaccgttttatttatttattttttttaagagatggggtcttctgtgttgcccaggctgaccttgaactcctgggctcaagtgatccctctgtctcagccttcaagagtagctgggaccattcatttgaacttcaatgctctgtagttttaattaggctttttgtcactgaaatcttgaaatagtctcaaacctgaagtagattataatgaaagtaaccatataatttattgtgcaaactgagacacttctgagaaatcaatcaaaattaagttggagcagcatgtataaaccaggcttgttctaggcaaactaggacatatgatccctgtttgtttttatttttcaaagtaaatgttttatcgaaatataataaattcagaaagtccatatattcgaagtggacagcttgatgaatttttaaaaaatgagcctcccagatcaagaaatagaaatagaacatcaccagaatcccagaagtctccttcatgttaccttctggtcactccctcttcttccctgcaagacttttggccgtagatgttttgcctagtttgaactttatataaatggcatcatatagtagtacacacttttttacctggccttactagctcaacgctccctttgtgagatccctccacatgtgttttagcgatcgttccttcatttttattgtttttaaatatttcatcatatgcatataccacactgtatatgttatattgttgatgaacacttgggttttattttgggccaacaaaaatggtgctgttataaccatacttgcttgttcttttgatgaacatatgtacttatttctattgggtatataatcaagagtggaattgctaggtcctatgatatgtgaatgttcagctttagtgggtagtaccatctcctaagtatcatatcaacctgtacttcctccagcagtaagatgagagttccagttattgtgcacccttattctgagggtcagtgtagtgggatcacataggggttttaacttgataactaatgaagttgagccccttttcatgtgctgtcatttcgatctttttttttttttttttttttgagttagagtcttgctctgtcggccaggctggagtgcagtggcacggtcttggctcactgcaacctccgtatcccgggctcaagcaattctcctgcctcagcctcccaagtcgctgggattaaaggcgtgtgccaccacgcccgactaatttttgtatttttagtagagacggggtttcaccatgttggccaggctggtctctgaactcctgacctcaggtaatctgcccgcctcagcctcccaaagtgctgggattacaggtgtgaaccaccgcgcctggcccaatccttttttgtaatgcccatttgtatactttcttttcttgtttgttcaagcctttcccatttttctattggtttatctctcattgatttggaatttacatatttatgtattctagatattaatgttttcattatatatatattacaaatatcttttactctggtttgccttttctctttattgttaatgtcttgggataaacttcattttagttttgtccagtttagcaatattttcctttttatgttctgtttaagaaatgactgcatgaaagtcatggaaatggtcctcctctgtaatcttgtagaagcataattgttttacctttcacatttagatctccagtttatctgaatttctgtgtatagtgtgagatagagttcaaaatttcattttttctatatggataattgactctgcaccattctcttcttgtcccaataccacattcctgtagctttataatacatctcaatatatggtaatgtaagttctccatctttgttatttatgtttgtcttggctaatcttggccctttgtatttccataaacattttaaagtctcagtttccatattaaaaaaacagcgtagattttgattgggattatattgactttaaggatggtaaattgacatcttcagtcttccaatctaggaatatagtatatgtctccacttatttaggtgttgtttaatttctgtcagtatttagtaggttttagaatagaggtcttatatatcttttctatccttttccaattcttgatggttttttaaaaaataatttattgagatgagattcacataatataaaataaccatttgtgtctgttttgtgctgctataacaaaatatcttagactgggtaatctataaagaacagaaatttatttctcaccattctggaggctgggaagttcaagatcaaaatgtaccaattgttttggttgtctgatgagagctgctccctgcttctaagatggcacgttgttgaaccctctatgggaaaggaatgttgtgtcctcacctggcagaaggcagaaagaaaagcaagagagcaaactagcacaatgttgagtgaagccacttttatgaggcccttaatcccattgatgaggaaggagccctcctgcccttatctcctcttaaagaacccttctcttaatagtatcacattggcaaaatctgaattttggaggggacacattcaaatcatagcaccatttaagtgagcaattcagtggcatttagtacattcagtgttgtgcaactgccacctctatctagttccaaaacatttcatcattcgaaagtaaaactccttaagcagtttctctatactcaactattcccctatgccacaggcacaggcaactaccagtttgcattctgtctctgtatatgtatctgttatggatatttcatatgaaaggaatcatatagtatgtgaccttttgtgtctgacttctttcatttgatatatttttgaggttcatccatgttgtagtaagtatcagaactttgttcttttttatggctcagtagtattccattgtatgtataaaccacaatttgtttattcatttgctgattgacatgtgggctatttgtgccacttggctatcgtgagcagtgctgctatagattgagtatccctaatccaaaaaatctgaaattcagaatgctccaaaattcaaaacttttgaccgggtgtggtggctcatgccagtaatcctagcactttgggaggccaaagtgggtggatcacttgaggtcaggagttcaagaccagcctggccaacatggagaaaccccatctctactaaaaatacaaaaattagctgggcgtggtggcgggcacctgtagtcccagctactcgaaggctgaggcaggagactcacttgaacccaggaggtaaaggatgcagtgagccgagattgtgtcactgcacttcagcctgggtgacagagtgagactttctccagaaggaaaaacttttaagcaccaacatgatgctcaaaggaaatgcttccagatttcatatgttcagattggggatgttcaaccagtaagcataatgcaaatattccaaatttgaaaaaaatctgaacaatgaaatgcttctggtccaaagcatttcggataggggatacttaaccttacaaacctgtgtcaacttgtttgagaacctgttttcagttttttggtatgtttacctaggagtggaattgctgggtcatatgataattctgtttaactttttaaggaactgccaaacgtttttccacagcagctgagctattttacagtctcaccaacagtgtatgattgttctgatttttgtacgtcttcaccaacacttatttttttctgtaattttggtgttctatactgttttaagtggtataattttgagtttaaaatttttcactatttcttattggtatacagaaatacattttttctccatataaaccttgtaatcaggtgacattaaattcgcttgggggctattaattttaatagtctatttatttactggattttgtacttacacctgaatttccattttctaaatgctttcatattatttgtttccttttttagtaattatattatggatgcagcagtcttgtgaacaacttagagaatataggaatttaagttttcttaaaatttttccttagtttcctttgtagttctattgcttttcattttggtctttctttattttgtaggtatttttcaaatatctggtgatccgtggttatctgtttgtatttataatggaatagggtggttggttttggtagctgatagtggcttcctctagttttttgaggtctgttttctcaaaagagcttttccacagatggtatgattgagaactctgcgtgagtttcctttaaggtggggatatccaagcttttggcttccctgggccacattggaagaagaattatcttgggccacacataaaatacactgacactaacaacagctaatgagcttaaaaaaaatcacaaaaaagctaatgatgttttaagaaagtttatgaatttgtgttgggctgcattcaaagccatcctgggccatgggttggacaagcttgcattaaggccggcagcagaggctgaggacttaaaatgtattctgagcgctataaatgcttttttcttttgtttgtttttgtttgctctctcctgatccactgcctcctccaccttcgtttgtggatgtttggagcaaccatcaggctcaattccagttctcttttgtccctagtacccatgctggatgctcttctcaatcagatctagatactaagcctgggagccaaagtttatgcagaaagtaagactgtcatgagtagctctgctgttctgtgagcaatcttttaattatcttgatttccttatgatttagtccagcttttggatcctgaccttgatgttttctcccaggttccatttaggagattggtaaaaagagctcttgcctcattatagtcctttcctgtccttgttttgcttgggttgctgtttcttctggtatggctattctaccaattcagtcttatctgtttcttctagaaattcttctgtttcttttctttcttcctttttgtttgacttggtttaatggagctattttttccaggttgttatgaacatatattttttaattatgaaaaatttggacataaatcacatgtatctactccccagcttaaataaaacataaatacaattcaagctccttattctctctctggttgtattgcactccctctcatgcatctattaatatttttccatctgtatgcattgctaaacaatacagagcattgttttgaatgtgttagagctttttgtagtgacataatacatgaattcttctgcaccttgtttttattttttctttcattatggttgttttcttaatatgtcttttctgctgttttagaggaatttgggtagagaagataagtcagctcatgtatttcttactctaactttttaaaaggggagatttaagcaccttttggatatactgtcactaagagacacgtagtagaaagggctcggtgtcacctcttcttgtttcaattggtgttgatacgcgaatatgacacctccagtgttacacaagctaggtaattgagtcttgctgctgacctgtatttggtgttataaatccctttggagtcagagaaaccattcatttgtgtttagggtataactgaggttgaatgaagatttgagttcttattgctggaaggaatttttagacatcctttagtacaaattgtaccaaagaaactcaagtccagagaacgtgagtgacttgtctgaggtgatccaagggaaaaacacagggttaaaaataagctatagttctcattcttctttccactttactataatgaacttgaggttagagtcctctcttgttaatgttctattttgacttttgtctgctttttaaaatacttatttgaataccaagagatttttagtatgaaagaatgatggtgaatccttaaactaatgcttatttgccatgtttttcttaggatcaaaatggtttcaatcccagaatactatgaaggcaagaacgtcctcctcacaggagctaccggttttctagggaaggtgcttctggaaaagttgctgaggtcttgtcctaaggtgaattcagtatatgttttggtgaggcagaaagctggacagacaccacaagagcgagtggaagaagtccttagtggcaaggtaagtatggaaaatgagcactcagaacaaagaaaaaagcgtgtgcttgtgtatataattattgtagtcgtcaatagcttggtatatttcttcagtattctgaaaaaattagtaaaacaaaaaaacttagtaagttcctacaggatggcaagaaactggatatgacttgtgaatcacaaggagaaaaagttttcctctgtgactggcaaaattgtataacaagctctaaattacctttatggtaggtatttaaagtatgtttttagaacatttgaggcaggttgtttgtaactactaaataatttaaatagccttgataataatagtaattaggtagtgagactacctactattctgtaagacactatgctttgataaaatttataaacaccacttactcccccacaacagtattaggaggtagagaagtcacatattcccatttaacagatgacagaggggccgtatagaatataatatgtcatatattttgagcctttggaaaaatattactaagaaaaaatggaaatgagctagaataaaattatttcacgatcataagtttgtgaattctctcaaaatgaatgaatttatctgacatttactaataaatagtaagttgaatcggaaggctataagctcaattttggtacacataaggaatctgactgcaggcatatctcaaaaaggaatttcaagtagagcatttattttacaattagaataacactcatttgaatatctacattcgtataggcctcttaaaaaatcctgaaactgtagcaagcctcttcatagcaaccaaccagacttttgactttgaatgaacttcatatacctttatagatagttctttggaattaattgtcatatcacatcagcatttgtttgacaccatgcaacagatattcctcattatgttggttttattttttaatgatgggatgtaagattctttcttagaagtttaaaaattattattatacttttaaattattcaaattagtctacattagtctcccttaatcattttttctctctgattctttgctgaacccttctggaatcctttgcttcccttaaaacctacaaggaaagagtcatcaatggggctgtaaaaccacaaggcttgttctaagtaaaatgtctacatgtatgttttattgctgtctctgccctttgtttactcatcttggcatttttattatgaaccacttgtaattggtatgttttaatttttctcctgatactcctctccccccagtgaggggttatttgttcttactcactttttattttttagataatatttattgtgcctgcttagtcctgggcacttgacttgttgtagggggtggaattcagggataagtaagatacgttcctggctttttagacagtttttaagagggaaggaagagggagtgatagacgtgtcaggagtagataggaacagatatttaagctgatgtgctggccagaattgagggtctgagtaaaacatgaagaagacttgggcatcttcttcggggtcttcagagcagtgcttctaaaatttcttccacactaagcctaagagaaggagtattttctacttagagcctgaggtttcattgaacttcagtggtttagcctgaacatacagctattattttcaataaaaaaaagttttttccccaaatatttgacttaacttgatactccataaaattatgtaattttatcttatgccttcagttacctcctggcatatcctaccacttaatcctaaagccatgtattctccattatgtatagcattgctggtgagtccataaaaatgagtcctttttatgtcaaatagcagtgagtgtacacttaaagttagtaagaaattttaggtatggtctactctgattttgaaataggtataaagaacataaggccaaaagcacataccaccatatgggacattgacttatagcagggtttctcagcttcagcaccattgacattttgggctggctagttctttgttctggaggcttgttctatgcatggtagggttatcagcagcattcctggcctcactcactcttgtgacaaccaaaaatgtttttagacatcaccaaatgtctgttggggaccaaaatcacccctggtcaagtaccatgacttatgggaatgtctcaggtaacagaaactccattgggtgatgaagattgaattaaaataattgatcatggcctgtcacggtggttcatgcctataatcccagcactttgggaggccacggctggtgggtcacttgaggccaggagttcaagaccagcctggccaataatggagaaaccccatctctactaaaaaatacaaaaattagccgggcgtggtggtgcatgcctgtggtcccagctactcgggaggctgaggtgggaggattgctggaacctgggaggcagaggttgcagtgagttgagattgcgccactgcactccagcatgggtgatgagtaagaccctatctcaaaaaaataaaaaataaaatgaagtagttgatcatgaagtaaattcaggaaagaatcaaggatattaaaaaggcattagtaaacgtagtaaagtaggaactaattgggtactagtgggttgaaagcaccagaaaagatggtattgagtaaagagatgttggccagagaagggaagagtatcacatttaagatctagcaagtttaagagcagcatgatcatgtcctggtggtagtggtatagataactgatattaaaggaaattaaaggtcatcagcaattaggagaatgaagaagtacgaatcagggtgttaaaaagtacttttttagtcattccttaggttccttttcctctgcttgccccataaggattgatattcttcaagtttcaggcttaggccttgttttctcactaggtccagtgagatggttactcagccttcctctgttttatgtgagatgaatggatgtcctttaaattagatttggatttagtttcatatagttaggatcttgggtccttattattgctgttacctggataaactcttttctactcccagggcttcagttactacctgtatgtggttagtaaaatctatgttgatagtccagctctctccctgaacttagacccacaaagccagtcacctttactagacctgtcttctggggtgtcatgcaggcactttacacttgacattcagaagactgaatttgtatctccaaaacagtacttctttctctccctgagttcattagtctactgaatttattcacttaacaaatgtttaaagtctttatcttgccaggcaagatctgctctcttggacttgtatgctgagcaaaatagatatggaccctaccctaatgaagtttgcattccttatctctcaaattcagtcataagccaaaatgactacatcctgaatgttacatcctgaatctcattgccgttattttgattcagacaagtaaatatcttgatatgggcaacgacaagagtgtcctaaaactcattactgccaaaggattttttaaaaattatgaacatgcttgtatcacctctctgcttaaaatctgtcaatagcgaccgggctggtggctcacgcctataatcccagcgctttgggaggtcaaggtggggggatcatgaggtcaggagatcgacaccatcctggctaacatggtgaaaccccgtctctactaaaaatacagaaaaattagctgggcgtggtggcgggcacctgtagtcccagctactctggaggctgaggcaggagaatggtgtgaacccgtgaggtggagcttgcagtgagccgagatcgcaccactgcactccagcctgggcaacagagcaagactccgtctcaaaaaaaaaaaaaaatctttatcagtagttcaccatgactcccagataaaattcatctttttaatgtggcttaaaaggcacagttatctggcctttcttatctccatacaactctagctgcttttcctgcatactctatgttccaggctgactgaattatttttaatttcccaagcatattaatgccttctgatttctaaggggttatactgctacttcctctgcctggaaacactattattctactttgtaatttcagggccttcctccctcacttttgtccctaacacacacacacattctgttaaatgtcattttctctgagaagccagcttgtgtgtggtcttttaaagctgggttagttgtttctcctatgcaggcccgtaacacttacctgttattgcttaacactatattttaattgtacatttacttggaccaaaggccatttccttgtgtctttagaatctagaaggtgcctgcctggctcatatgaaatactcagtaagtttttattttttaaattaatataagaaaacattaatattcaagtcatgtgctagcagtggaagtagcagtaggagctatcagtaggagcgggaagactgtttatactaaagtcatccaggaatgtggaagtgagcactgatatgttatatagactttcttcttaggttaagaatcctgcttaaactgcaagtttgaacttcaaatggagagtcaaagtgtgatagagcagtgacctagaggtggcatcagtgtttctctgtcaaatctgggataaaaagttaaacttgactcacaattgaatatgcctttaaactgtaatcattttgtgatctgattgtctagcaaaatttattcctttgggtacacttaaagaatgtttaatgttcagcttaaatcctatatatgtaatacttctgaagtttgttcagtttctggtttgcgtttgcttaccaactttttccttgaacatattgactttgttttcctttttaaaaatttgttctaagattttaggtagaatgtaaatcgtgtttttttctaatctactaaaagggaataaaataaaaatgaagtgaagtgaaaaattaagatctagattttagaaatctgaatgatcattttaaacattgtcctaatgtctatattgctgaagtctattctgaggggtgatacaatctaatcagccaaggcatggacagttcaaattcaactttgtgaactaccagctttgtgtacttagcaaactccttaactgctctgagtctcagattccttatctgcaaaatgaggataatagcgtgggcctcatagggtgttttctatacagaataatggcaattaagaatagcaactttaggaattgtatagtttaagtttctaaaaaaatagtcatccttggtgggaaaaaaatggtgataatgagttttagaaagtggaaaaatactgctgtaaaataaatatttttccctcttgatagctttttgacagattgagagatgaaaatccagattttagagagaaaattatagcaatcaacagcgaactcacccaacctaaactggctctcagtgaagaagataaagaggtgatcatagattctaccaatattatattccactgtgcagctacagtaaggtttaatgaaaatttaaggtaagtacaagtaattatataatatttgaacttcagtatagttattaaaaaatctcattttaattctactttttagtcaatttgttttgaatgtgatttgatactatttgcctatgttaactgtggctttcagtgtcctacagagtgttaaaagaattctcttcttcttctcagtttaaaaatcttggataactaatacatgtttattggaagaagttgccatgaatttaaacatgcaacagggaagaggcaaaaagtggagtagaagaaaacttagtcttaacaactaatagtgtttgtcttctctttcttcagaagcctataccccagcagctttattcttctaatctacatcatatccatgtgaaaataaacaaaattaggctcaggttttacaggataaggaaaaattggttataaatttaaatcacacctttttattttcaaacttttgcagtagtgctaggggcaaggtatgttggacataaatttaatttaaaaaataatttagacttctttcaagattcctgttgcaagaaaaagttaagactctaaatgtccactattcttaaaaaaatctaatgagtatgcatttcaaataatggttctgaattcagagcattctttttgacagtgtgtcaaaaaatacagtttttataatgttaatctaattgtatagtctcatgccaattaaaatggtgtagacttggtataggtttcaaagctacttgaaatgtaaaatgttgtctttaaaatgttttaaagataaataactaaaaggaggatattgaatgctctaacaaagaaatgataagtgtttaagatgatagatgtgccagtcaccctgatttaattactatacattgtacgcatcaaaacaccgctatgtatctcataaatatgtacagttatgatatgtcaatttaaaaaataaaatacatttttaaaagtttaaaaaattgagttctgaggctgaggtgggaggatcacttgaagccagcctcagcaacataatgagaccctgtctctataagcaaaatattttaattaagaattaaaaaaattaaaaattaagttctgattacaaaaggtttgatattattccccctattgtctttatctaatatggaagtataaacgtcagtcaacattatataaggtgacagttcagtgccaaagcattacagtgtgttttgcctgtattccaggtgagggcactgtaatagttccttagatctctgcagtagtcctttatgggttttcagtgtattttctcattaattattttattccatagtcaccttacctactgtaatattatagggaaatccattgtacgcttgaggaagctgaggcagcattgtaatggaagggctatgagctttggaattacatacattagttctaatcttgaccatatcattcatttactggtgagtttgtataagttattaaccgccttaagcctcagcttcctgatttataaaattgaagtaacatttctcaaaagattatttttttttccttcaggaaatttaagtgatgtctcagtttgactgtccatggcaggaaatctgaatctgtagcagttgctttatttattttttagctctttctatgcagctgacaggtaaaatattgtgcagccattatgtgttaatgattcaaaggtgacaaaagtatgttattaggactataatatgatcttattttcataacatatatgtgtagatgtatttatgtacatgtctttctatatttgctgataatacatttatctttgaatgttgcagttacaggtaggtttttagtcttacctgtatattattttttctactatgaacatgtgttaatcttcaaataaaggtgtatacaaatgacttttaaaaattatttttaaaagtaacacctataagaaatcttaaagggactgataccctcatcaactaacaaatatccttattttttacatttaaaattttgttgtgtgtgtatatttttgtatataggtctaactatttgtttttaactagcatttccaagattgtgaatgtggtctctaatttttagtgatttatcttttcctaaaattcattagtgtgaaatggtcagtaaagtcgattttttcccccatagttctggcttttattatttccttcatagacaaaagaaagagttcacatagctttatgaagcttagcatgttttcatgaaaaacatacgtagatattggctaatggtagtatagtcttcattgacttaacgaggaaagttatatgctttgaaaggtggacaggaaacattgattagggtaaaactcataaagggaagctttacaaggaggaccaaagtacagcactttcagggaactttctttctgtccccctagggtaagcaaggctaccattaatgaaaaggacatcttctcgttattattttcttcttttactagagatgccatagcagaaggcatcttatgtattacattgtttttcttttcctttgtcaaagcatctatgttcactgacctagcccttgtcattacattgaaattatttctgggaagcaattttaatggatgttgacttccaagtggtgataggacattaggtttgggtcagacactctataatactccaggcaggcatataacaacttcgtatgaaagaattactgtttgtttttgtttttgtttttgtttttgtttgagatagggtctcacctttatcgcccaggctgagagtgcagtgacacaatcatggctcactgcagcctcgacctcctgggttcaagtgatcgtcccacctcagcctccctagtagctggtactagaggcatatgccaacacacctgtctaatttttgtgttttttgtagagacagggtttcactaacagttactctttataactacttgttaagttaacctacaaataaaaaatggcatgaagcttttactgttggggggaagttttcagatgttactacaacattaagcccaataccttgggagagaaaccaacataaattgcacacagatcttatttgcaaagtgcatatggtctagaggcgataggatatgcaaaataaccataatgtaggatagaaaataaggatgtattaaggagcacacatgaaatcctattagagttaagagaaggtagatagagctcacttgttttcagatgtggtggttcctaaatcttgagacaggagaaaaatagataggcttaggattcataaggaaatactgacaaaaagtgtggggagggctgggcgtgggggctcacgcctgtaatcctagcactttgggaggctgaggcaggtggatcacctgaggtcaggagttcaagaccagcctggccaacatggtgaaacctcatctctgctaataatacaaaaatgagccgggcatggtggcacacgcctgtaatctcagctgcttgggaggttgaggcagaagaatcacttgaacctgggacgtggaggttgcagtgagccaagatcatgccattgcactccagcctgggcgacaagagcgaaactccgtctcaaaaaaaaaaaaaaaaaaaagtgagaggagaagtgaagataataaatggagtaacttaagtagttcatcatgggatctggcataagggaaggtactagctggtataagggaaggtactagtaaaggaagtgcaagtaagacagggtcactagagttgagagtaatggagaggcaagaaactggagaatgtgaggacaaaaaccaggctgaagggagagatggatggacagatggtgtggtttgcggaaaattcatagtacaaaattttagaaatagagcaattctgagtgataaaacccaaggtatgaatatgaaagattttcagaaaggaatggaagttaagattgatgcttagaaaagatcaagaaactattgagtttgttgggcattgattatcaaactttagaatgtattaagaatcttaagaattactggaaagtgtgttaaaaatgcatattcctagactgcacttgccaaattttgactttttaattttggaatcatactccagagttctttttagcaagagccttaggtgttagtcactgttgcaccttgttttgcccctttagaaccattgctgtcagaatcagctttggagacattttttaaattacagatgactgagccccctaccctaagattgcgtcattgttccctaaatatctgtgtctatattttcattaagattaaaaaaaatggcagtagtagtgataagatctcatctagacagtattttctcaggggcagtagggtggaaaagagacttgtgtcaaaatggcctggagaacttatttaaaatatagtctttcagacctcatttcatgtgttaaaagtatctgatgatgaggtccaggagtctgcatttttaataaactgctagttatatgttatgccaagtatgagaaccctggtttaaggtctttagaagtattatcaacatagatttctttgaaaaacctaagatgcctgtagaagaaagacgaacaagaaaatgtattggcacttcaggtcgttgagcttttttttctttttaaatttttctttgaagtgatttccatgtcttcatttagtgaaggattctaattacaaagactttctcattttgtacccccctcccaaaagcctgtcttaccgaagatacatttatgactccatataaccaaaacaatgagaacattatttttgtttagtactaaatgacttctgatataacatgtcagagtctcagtctgaaggtcaatggagtagaaattggattgaggtaaaacacagttaggttaactagcctggcagagagatactagatgttactcacgtgggtgcagaatggcttcaggtttgggctctcaggtacagatgcaaagggaaaaaggcaaggcatagaagtgttcctctcaaattatcccttattttcggtgacctagaaactctgtcaccatcctcagggacatgtaacagaatatcctttgtgtacttttcccaaaacatggctcttcctgcccccattgttttgcaaatgcaaaagaaaatagtgcattcccttatagtctagtggacagtatcctctatgtgaaatgtctttcttgttggattttcacttgaacagattttctccctcaattaaggaagaaaaaaaaatgcatccatgattttaagaactcaacccaattatttcattaaaaaaattatttctagtgtgttttcatagggtcttggatactattaaattaaaagagaaactatggcacaggactttttttctctcctggagttactccttgttcctggtgacccaaaacttgtcctgtcctcaggaacctgtaacagaatattctctgtattcctctcccaaacagtaccctccctatccccattgttttgcaaatgtgatagacatcaaagcactgcttcactttacagtgaagtagactggattctatctatgacatctcctggtcttttaaaacaatagttggatttttttcttaaatactgaaaatataagaattttagaaagtactgaaaactttttttaaaaaatttcctttgaacattatttttcattattataaacatagactttctaattttacttttaaaacaatatagaaaatttctgtatttctaattttttccatagttataattttagtgatttgatgatattccatcatgttgacataccacagtttatgtattattcacttagaataaactttaaggaattttagtttctttttatttggaaaatgaggattagaacaagtttttcctctgagttaatttcaacaggttaactagattaataaatataccatttctgtaattcctggtactttgtcctagtttccttcaaatcatttgtgtcagtttgtagtatcaacaacagtgtattactttgccatttttgtcactaatattgagtatttaaatcttttcgtttgtttgtttttatttttttaattgacaaaggtatatatatttttcatttacaacatgttttgaaatatgtatatattgtaatggtcaaatgagctaattagcatattcattatctcacatactttttgtggtgagaatacctaaaatccactctttttgtaatttttaaaaataacaatatattgatattaactatagtctatgttgtacaatagatctcttggtcagttttttaaaagctgtaaacagaagtttaatagaaagcaaatctatccaccatctcattaccttaaggaatatttgttgactgcctgtttggtgactatgttagaaatactgctaaatgtttgcaagctatttgtttaattttataccagtcttagtaggtaggtttcattattgttcccatttccaggtaagaaaactgaggcctgagtgcttcagtttatgtcctgataagtaggccaagtcaggatttgaacacaggtctgattccagagccttgtttttaatcctgcttcaaaaaaatcgtatgtattcttttggtattattcatacaaatgtttcatatttttatagacttcaaataattattttagtagctatattctttcattgtgataaaatacttactttattgagtcattccatattccatagtgaatatttgggctctctaggtttttattaattacatgatgcttcattgataacttttctgcatatatacttttgcttttgtggaattatttacttcaagtaaattccaagaagggaatatatagattattttggggtcttgcatatgccttgtaacagatgtaccagttttattataatatccctttgaattttgtagggtagccttagaaaagtgtttggattgattgctacaaagaggaaaataaacatcttctttcttgattatatgttaatataatttaatgtttctgagttttctctggctgtatcacccttattagtgactctacgttaacattttaaaattacttaaccattctatttttttctccctgtggcacatccatattatgcaagattatacttttaaaaatcaagatgcaaaataagtctagcatgacttaaaaatgtatgcataaaagctaaagactgaaattatctgtttgttcctggacaattatataatttttaaatttctactttaatttttaagggctacaaggcaggttattttataatcaaatttttttaacacagctgataaacatttaatatggaaataaaatacacaaaatcacagctaaaggataagttgtaaagaaacaaaaatttctctgtctctctacttctctaatgaaaatgatatttttaacaggtaaaataacatagcttcccaattttctattgtcactttttctttttaaacagagatgctgttcagttaaatgtgattgcaacgcgacagcttattctccttgcacaacaaatgaagaatctggaagtgttcatgcatgtatcaacagcatatgcctactgtaatcgcaagcatattgatgaagtagtctatccaccacctgtggatcccaagaagctgattgattctttagagtatgtttgtttgaaatttatatacatttactttgatcccaaaagaggccaaggcgggcggatcatgaggtcaggagttcaagagcagccaggccaacatagtgaaaccccatctcactaaaaatacgaaaaaaattagccaggcatggtggcaggcgcctgtagtcccagctacttaggaggctgaagcaggagagttgcttgaatcccagaggttgcagtgagccgagatggcgccactgcactccaacctgggcaacacagtgaaactctgtctcaaaaaaacaaaaaacaaaaaaaaaacctttggattcaagtccctccctcttctcctcaccccaccccatatacatgtgcgcgcgcgcgcgcacacacacacacacacacacacacacacatacatttatctcttttcttcaaaaatttttgcatatcccctgcattcttattgtatagattaatatctaaataaatgttaatgaagtcaatgtgtagttttcacttttgaccaagtataatggtaatatttggaggaaggctcctgaacatcttattagtgatattaggggctctctttttcagggaatcaatcttagcaaccaagaagtaccaatggagacccatgactgcctgtttaatagcaaggctctaatttatcaaaggattcccctcaccaccccccagccatggagtatatatatagaggggcctttaattattagagaatcagaggaatcatagtcttttaattcataaccttactttttatctttctgaggactgagatcctgtcagcaattgttacatgaaaattatttgtgagtattgatagatagggattaaatgagggagtatataccatgaccttattctcatttgctgcagctcaggctttctcatcaaacagacaaggttcagacaagaaaaagagagatcttttttacttttacaattatataaacattccagtatccaccatattttcatgtttgttaatccttatataatatctttgaattttttcctcctttattcttccctcttttagtcttctttctttccagagattctatccactttgactgcttagttaacatctgctgctttctcctaaaataagcacagtcttttctttaaggctttcctgctaatatgaggaaacagatagattgtaaaaaaaatgagaaattaccaagacattttcattgtaattccctaatttctattttctcactcattttcttagatggtcccaaatatctacttcattttcttcatagatcaataaacagaaatatttaatatctgcgggaaaagttgagtgtgaaagttaatggagcattttactttttctcttactaacaatatatacaaacatttgagaaactgaaaaagaacttgtaagctaatgctgtatctcctttccttgctgcaaagaaatctagctaacataattttaagataactcatgggtttgttctgtaaactcgttctagtaataaggcttactagctaaagtttctcctgagtttaggcaggtttttttttcctcatgtatcaactatccctttcatttttcaaatctcatctccatggtggaatttttcctaagttgggtagcaatttcccttcaatttaattgatgttcttttcctttcatatacaaaaagtacttccatatacagaagaaaattttatcttgataatctctgttttatgctttcttatcaattagtatgggtatcattagagtatgacaatatactgagtctacttgcatacacagcattattgacaagaagtaaaaacaagtacataatgtattagaatcagaagtttaggaaaaaccatggacaccacctagtatatcgccctccttttacagatgaacagagtagaccatttcttcaaagagaactggaggaatttttttgacttcatagtaggttgctaattgaatttttatagcatgcttcaatttatttttattgttcatcatagcatttgttaatctcattagagcatatgatttgcagtgctgcaccttaaatactaggccttttatgccttttgtgttcattataaatgtatgttaattataactgtatataattaacatgttacttcattaggtggttatatacagatctgtatttcctaacctgcaaacttccagaaggtttcagatatattttggaatttatttggactttagagagggtatataatttatgtactgtgtaataagaaaaaactttaacttgatctgggttagtatccctgatcaaatacatgtaaaatatatgaatgtttaagttgtatcaaaaaaaagaccataagtcagtgtagatcagattttgctatccactgtatgatttatgaaagaactcttagttttcagatctttttggatacagaaattgcagataagggattgtggacctgtagttgatgtttaagaaaaataagactaagttccatttttcagtaaaagttgtcaaatgatttgagtcagaacagcagatatgtttgaatgtgcgaagttcaattaagtagctttttattttatagtaaaatatctggaaatatatttgtatgcaatttctttaccaggtggatggatgatggcctagtaaatgatatcacgccaaaattgataggagacagacctaatacatacatatacacaaaagcattggcagaatatgttgtacaacaagaaggagcaaaactaaatgtggcaattgtaaggccatcgattgttggtgccagttggaaagaaccttttccagtaagttgttagaaacctttataaataactggagttgagaattttaagttgtaactctgtataaaaagagctggcagttctttaagaacaggtattatttactaaaggtgaattaccatggcaaagctgttttgtgttcatagagttaattttattggtactttcatttctataatgtgacgctgggtatatagaaatgtagatcaacatttaaaaaatcctaagtgaaaattaaaagctgtgacattttcttaagtcagaggagatttggtttgtttcttagtagcaaaaagaggcagaccttccaggaggtagaccccttcctctgtagatcacaaagtaaaaaaggtacagggtgttagggtatttgtgaattcctggaatgagagaaagcagaaatataaaccagttgggtcaattgatttaggcaaaacctaggtctgtgtaatggtagtaagtgatagcatctgttgttgctttgacaattattctatttttctctgttttattcataattttgaggaggatttaccattttccctaatctcaggctattgaattagtaaatagcataaaatcaaacttgaacaagcttaattttgtaaaaatattcaacaatataaaccctcttttataaatttctctttgcagagagttaatggaagagtagtaggtagccctttgaaaatgattttactcaattatttttgatcccagaggaagactgcttctgtttgggactggtagaaatagtctggcctgaatctagtctgttttttagtttttagaagacagctaccaagtatatatttggggttgtagagttcaaataataaatctctagcttcataatgtttctaagcttctctcccttttaaaatttttggtattagggatggattgataactttaatggaccaagtggtctctttattgcggtaagtaaaccttttgatttatttaatattctatacatttttctgctttttgtatatctttaaatatatatacactatggcttatatatcttaaggtgttgtttttaatttcaacaaaggcagggaaaggaattcttcgaacaatacgtgcctccaacaatgcccttgcagatcttgttcctgtagatgtagttgtcaacatgagtcttgcggcagcctggtattccggagttaataggtatatgaggtgacaatgtcgcttattaaatatatagtaactgaaaagggaagacatagcttttgagtaatgttaattaatccctctatccagatattgccataccaatatttaggctgtatcactgccaactccaagagttggtattatcacagacaatagcaagtgctcccatcagtagtaatgaagaattaatgttaatgctcatgtattacttacaggatagacaagttcacttaaaaatgaaaaaaaaaaaaataccctcccctaagcatgattttttaatccaaactaaaacttgttgaatatataaagagctgaaattcacagaatatggtttacatatattaaacatggtacaccagagcagctttaatcagcccatgaacatctttcctttaaaaaataatagtagcatttacaggtaacacttaaactttaaacttcccaataactttttttttctaggtagtaaactacccttatttttgataatcagtattttctgtcctaaaaaaagagagataggattatatgaatatgttgtttctggcaaaaggaaacttagtccataattttttttcagctagatcctctgaaaatgagacaagaagagctgaggtcatttgttgttttcctcgtgtttaaaaatagacattcctgctaatataaggaggaaaaatgtgaaagaaaaaagtctgtattttttaaaataagttattatttttggtaggggaagaagaaagggtagttgtaaatagtcattaaagtaaaaactaatcctttaaggataattaaaaaaaaatagtatagaaaaggtgcccatcatcctcatgtcttcttgaatactatgtaggacttagattggatatgtttggcctcttattatgattaattggtttcatctttgtctttgcagaccaagaaacatcatggtgtataattgtacaacaggcagcactaatcctttccactggggtgaagttggtatgattttacctgtgtttttgaatgttagaataaatcttaaagaaccaagttccctgaagttttaatgttagaatacctatgaggcattaaggccactgagttaccaatttgttcttaattgtcgtcttagaagtattatctaccaatactaccttgtggtccttaataatgtttcacaaatttaaaaatatactgctgtctattcttacccacccaccctacccttgtctaagccttgctgtttttctcctgccatctgcagtagccctcgtagatacctatggcatgggaacagtgctttttttctcccttgtgagcaccctcagtcttgatgttgcctatccataggcagtatcacttcttacaagaggtggtatatcaagtggtacccagagtaataaatgaaggagttaggaagtaggatacagtttgccagaatattttctattaacctgtattaatctatttaaattcacagattcacagcagatatacatgttcctagttctataggaatagcataacttaaataggaatagttaaaacccattgaaattgagtcaattttaaattgttggttgatgagttcaaatttaaagtaaaatttttttggcattgatttagtgataggtcttatttaacctctaattgattaattacccctgcagaacaattttgatttcaatgtagattttttatgacatttgtcctaggatttttctgtggcatttttatttcagtgtaaaattgaccattagagcatataagaaaaagataaaatctaaggtgattttaactttatgataattattttcagtattcttttaagaatatttaaacatttttaatgagttaggtttttttgtaatcttttattgtgttataaagtttagtaaaagctgaaattgagcgttatattttagtgactatctcaatatacatttctagtaaagtattaatatagatgatactaggtttgattatgttgacattacatagcctatataaattacaacagaagttaattttgggttgttttaagcctgttaatgtatgttaatttgagcatcttaagcaaaggatgattattttccttttcttttttaagtaagtacagtaataagagtctggaaagaggaacagaaaggaagaagctatcgtgagaggtgaaatatagaaagtgacactgtaaactgacataggtaaaacattaaaaggattttaagagtgaattttagcaaaaattcattcatctaaaattcataaatagcggcagttacaaaaccacttgagtttagcagtctaataaccatattctcttagctactagagagtagaaaagtttgttttttaaatgtacgaactctgacatctttggtaaaatattttgcattataaaaacatgatttttttttttcaaaacttcattacatggttattatcaaagctgttacacaacttttcttcttcagagtaccatgtaatttccactttcaagaggaatcctctcgaacaggccttcagacggcccaatgtaaatctaacctccaatcatcttttatatcattactggattgctgtaagccataaggccccagcattcctgtatgatatctacctcaggatgactggaagaagcccaaggtaatggtgactagctctgtcttatctgttcctctgttaaacaacccatgcttacactaaaatgcatattaactctgtatttgtttatgcttatgataaggcttaatagccttttgtgaatgagaagcctcttgaatttaagactttgtcagaaaagcaaaggtagtgttgtaagtcactctaatttgtttaaagtttggataagttattgtcatgtattgaattctaagtcttactttaggcttctttctgaataacaatatttaaattgctttgacgcttatttttcctacaggatattatgtaagtcattccttcaagatgaatcctttaaaccaagtattcaggtgccccagttttaagtttaattccaacagcctatcgcatcattatcggaagggtgtcagccatagagtatctgcattattgctcgattgcactcatgttgacaggtcagaaaccgcggtaagaagaatagcagtaaatacactatgtattggtaaggtggtggcagcttgctggagagatgaaaaaaatcactagcatgagctttacctttagatttactcacctgattaatcacaatcagaatgctaggacatttcttagaatttggagatctttggggacactaactatggatcacatcgtattgggtcgttcatcctccaaaattccataatataggaaatgtcctacatcatggttgtcattgttattataagctgaaattaagcccttctctccctcttaaaaacctagggatgagtttgtataggggattaagggcaaaagttttgcttcaaatggatggtgcagttttatgtgaaaaatataggatgcttctagaaaattacttgaaatatctcagctgcccattcagcttataatatggttatttcagtttttgactaattatccaggttgggaatggcatagttatgaaaaaaaagttaataataaacagaaaactttgttttcttatcgttgttatagcttttctttcttttttttgttgaaatcccgcaaacttaaagatctcctactgtctttaccacacaattacagtggaatatactattaaaatacttaattttttttaactacattggcattacagtggagtcgttgattggagagttcaggatttgagtatttttgtataaagaagatgctgatcccagaacttccatcaactactcaaaaaataaaagtgaggtaactgccagttacagtgtatcaggatctgagttcctcgtaggtattgtctgtggattcacttttccatgatgtttctaaccctatatgttagctaattgaaatatgtgagaggtgttgaacaactttagagcaggtaaagaaatattttcagacttttctagaatgatctgcaaaatgcaatacttgccattggaagcattcttcatggctaaaatgcagatgtaaattcatgaatggtggcagtgcatgctttctttatattaataaggttgttataatttaggacagaaaagtaaaaactgggtcaaaaaaaaaacaggttaaatacatcacattgccttacacgaagaaagagggcttagtaaaattttaaaaaaataagtgaatagctggtttactaaatgcttcagaggagatgttgctgcataacaaatcatctcaaacttagaagctaaaaacagcaacagttattttattatttctttcaattatttctgtcaggatcaagaatttgagaaagaatccactgggcagttttggcttggagtctttcatgtgtttgtgatcagatgaaagaggccggtgggcagagaggcaatggaacagcaaggggactgatgttactctttgtcgtgtcataaggatctctccatatagctctttgcaaggattaatgatagccttaggggaattagacttcttatatagcagctgatggcttcaagggggaagtcttttagcaagtaaggtggaggctgcgttgccttttctgagctacccatagaagtcatgcagcatcacttttgcctcattcttctagttacaagtgagtcacaaatcttcttaaattttttttcatatgttcataattttattttggtgcctgacatagcacattttttaaaaatacttcaagttctagggtacgtgtgcacaacgtgcagatttgttacatatgtatacttgtgccatgttggtgtgctgcacccattaacttgtcatttacattaggtatttctcctaatggtatccctcccccctccccccaccccacgacaggcccccagtgtgtgatattccccaccctgtgtccaagtaaggggatttagaaagtggtcaagatgaagggtattgttgccatcatttttggaaagtacaatctgctatagtcaaccttctggccaaaacaattcatatttcttctacatggaaaggacagttgcttcttccccactcatcctgccttccccctcgcgcctccccatccccaccaccgccccagatccctgtggcatcagctggaagccagggttttgtcatctaaatctggtcaattggcggatgacgctctttaggagtgattttgtcagcatagctcctcaagtatagttcctcaataattgatatgtgaactaaagcaacgagttactgactgcccatacgcccatcataaatgatggtaagcataggataatggctttagacagttttattcaaaaagagagaaattgggaggcacccagcaaacactggtctataacatttctgaattccagtcagatatgtgttgatgatttcttgataaggagctcagtcttattctctgggagttctctgaggttcttgcctctgccctctgagtcatccttccttttgcataaaaactggcctgtgggctctgtgtgcagccaagtagccttcttatcctgcttcgtgcccatgaaaggttaggggatcagggcaggaactggaaagcttttcttgtaaattaaggccatatagtaaatattttaggtttagcaggacatgcggtttttgttgaagctactcatctttgctgttaaaaatgaaagcagccatagacaataggcaaatgaatgaatatgactgtgtcccagtaaaactttatttacaaaaacaggtggtgggctggatttggtatataggctctggtttgctgacccttgatatagcagtctcttcattttttttttcttgtctatccctttacatgtaatctgacatgattgcttaaaaattgtgtgagtttccggtgtatctgttttcaaggaatccagcctattagacgaaagccatacccataagtttctttgacacaaacccttctctatcttgggtcccctgtgaggttcctatgggacagcacttttagatcttaaatccttgcctcttagatcctgccttttgaacaataagagtttctgttacacatttctttaagatctggagagtgccttttgtctgtctgaaagttctggaaggcactgcctaggtctttctaaagtcttagcaaaggattcatcttcccctaccctgctatgctcagaaactgtttcttaaagaattcctggctgacattttacatttcctccaaattccactcaaatagttcatttttttaagatcatctttgtcctcttttgccctctttcagcaaatttctgctagatcattgagtttattagtacactttctatattccatataaccagaggtgacagtttgttgtcctcacttcaagccctcaccaacagctttcttaaaaccctttaaggcttccattaataatgttttcctggtcctttcacatttcactactgatcacctcacaggccttagagattttgtttaccacttgaccctgaagccaataccacatgttttaggtttttattatagcagcccctcccagtgttgagatctgtgttgagatttgttaatctgttttacataacaagtcacctcaaacttagtgtcttaaagcaatcattttatttgtgtgtcacaatatctgtgggtcaggaattctagaagggttagcttgatggtaatggctcaggatctttcaaatgattgtagtcagacagggactggaggaactttgctgtggagggagtggtaaaggggggaaggggacagagtagctggggtggctgggcatctctctctctccagtagtgtcataccctctccatgtggcctctccatatggactagtttgagcttcctcgcagtatggcagcctcagggggagttggacagcatacacagtgactgaaggcttcaagggtgagtattcagtgagcaagacagaaagctctacacctttctgacctagcctcggaagtcacatcatgtcacttccacctcattctgttggttctaagttattttcaactctcattgagaagacagtcaaggtgacattgtattgtaggtgggcatgtaggatggagataatatcataggcacctttggaaattaatatctttcctaaataggaaacgttaaggaaacagtcttcttaactgaggtttgtgctgtgtgaggctttctaagtatcaaagcaggacagatccttgacctccgggagcttataatctgaatgcaacaaggaatataaaggtttttttacttagacaattttgtaaatgttaaatacaaagtcttataatttataatatttcatttgttcagaaatttattgagcacagtaatagactttacaccttatattggggccttactatgatgcctaattctacattaaactgatgtcagtcatgtcattcatttcatccagtttacttgtttacataataattctgaatgtgagctagataagcatctgacctgacattttttaaaaaatggctccatgatcttatgttttggttaactagcataactttatctagcttaacttctctaaaccaggtatctatttttaatctgtgtacttctcagctggagacatttgacaacatttgcaggtatttttagttatcacaacagggggagggctgctaccagcacctagaggccagggatggtgacaagcatcttatagcatgcaagatagccctccacacgaaagaatgatcagacccacaatatttatagtgccaaggttgagaaaccctggactagataatcattaagatcttgccttactctaaaggattgtgattatttttttaagttgccataataaagaataaatacatattcagaacatacctggcaatgtagtcataaacatctgttctaaggtatgtttaaccaaggagtgatggtgcaaagttttacatttcttattccccaatagttttcaatccagtatttttgttgcatgataaatattctataaatttcacacacaaatatatggcctttcaaatttcttccccctccccgattttttattgcaattattttttgaatggctgaattactgattgatgttagggtgattgtgtcacttgaatgaatctgaagataagattaggtgagagaattatcagtgaacaagagttaagaaaaactttttaataaggtatatataggaaaaccgtgttagctgtgtgtgtgtgtgagatttaagtatgctaaactggcgtgatagtatatattgatgtagtgacaaacttgttgtatctttttgtttagaaaaaaataatcacctaatcttttctaagagcagcatgtgtttttcccccagatgctttttatctacagaactatccctgtccagaaattgccttagatgcttgataattcgttttgtgtttgagattttattttgaagttactttattggatgaaatatagtttttttttacatagtttatattgcttcattttcttccagtattctggattcagagtttatttctaaatgtattgaattgtgttatcagaagtgcttagctaatgatacttttttgatttttttctccttatttctaatgtaatttccctccatgcccctcccatttctaaaacccctaattttgagactgtctaaactacatgatacatataatcctaatcgttattataatataaatgaaatctttaaaaagtacttctccaaaaattctttttctgttcacagaagtggggatttttttggtgtttgttttgtttcagaaagttctttcttccctttccctacttataataaatattattgtatagatgttactgctcaagttagtgttatgatatcaatgacttacagtgagccatgatatataaaatgacagatttaaagattaaagctccttgtacttttaaaaacaaagaatcacagtctttctttaaagacacactttaaaaagagtgtcacactcctttatttctgtaaggatgagtattggtggggtatggagaggtgagtggatatctatttcagatagttttcagcatgagtcattgatttcacagcacatccagatgatcaagagtggtgccaatcattgttaaagaaaagttgttttgtttttttaaatgaatagagttgactatgtggcaaacgaatatttctgtattgtttgcttcagcagtgctgaagagttggaattataaatataacacagtatgttattaattcacaggaaatcttagcaaatgcagctgtgaattaaaatgtagtttaaggaatagaaagcaaggaaatattaattgaatccattcatttgcttagtattttatgtagaaaatttaagagtattgtataccctttgagaattaattctgtatatcagcagaactctgtttaggtggtattaaatgcatttgctgctgctttcaaaaaaaatttgttttccttttggatttataaattgttcatccaagatgcagaaatagtcttattccctgctgatttggtacacttaatgattaaatgttataattttaatactaatgtctatattatagggggaaacttgcaccctgggtggtgataggatttttcctaatctatacaaaatatgaatctgtccatttttcttacaatacaggatgatgaaaacaataactcgtcttcacaaagctatggtgtttcttgaatatttcacaagtaattcttgggtttggaatactgagaatgtcaatatgttaatgaatcaactaaaccctgaagataaaaaggcaagcaagtattttctgttttatattagaaaataagtagcatactaattacagaactattagcaacctgagaaatattttccacagctattatgcaacaagtaagccattatttatagtctctcataaagctttagtcataattgttagtggtgaaataaaattgctgtatcttaacatttctagtgtaagtattttagagtggcaaaggtattttcaaagcatgattgaaatgttgattctttttttcccttaatgttggtttcagagagaattttatctttatgtgtttttctttcaaacactttgttttctcttgagttttgagaaaaagcttctctaagaaattgttttttataaactcttttactttttgttattccacattttgccctttgttactttggaacttaaattctttgtgtatgttctttttgagcttactctagatgttttaacatgtatatctaacacagactaagttaagcaatatttatagcctccttcttaataataataatatttagaaccttaaaatgttttagttgtgattaccactcccactcacttaaaatggttgtattaatacattacttcagttctctaattttttttttctttttctttttttttgagatagagtttcgttctgtgcccaggctggagtgcaatggcacaatcttggctcactgcaacctctgcctcccgggttcaagcgattctcctgcctcagcctcccaagtagctgggattacaggcacataccaccacacccagctaatttttgtatttttagtagagacggggtttcaccatgttagccaagctgctggtctggaactcctgacctcaggtgatctgcccacctcagcctccccaagtgctgggattacaggcgtgagccatcacacccggcacagttctctatttaaaccccatgttgagatactcttttgttcatttagtttttatttagatttctccctctctctctctctctatatatatatatatatataaaatatgtatatatgtataccaatatctgtgctttcagattttctccttatgatcttctttctgcctgaaatatattcagcatacctagaatatgttttacttgggaatctgttttgtagtgaattctgagtttttgattgtctgatatgtgtgttgtttcacccttggttttggaacatgatttcagcacgttaaagaacttttttgctggtcatagtagctcatgcctgtatcccaatactttggaggctgaggtggaagaatggctcgaggccaggagttcaagaccagcctgggcaatgtagcgagacccatctccacaaaaataagaaaaaatcagacaggcatggtgacatgtgcctgtagtcctagctactcaggaggctgaggtgggaggatcagttgagcccgggaggtcaaggctgcagtgagatgtgatcacgtcattgcactccagcttgaacaatagagtgagagtctctcaaaaaaaaaaaaaaaaaaaaccccaaaaaaaaacttttttatttatattctgtcttacatttttgctgttgaaaagtcggtagttggctcttcctttataggtgatatgttattcctggctcgtcttccattttctctttatgtttgccgcttggcagtatcactatgatagtgggtgtaattttgaaaaatttacctagattgcattgggctttctgaatctgaggtttggtgtctttaagcaattcagagaaatacttagccagtgtttcttcaaatattgcctcttcactattcttatatcgtcttccaaaattcctagtgtatgttagattattctgttctccaaatcttttaacgttaatttcatattttgtatctcagtgtttctgggctaaactctagataatttaagattctgtgacagtctgccagctgtgtctaaactatccaattgaatttagagttttattgttttattttcagttttagaaagtataatttttcagatcttataaatgtttcttaaacagtctctagaattttttcttgaaacatattaaatataattgtttttcattctgcttctgataatttaaacttgcagatgatttgcagcatctgattctgccatctattacttgagctaggtctcacccatggcacctaatttttttaaaaaatatttgtttgactataaatttatattctttgaggatttctgtgagaatttttttgaagccgggattgaaattgcagttttctgataaggatttgcctttgcttctaccagtagcctagttaattagctagctggcatttataagccagggcccctttaaaatatctgattaggtttttagcacaactcagattaatgtaggccttaaatagacagtaggggccgggcgtggtggctcacacctgtaatcccagcactttgggaggccagtgctgggataacttgagctcaggagttcgagaccagcctgggcaacaaagtgagaccctctctctacagaaaaaaaaaagaaaaattagccaggcgtggtggcgcatgcctgtagtcccaactacttgggaggctgaggtgggaggatggattgagcctaggaggcagaggttgcagggagccgagattgtgtcactgcactccagcctgggtgacagaacgagactccgcctcaaaaaaaaaaaaaaaaaaaagactgtagatttgggtcattacagtttctcaagagtttcttttttcatccagtgccagcttcctttctcttcccacttactttttttattttcataatgttttatttaacctaacatataatcaaaaatattgtttgaacatatcaaaaacctaaaaattatttaaaggatattactttctgttttttcatactgagccttcaaaacccagagtgcattttatactccactgcatgtctcagtttggactagccatattaaaagtgcccaagaggcacaggtgggtacagaaacagaagcctgtactgcctgcagaaccatgagccagttaaacctttttatctttacaaattacccattctcaggtagttctttgtagggttgcgagaatggactaatgcacctaatcactacctcctctgtcttcccagagggaacaactcttgaattctagcactcaatattagttttacctatttttgactttatataaatggtattatacagtattttttcattcttctgttgatagacatttgagttatttccagtttctggctattaggaataattatcctatgaacattctttatgtctatatgtacacatttgtgtagggtatatacctagaaataggatagcatagggcattcatatgttcagtttagcaggtaatggcagttttccaaagtggttgtatcagtttacattccagagggcagtgtatgagagttcctgttaatccacatcctccataacacttggccttttaattttgattttcaattttagccacttaggtgatatatagtggtataacaaaatgattttagtatacattacctagtacataaaatgtttatttaaaaatagtaaaaaaaaaaaaaaagtaatcctattggaaaatagattagagagatgaacagtttacagaaaatgattcccaagtatttgaaaagatactcagctttactcagtggaaatgcagactaaagttagactgggatattatttactatttatcaaatttacaaaaatgcagacttggacaatgtactctagtgagttcctggacaaatcagcatccttacacattgctggtagaactatatggtgtatgtttctccattcttttattttcagtcattttgtatcttatcttttagatatgtcttttgtaagcagcatatagttagttgtaagcagcatatagctgttagtttttattttcagtctgacaatttttgacctttaattggagaacttaacccctatgtaattcctatcattttagatttagtctgactagtagtgctttgtatttgtcactctggttttaagttcttttttcttttttttttggccgccctttagattatgttttgaataatttaatattttcccatctatatgtgttacatagaattatgttcctttttggtttagtaggttactctagagattacaatgtcctttaatttagcaaggtctaatataaattgatacttttatccttctctgatagtgaaggatcagcatgtatctgttattgttgttattaggttggtgcaaaagtaattgtggttttggccataatgcatgttttaattctatatatatattaagccacacaagccagtatttttattgcagcttatgcaataaatattcatacagatttaccagcgtaactgtccttttattgctctttatttcttcctccatccccagacataaatctagaatcattctcctgcctaaagaatatccttaagtttactttctctaacatgggttttctgctgatgtcagattgtctcaggttttattctctggaaatatctttatttcacctttatttttcaaggatatttacactggcatagagttttatttaggacttattttcattgcgtacttagaaaacatctctgtcttttggctttcattgcttctgttgagaagtcaacttacagtctaatagttgttcttttggaggtaatctataggacctttttctgactctcatatgcctagatgtgtgtgggggcagggatgggggcagtgggagttgtatttgtgttttgaattggtgacttggtttcttatttttggaaaatttccaggcattgtcttctcagatactgcttctcttccttttttttttttttaaataactgttcttatgggattcccaataacatacacatataccttctcaaaatgtttcctaagtcttcattttaatgcagagttactgcatttttatattttactgaattttttatagtagctttcccttcctagaattggctatttttagataagtgatggtatatactgaataatatctttgtaactccaaaaaattatcttattatatgctaaggagcactgagcaatgcatagccctcttactttgccataacatttctgaaggctttcttttctggatttacctatccttctcatcaaataatctaattactgttatccaaactccttagccagctttcataacatatcttgatgtcagagatgttgttttcataacgcatcttgatgtcagaagtattctccaggaaaattagtctgttcagtaggcatgaactggaaatgtatcagtacgtgcataaagtagtgaggaatacatagatctatgtggacaatataattttgtctttttttttctttgtttagcaaaatggtacaggcttttttcttcttatatttaacctacttctctttaaatgctgacattagtttccagattatcttctcaaatgtttccatgtttaatggatggtatgaactaggaatacaaacttttcagtgactagcggtaagatttcagaagttaattctgtatttaagaattttgtaattatgtcacttggaactggcctttagaaaaagtgtgaatttctgactggttgtgagaaaaattagtcaagaaaataatcagtaatttttttgttaacgtagaccttcaatattgatgtacggcagttacattgggcagaatatatagagaactactgcttgggaactaagaagtacgtattgaatgaagaaatgtctggcctccctgcagccagaaaacatctgaacaagtgagtttgatgcatggatttgattgcttcttgtcttccttatgaaatattccacaatttttttggtaaactggtatatttgctatatctgtcattcaaagatgcagataatttttaatggtaatctcttatatttgtagtgctttttaatgtgatttttatgacactttttaagactttcacattattatccctctcatgcctcataactctgtgcgactttgcagggcagccagttctatagatgaggaaattgaggcttaggaaagttatatttgcctaagccatattgtattgagtggcaaagcaaactagaatattgatctttgactccatattcgaacctcttttctctacatcatttttcttacattgccgtcctatcttgcactgcctgctgaggtcagtataatttatgtaacattattacatctctaaaggtttgtatttctttcaaacaccatcagaaacatcaaaattttttgaaacatgagctgaaacatgagagtaacatattgttactctttgagaaaagggaggatcctcctttatcaagttaatgccatgttttatgcttggataagggcttatccacttggcctttgatcttgtgactgtcacctgtaactgaaagagtaagttacttgtctgacaacttgtaagcaactaaagatgtcaaaaaaaaagtttgctctattttgtctgtactgtgatgtatgtaatgaatgaacctttttagattagatgggaagctctagaaattcaaggtacatatctgttttacctacagtatacttaatgcctatcataagtttcaaattaatatggatttgagctttgattaaaaactcagtattaattagctgccatctaacaatatttttttctagaaaatactgtctaacatatctcttgatttgctttccaggttgcggaatatacgttatggttttaatactatccttgtgatcctcatctggcgcatttttattgcaagatcacaaatggcaagaaatatctggtactttgtggttagtctgtgttacaagtttttgtcatacttccgagcatccagcactatgagatactgaagaccaaggattcagcattagaacatctatacatatggtgatctaaatgtacaaaatgtaaaatgtataagtcatctcactttttgtcaagacattaaaccatcttagatcggagtgtgaagtaaattatggtatattttatgtaacattttaatgtttatgctcataaaacttagtgaacacactgtgttatgccagctcaaatctacagtagccaccaaaaccatgacttaatattttgagccctagaagaaaggggtgtgctgaggacaagagtggggaaataggaacactgaccagtataactgtgcaattctggaacatattaattaaaataatatgccttaacatatagtgaatttctaattctaatgttcagtgcaatggaagacatttatttggacagtaatactagcaaagttggtagatatttgattcttcattttttgtttttttcattagttgaagtgggttttagttttgtttaaaattataaccagcgtattttcacatcattctgtaagttaaatgatatcaaacatgaaagagatgttctcatttttctttttctgattaaacgtctgatgcatatcatttttctataagtaatcagttgcttttaaaatcagaaggctatattattctaatgaccctattcgatctaaatgggtttgagaatccatatcagcaacatacgtgttttttgacagaaagtgaaaacaaattccgtaaaactgttagtatcaaaaagaataggaatacagttttcttttccacattatgatcaaataaaaatcttgtgagattgtttatgttttgaagcaggaggatttcttgagatttgatggaagtgggagttgggaaggattcaccatacttgtgttctcctccctttataaattttattcataggacttttaaaaggcttgtgctatctttccagtgaaaactgaaagtgcattattatggaagaatgtatttgcaggtagtaatagcattaaaaaatatactcgtgtgtaaacacatactaattttgaccttgaaagatgaattccttcaagaaaaataaaataatgcttaagataatgtgtacgaaattaaataaaggactttatttacatactacataaggtagcaaactgttgaatgagtttgaaggtatcacttattttttatgcatgtgattttagctttagaaagaaatgcgttatagaaacaagtaatagcaagaaaattgatgtatattttaatgatacattaaaattcccttttaatcataatagttaactctacttactgttttaacatacatttgatttaacaaattgttcagcataacacttctaattaagtttatcaagttgtactgtattagataatcagcagtgtatctggagtatgtttaaagagaacagttcgcaatacaaaaagttacatggagctttacatcttaactttctttgtcaatttaaatgcaatgtataaaaagtttattttgctattgtgaaaaactaaatgtaaaggaaatcacctactttcatgcaggtgtataatcttgaaaaggaaaaatgcttccatgttgaagccagattttctgtagtaaaacttttaaatattattttaaaagaaatatgtatataaatatctctatattctttggaatgatactaaagtctctggtctaggaccataccttatataaaggtataagagaccatgacaatgtctgaaaatggaatagataatgatgccttttatttaaagtggcccacataatatacattgagtactccatctctccaaatgtatttccataatgtgttgaaaacatgctaacatttgtatgatttttatacttctgccgaatagacttagaatcagatgaattgtctgtgtgtcttgcaaaagagttggggacaacttgggcaggcctatgaagtgcatagggagtgtatgtcttctgaatggttttattgttcttgtaatctagcttaaagaaatgttaactgggagggtgctgaggccactcactgcattaattttgtgtgtttagagttctgttgtcaaaagaaaactaatgaataaattagtttgtcattctagaatttaaagttctaagattagtataaagagtatatagattgttaatccccaccagctagactttgaacttaagtcagacttaaagatttgagaaattatttgtgtcatttactagacgtgatttttagttctgtttgattatatttcctacacaaacttcttatttaacaggatagcctactaaattaaatgtttcttatttcacttaactcatttgattaaactgtattctaaaacatttggggtttttccccctattcagttttaatcttggaatatgcatttgtaaattgtgatgtcattgagactatatttatatttgacttggcaacattaacatgtcctaagacttagtgcagagaagcttggcagtacgttctttgacttaaggatggcataaaataatcatttttgaacctgtgtaataaagcttgaaagcagggaaaagaatttccttttcccccttttttgtgttgtctataggaattaacttgggattgttttgtgggtttttgtttgttttaaatgtaaattgagaatcttttataagaaataaaagcattattgggtgcctttgtttgtaaaccaaaaagtaataaatgaatccctatatttccattatagtatttattgtatttttatgttctgaaaattacccatggaacaatatgcttaggattacaggaagcagtccttacttacacttcttgtctgttttaggtgtacttgttaattcttatgtcctaattttatttaattctgagttccttacacagcattttagggaaagaatacaggcaggatgacactttgtgttaaagtgttatttttatgtattacctggaatgaggcaggtttttttctgttttctaaaaagagtaaccaagatacctccagggtgtcattgggttccagctgctctcctccacattgaatgatatcttgttaatttataggcacatttgtggtaatttatatgtctatagagtaagtataagagataattcattagtaataggaattaactgaccccttttggatgggggagagcatcaggctggggtcaggtaagtgtaaatggccttctgagcatgctcttctaggctgactcccagccctgacttgaaaccattagcgctaacttgctctgttttgagaaaaactttccaaacttttgcatgagaaactagaaaaaggaatgtatgccacgtaactggattacagaaatgagttaattgtctctgtgataaaaaaaaaaaatgaaatattttcttattgaattaatatttttgtcttgaagcattttctagtgatagaatgtatttgtcttttttcctggtggtaccctcttagcatatatctttgctatccttaagatcctaaacaaatcatctttgtcagttaagtatagttgcgcaaaaattgttaaatcctttgtctttattaaagaaaaatttgagtaacattaagtttgatgtgctcctttgcaagttgatgtctctaaaattcatttatttagaaaaacatgaagtggtaagtataagtttaatgtctttaccgtgggcctgaactcagagaaataaggatataattgttttttggcctgagatcacagatgatagctatgatacctgtaattttatacaagggggaagggagacaatcaagatttttctgaattcatttgtttaaaacaaagttaacattcctagttattgtcttcaaaatacttttctcctctagacatttaattttcatttttaaagttccatgaagttgaattaggtgtcttccaaagatgctttggaggcagaattcctttattttctgctgttgtacagtaaattctttctctctcatataaatctagagagcttcctttcacttgttttgagcaaggtgtaactagaaagtgttaggttgagccgtataaaaatgctaatatgtctttgacctgtaagaaatttcatatggctcagtctagtattatagctgcctttttttcttttgtttctaacaaacacacctgaacctaaacagatgggtgtagttttattaaagtagtcatccagattgtttatcagtatttagttgtttgacatttaatacctaactttctgctttatgtcacatctttaacaggttcttgtcatttcccctaacttctgccaagttggttgttggtttcttgagagtgaaaccagcattgcacattttatgttataaaaacaacactaataacatttgttaagttcttacaatgtgccaagcactactataagcattttacatgtaataacccacttatgccctctgtgtttgtaagtgtgataactaaggtgtatgatgttaataaagtaccccaggttacactgctagtagcagagccgagacttgaactcagactagttccaaagcccactctccagtccattatactgtactgtctttcaccataggaatacagatatttctggactattcagaggttacctgacttgtactaaatgtctttgctgacttcatttcaaaaacccagcattcatccattcaacaaattttgagtgcctgttatgatttaggcactgtgtcttatattgcaattattgcaattatctatcacataccaaactaacctgctcagtggcccagtcctgaatatgacacactgccttcccttaggattttgtgatttgatatagataaataagcagataattttaatatgtaatgacaggtaagaacaaaatactaagggcacagagcgatttcttgcttatttcgagaaagctcatacaaactacttttgaattatggttttatgtcagattggtgggatgctcgggtagggaagcatccaggtttcaggaagagcatttgcaaaggctgggaggtataaggaaccgagaggaaatgttttggtgctaaaggagaggatggctaaagaaagatgaggctgtagagattgctgggccatctgagggccttcagacgctcagaatgcactataggctgtggaatggctattgcaaaaacactaagaaggttttcctagccaaagcacatctgttactggaaaaggggtcccaatccagaccccaagagagggttcttgaatctcgtacaagaaagaattcttggtgaatccataaagtgaaagcaagtttattaggaatgaagaatggctactccataggtagagcagccccaagggctgctgattgcccatttttatggttatttcttgattatatgctaaacaaagaatggattatccatgcctcccctttttagaccatataggttaacttcctgattttgccatggcattcgtaaactgtcatggccctggtgggattgtagcagtgaggatgaccagaggtcactcgcatcaccatcttcgttttggtaggttttagctgacttctttactgcaaccagttttatcagcaaggtctttatgtcctgtatcttgttctgacctcctatctcatcctgtgagttagaatgcctaatttgggaatgcagcccagcaggtctcagccttattttacccagtccctattcaagatggagttgctctggttcagatatctctgacatatccaatttctcttaaatatgagtagattttgtactttaaatgaacagacttttaaatatattttctaaatgaaaatttaagagaaaaaaaatactggtatagtgtcactcgttttttgagaatacagaccatatcagtgtttaaacaaccagtctctgtttttcagttttctatgattctcaaagtgcaatccccagaccagaggagtcagcatgggcatcacatgggaattcattggaaatgcaaatttcggaccccaccccagatctattgagtcagaaactggggtggagctcagcaatctattttaacaagtcctccaggtatttctgatgcacactaagattggagaaccactggtctaagagtcagtcttcatgccataccaacacgatctaagtggaatgcttttctggggttttgggacagggtcaagtaagcaccatttaaaaatcaacgtttaatgccaggcgaggtggctcaagcctgtaatcccatcactttgggaggccgaggtgggcggatcatgaggtcaggagtttgagaccagcctggccaacatgttgaaaccccatctctactaaaaatacaaaaataaccaggtatagcggcgcacacctgtaatcccagctacttaggaggctgaggcaggagaattgcttgaatccaggaggcagaggttgcagtgagctgagacagcacaactgcactttagcctgggtgacagagcgagactccatctcaaaaaaaaaaaaaaaaaaaaaaaaatacaaaacgtgtgtacatagaaaaaggtcaactggcaagaataaggccaaaatattaaagaagttagcgctatatggtggttatgagccccttgttcttttagttttctgcagtgaccctgaatgattttttaaccaaagcaaagtttttattttaaagtaatgtaaggatgagtatgcttggatctagaaaaataacaaaagtgtaaaaaatgtcttatctccaataaaaggtgagggttcattcattctgaatttttagcttgagacaatttttcttgtgagtcgggaacaacaatttactaggctgctatgtcccttgaaattgtccaggttttttttgttgtgtgtttggtggacttggtaaatacttccacccttaccagtttctaacttggtctttctctgatgaccttgccaacccccgaatatacatcctgtccatataataagtaatcactcctccagctagcttagttttcctttgtgattcccattataatgctatgttggcattctcatttataaatcaagtaactgagtttatagagaatcagctctcacagagactgctcaactcatagtagactgagaaggtatttctggcccttaaagctgagttctagagcctgtgctatgggaacgtctaactaccatagcatggtaccaacagttgaaagtattgctaattttcaaatgtcttattagaagaaatctgaaataatcaagattcttttgccttaacctctatgaaaacggcctaacctaccccattacattaaaaacaccaatttacatttttttcctctatttgatgtatgagcattcttacagggcagggcctattttttaaggtacctggcacacagaagttactcaatgaatatttcgtcttaactgtagaatgaagtttgtccttccttccatcagtcacaggattcttaagcttcctgcttatatataagattttgcaatcaacactttgccaagaagggtataaaagttaacaccactaactcttttgttgttggtcacctagagatgttaacgcaacatgtaatgcaaataccccatgttagaaactccacagttgacaaactttactgtcttttattcaataagcattgattagctgtttgtggtccattaatgtaaaatcatgctaagtgctcttttctaaattgttaacatcataatcaaagtactaacagatgcctttatacctccaggatttttctttgaagacatttttccaaagagatctagttgtctagattgaggggcaacttaatttctggtttatgggtaggtttgatgactccgctgagctcagtagtgctgaagtggttaggagggtgggctgtgcatgtgacacctgacagaacacagtagatggaacactgccctgcctatatcatctgccttctgcaatatgccagaatgcatcttatagacctgcattgatttttttatttttcccccatctggtacaagagacagtatgcagtgcactgtaagaactgcctaccttgctctgagattcaccagacttcaagccttagttccctcagtattcaatattgttctaactcataccgcattataaacacccttctgcctctcatgaattgtcagatatacttcacctgcaagtacattgtatatatccatactctgttagttttactagaccactagattctgggttatcacagagtaaatggatagttcttaagtaaatgtcagtacttgggtcctcgactactcagaaatcctccttggcactaggtagacagtagtatcaaaaacacacaaaaaccatcctgtaggaggaaaatggaagagcccgttagagcagaaaggaaatctttttttcacttagtggagaaaaatgcaaggggaaaatgttgacttttaggcattctaaaactccagttcacaggcttttttacaaagcctgagtatattgtataaacctagcttcatctctttgaaaaccacttatacttgtttgcctaccctggtctcatttgctattcttctttttgtcacatagttccttgactgatcctgtctgctcgtgccttccccatctcccatttgaaagctcccttgccagctgtaatgagcctcccaggatcagctggcattcttcttccaggggactgggctcctataaggtccacatacaagaagaatgacacttttggaaataaccaagcagttaaagattagtgttgaaagggattcttaaaaagcattgaatattgctaacttgctttacccttgaagagtcagtggtaaaattggagtcagtatatatatattatatataatgttaatatatatatcctattccttttatgtcacataactcagcaaaaaaaagtgctgtcagagaatattggtttgtggggggagaccttttctgaaacctaatagtttttaaaaagcagaaaaggtttgtcaaacattatgcttatttaattcttctttaattcagatgatttctctgagctcacactcttcacattattgctagggttcttgaagaatcagatcgtaagtttataaagccccaaactgaaaatgccatctcattggatgataccaatcactttgcaatccacaagctcagagttcattctagctaacccccaaaccaggatctggccaggtcaaaattactggctaactttttaaacatagagtttccctggactgacccctggagttagtttctttctttctttcttctttctttctttctttcctttctttcctttctttctttctttttcttttttttgaaacagagtctcactctatcgcccagactggagggcagtggcacgatctcagctcactgcaacctctgcctcctgggttcaagcaattctcctgcctccgcctcccaagtagctgagactgcaggctagcacccctgcacctagctaattgtattttttctagagatggggtttcaccactttgaccatgatggtctccaatgcctgacctcaagtgatccacccaccttggcctcccaaagtgctgggattacaggtgtgagccaccatgcccggcctgacccctagagtttgtgattagagaaaagcccagggatctgaattttaaaattctctcccagtgactctgatgatccagatttgattgtctctgccctaagccagtggtatgcagcaggatcatctgaagagctccatatacatagaggtgtctaggagccatgtatcccagacaactgggacgcagactagacatttataataatccttgtgggtgatttgacatacttagggtatttaagagccacccaaaccttttcaagaaatgttttgccactcttgggaaaaaaatttcagcattttttccaaataagacaaaagtagatgacaacagtatacacaatttcagttctttagcattttttcagcaaattccactgccattttagtataaacattctgctgtttttgtaaataaatataccttatctgcatctctaacatactattccatagtaactccagagcagaagtacctggtcacttctaaaatttaaaaaataatataataatataataccagcctgggaaatatagtgagactctgtctctacaaaaaaataaagaattagcctggcatggtggtatgtgcctgttgtcccagttactagaggtgggggtgggtagggctggggagctgaacacaggaaatcaaggcatgatcacaccactgcactctggcctgggcgacagagagaaaccctgtctaaaagaacaaaaaactgtgataacaaaactcttccataaggatagagaagcagaactgtattgtggaaagagagagactgactaggtataaattcactgccagttaccagctgtgtggtcatggataagtcatttagcctctcagcttcagtttccacatctgtaaaatacctacctgggaaggtggttgtaagcatttaaatggtacaatgaatagaaagtgtgtggtacatagtaagtattcagtaactcttccctcagaatcaccaaaaaaagtcccaaactataaaaggaattatattagaattatacaaatgcaacctaatttatattttccacttttacgctatggttttccaatttctaacattttatttctatcacattttcttttttaaaactatttttaaggattacggattctgaaattttgagaaaaaatagaaaacattagttcccttttctgtttgtggtgttaataataatatctctttccttgagcacctcccctactgtggcttttctgcagccagcagttcttggcctcacagatagagaagatccttccaatctttcccacccaacgacacaattcctacttacttctcccacaggcagaagaattcctcagtttgcagcttccaaattatccatcccatggttttttttttgttagccagacctcgagacaactcaccctctttcccacctccagtggtctgtaggcagccagttttcaagcaaacaagggtttgtcttcccttctggggttgagaaatttacagaatgtaacttgggccctatttgtttcccaagaacattttgggagtttccctccttttgcatgtatttaaaagagataaacctgaaacacaaaataatttgatttttctaattgtgtaacttggctcccaagaacatttcacattccactagccttatagtcctccaggctgaaaaattataggcacaggaggagcagtggcttataattcataaaaactttaagctgtccgggaaacaagctcccagctaactgaaacaggaaggaaatcatccacttagctgcgtatgcatctaaaatcttgaaattgatctaggttccttcctcaggacaaaaatctatgccagaataatttcacttacaactagaaattgcaaaacatgtgtttagaaattgttaaatcacaggttcttagctctagttttgggtcttttttttctttgaaaaacagagtctcgctttgttgcccaggctagagtgcaatggcatgatcttggctcactgcaacctcggcctcccgggttcaagcaattctcgtgcctcagtctcctgagtagctgggactataggtgcctgccaccatgcccagctaatttttgtatttttagtagagatggggtttcgccatgttgcccaggctggtctttaactcctgacctgaagtgatccgcctgccttggcctcccaaagtgctgggattacaggcgtgagccaccatgcctggcatagttacgatttgggtcttgttgctccaggcattccatcagctttctcagccattctcattttcaaaggagtgtgtatgatgtttccacagtcagttgccagggttttttcctaggctaatttactctttttttccattacagttcaaatgaatacattcacaaaataaacttggttatcttttatcttttttccttggctagaacttcctagttatttcaactgaggtgagtttctaattctgattcaatccccaccctaacctccttcccctaaaaggagggttcctatgctcagtgttcccccttcacccctgcagaaccctcttctctcttttccacactgctctttgccacggcaagctgacctttgtggatgacacatttgggttcccttgccttctggcttccggtgaggttcagccaatgaggggtattggcaggagcagaggaccggagagaggactgaagggttattcctgtcactccctatgggctctggcttagcagtggttgccttcctctaccaaatgccagtgcttccataaggtggccctactcttaaggctacacatttctcagagtttcaataactgccacctccctttgccctgacattctcctcattgtgtttcaccatctcttgttgggtgccatgaccctactcacacgtttgtaaacagtcgtttccttaaactctgttacttttctgaggatgctgcttcctgctggactcgggtacagctcctcatatacatcttggtagtgctggttcaagacaccaaatatgacggaataaagcctgttgaccagtcttgacaaaaattgtcactgcctttttctgtttttcaaattggcgagtactttccctgtcaatacctgatgtaccatgaggacaccatcattacatgggaatcatgtatgctgtttcacgtgtcactgtatggaagagtgccgagaccacagatttggtcagtccaccaacatccagaaaccaaattctttgccttcacaaacttcttttctacccagtctgaaagtcatagcacttcagtagagtgcccttcatccattccctgagatccactctgctctggaagaggaagagactgctcaagttccccaaggtggaattatctttttttttttttgagaaggagtctcactctgtcgcccaggctggagtgcagtggcacgatctcggctcactgaaacctctgcctcccgggttcaagcgattctgctgcctcagcctcccaagtagctgggactacgggcacccgccaccacacatggctaatttttgtatttttagtagagacggggtttcaccatgttggtcagtctggtctcgaactactgacctcaaataatctgcctgcctcggcctcccaaagtgctgggattacaggcgtgagccaccgtgcccagccgggaatcattcttaaatcttctctctccttatactaaatagtgcataagtcaccacatgttttccaccctagtcccttaactttcttacatcttcaccactactactgtgattcagaaaaccaacacttctcttacatggagtataacatctttgtaactggtctttgtgcctctagcggggttcctttccaaagcatgctgttttcagcagccagaataatctttctgaatcacaaatctgatcatcccttttgtataccagccccaggatcaagtccatacttcataaacaatttctaagctcattatggtctggacaatagcttctcatgtctcacatttttcttact

SEQ ID NO: 962 - DNA, 4979 bp, Homo sapiens
cggtggaaaagcgagtgaagagagcgcgacggcggcggcggcggcggcgcagctattgctggacggccagtgggagagcgaggcctgagcctctgcgtctaggatcaaaatggtttcaatcccagaatactatgaaggcaagaacgtcctcctcacaggagctaccggttttctagggaaggtgcttctggaaaagttgctgaggtcttgtcctaaggtgaattcagtatatgttttggtgaggcagaaagctggacagacaccacaagagcgagtggaagaagtccttagtggcaagctttttgacagattgagagatgaaaatccagattttagagagaaaattatagcaatcaacagcgaactcacccaacctaaactggctctcagtgaagaagataaagaggtgatcatagattctaccaatattatattccactgtgcagctacagtaaggtttaatgaaaatttaagagatgctgttcagttaaatgtgattgcaacgcgacagcttattctccttgcacaacaaatgaagaatctggaagtgttcatgcatgtatcaacagcatatgcctactgtaatcgcaagcatattgatgaagtagtctatccaccacctgtggatcccaagaagctgattgattctttagagtggatggatgatggcctagtaaatgatatcacgccaaaattgataggagacagacctaatacatacatatacacaaaagcattggcagaatatgttgtacaacaagaaggagcaaaactaaatgtggcaattgtaaggccatcgattgttggtgccagttggaaagaaccttttccaggatggattgataactttaatggaccaagtggtctctttattgcggcagggaaaggaattcttcgaacaatacgtgcctccaacaatgcccttgcagatcttgttcctgtagatgtagttgtcaacatgagtcttgcggcagcctggtattccggagttaatagaccaagaaacatcatggtgtataattgtacaacaggcagcactaatcctttccactggggtgaagttgagtaccatgtaatttccactttcaagaggaatcctctcgaacaggccttcagacggcccaatgtaaatctaacctccaatcatcttttatatcattactggattgctgtaagccataaggccccagcattcctgtatgatatctacctcaggatgactggaagaagcccaaggatgatgaaaacaataactcgtcttcacaaagctatggtgtttcttgaatatttcacaagtaattcttgggtttggaatactgagaatgtcaatatgttaatgaatcaactaaaccctgaagataaaaagaccttcaatattgatgtacggcagttacattgggcagaatatatagagaactactgcttgggaactaagaagtacgtattgaatgaagaaatgtctggcctccctgcagccagaaaacatctgaacaagttgcggaatatacgttatggttttaatactatccttgtgatcctcatctggcgcatttttattgcaagatcacaaatggcaagaaatatctggtactttgtggttagtctgtgttacaagtttttgtcatacttccgagcatccagcactatgagatactgaagaccaaggattcagcattagaacatctatacatatggtgatctaaatgtacaaaatgtaaaatgtataagtcatctcactttttgtcaagacattaaaccatcttagatcggagtgtgaagtaaattatggtatattttatgtaacattttaatgtttatgctcataaaacttagtgaacacactgtgttatgccagctcaaatctacagtagccaccaaaaccatgacttaatattttgagccctagaagaaaggggtgtgctgaggacaagagtggggaaataggaacactgaccagtataactgtgcaattctggaacatattaattaaaataatatgccttaacatatagtgaatttctaattctaatgttcagtgcaatggaagacatttatttggacagtaatactagcaaagttggtagatatttgattcttcattttttgtttttttcattagttgaagtgggttttagttttgtttaaaattataaccagcgtattttcacatcattctgtaagttaaatgatatcaaacatgaaagagatgttctcatttttctttttctgattaaacgtctgatgcatatcatttttctataagtaatcagttgcttttaaaatcagaaggctatattattctaatgaccctattcgatctaaatgggtttgagaatccatatcagcaacatacgtgttttttgacagaaagtgaaaacaaattccgtaaaactgttagtatcaaaaagaataggaatacagttttcttttccacattatgatcaaataaaaatcttgtgagattgtttatgttttgaagcaggaggatttcttgagatttgatggaagtgggagttgggaaggattcaccatacttgtgttctcctccctttataaattttattcataggacttttaaaaggcttgtgctatctttccagtgaaaactgaaagtgcattattatggaagaatgtatttgcaggtagtaatagcattaaaaaatatactcgtgtgtaaacacatactaattttgaccttgaaagatgaattccttcaagaaaaataaaataatgcttaagataatgtgtacgaaattaaataaaggactttatttacatactacataaggtagcaaactgttgaatgagtttgaaggtatcacttattttttatgcatgtgattttagctttagaaagaaatgcgttatagaaacaagtaatagcaagaaaattgatgtatattttaatgatacattaaaattcccttttaatcataatagttaactctacttactgttttaacatacatttgatttaacaaattgttcagcataacacttctaattaagtttatcaagttgtactgtattagataatcagcagtgtatctggagtatgtttaaagagaacagttcgcaatacaaaaagttacatggagctttacatcttaactttctttgtcaatttaaatgcaatgtataaaaagtttattttgctattgtgaaaaactaaatgtaaaggaaatcacctactttcatgcaggtgtataatcttgaaaaggaaaaatgcttccatgttgaagccagattttctgtagtaaaacttttaaatattattttaaaagaaatatgtatataaatatctctatattctttggaatgatactaaagtctctggtctaggaccataccttatataaaggtataagagaccatgacaatgtctgaaaatggaatagataatgatgccttttatttaaagtggcccacataatatacattgagtactccatctctccaaatgtatttccataatgtgttgaaaacatgctaacatttgtatgatttttatacttctgccgaatagacttagaatcagatgaattgtctgtgtgtcttgcaaaagagttggggacaacttgggcaggcctatgaagtgcatagggagtgtatgtcttctgaatggttttattgttcttgtaatctagcttaaagaaatgttaactgggagggtgctgaggccactcactgcattaattttgtgtgtttagagttctgttgtcaaaagaaaactaatgaataaattagtttgtcattctagaatttaaagttctaagattagtataaagagtatatagattgttaatccccaccagctagactttgaacttaagtcagacttaaagatttgagaaattatttgtgtcatttactagacgtgatttttagttctgtttgattatatttcctacacaaacttcttatttaacaggatagcctactaaattaaatgtttcttatttcacttaactcatttgattaaactgtattctaaaacatttggggtttttccccctattcagttttaatcttggaatatgcatttgtaaattgtgatgtcattgagactatatttatatttgacttggcaacattaacaatttccttttcccccttttttgtgttgtctataggaattaacttgggattgttttgtgggtttttgtttgttttaaatgtaaattgagaatcttttataagaaataaaagcattattgggtgcctttgtttgtaaaccaaaaagtaataaatgaatccctatatttccattatagtatttattgtatttttatgttctgaaaattacccatggaacaatatgcttaggattacaggaagcagtccttacttacacttcttgtctgttttaggtgtacttgttaattcttatgtcctaattttatttaattctgagttccttacacagcattttagggaaagaatacaggcaggatgacactttgtgttaaagtgttatttttatgtattacctggaatgaggcaggtttttttctgttttctaaaaagagtaaccaagatacctccagggtgtcattgggttccagctgctctcctccacattgaatgatatcttgttaatttataggcacatttgtggtaatttatatgtctatagagtaagtataagagataattcattagtaataggaattaactgaccccttttggatgggggagagcatcaggctggggtcaggtaagtgtaaatggccttctgagcatgctcttctaggctgactcccagccctgacttgaaaccattagcgctaacttgctctgttttgagaaaaactttccaaacttttgcatgagaaactagaaaaaggaatgtatgccacgtaactggattacagaaatgagttaattaccctcttagcatatatctttgctatccttaagatcctaaacaaatcatctttgtcagttaagtatagttgcgcaaaaattgttaaatcctt

SEQ ID NO: 963 - protein, 509 aa, Homo sapiens
MVSIPEYYEGKNVLLTGATGFLGKVLLEKLLRSCPKVNSVYVLVRQKAGQTPQERVEEVLSGKLFDRLRDENPDFREKIIAINSELTQPKLALSEEDKEVIIDSTNIIFHCAATVRFNENLRDAVQLNVIATRQLILLAQQMKNLEVFMHVSTAYAYCNRKHIDEVVYPPPVDPKKLIDSLEWMDDGLVNDITPKLIGDRPNTYIYTKAEYVVQQEGAKLNVAIVRPSIVGASWKEPFPGWIDNFNGPSGLFIAAGKGILRTIRNNADLVPVDVVVNMSLAAAWYSGVNRPRNIMVYNCTTGSTNPFHWGEVEYHVISTFKRNPLEQAFRRPNVNLTSNHLLYHYWIAVSHKAPAFLYDIYLRMTGRSPRMMKTITRLHKAMVFLEYFTSNSWVWNTENVNMLMNQLNPEDKKTFNIDVRQLHWAEYIENYCLGTKKYVLNEEMSGLPAARKHLNKLRNIRYGFNTILVILIWRIFIARSQMARNIWYFVVSLCYKFLSYFRASSTMRY

SEQ ID NO: 964 - DNA, 1126 bp, Homo sapiens
cggtggaaaagcgagtgaagagagcgcgacggcggcggcggcggcggcgcagctattgctggacggccagtgggagagcgaggcctgagcctctgcgtctaggatcaaaatggtttcaatcccagaatactatgaaggcaagaacgtcctcctcacaggagctaccggttttctagggaaggtgcttctggaaaagttgctgaggtcttgtcctaaggtgaattcagtatatgttttggtgaggcagaaagctggacagacaccacaagagcgagtggaagaagtccttagtggcaagctttttgacagattgagagatgaaaatccagattttagagagaaaattatagcaatcaacagcgaactcacccaacctaaactggctctcagtgaagaagataaagaggtgatcatagattctaccaatattatattccactgtgcagctacagtaaggtttaatgaaaatttaagagatgctgttcagttaaatgtgattgcaacgcgacagcttattctccttgcacaacaaatgaagaatctggaagtgttcatgcatgtatcaacagcatatgcctactgtaatcgcaagcatattgatgaagtagtctatccaccacctgtggatcccaagaagctgattgattctttagagtggatggatgatggcctagtaaatgatatcacgccaaaattgataggagacagacctaatacatacatatacacaaaagcattggcagaatatgttgtacaacaagaaggagcaaaactaaatgtggcaattgtaaggccatcgattgttggtgccagttggaaagaaccttttccaggatggattgataactttaatggaccaagtggtctctttattgcggcagggaaaggaattcttcgaacaatacgtgcctccaacaatgcccttgcagatcttgttcctgtagatgtagttgtcaacatgagtcttgcggcagcctggtattccggagttaatagaccaagaaacatcatggtgtataattgtacaacaggcagcactaatcctttccactggggtgaagttggtatgattttacctgtgtttttgaatgttagaataaatcttaaagaaccaagttccctgaag

SEQ ID NO: 965 - protein, 333 aa, Homo sapiens
MVSIPEYYEGKNVLLTGATGFLGKVLLEKLLRSCPKVNSVYVLVRQKAGQTPQERVEEVLSGKLFDRLRDENPDFREKIIAINSELTQPKLALSEEDKEVIIDSTNIIFHCAATVRFNENLRDAVQLNVIATRQLILLAQQMKNLEVFMHVSTAYAYCNRKHIDEVVYPPPVDPKKLIDSLEWMDDGLVNDITPKLIGDRPNTYIYTKAEYVVQQEGAKLNVAIVRPSIVGASWKEPFPGWIDNFNGPSGLFIAAGKGILRTIRNNADLVPVDVVVNMSLAAAWYSGVNRPRNIMVYNCTTGSTNPFHWGEVGMILPVFLNVRINLKEPSSLK

SEQ ID NO: 966 - DNA, 5221 bp, Homo sapiens
cggtggaaaagcgagtgaagagagcgcgacggcggcggcggcggcggcgcagctattgctggacggccagtgggagagcgaggcctgagcctctgcgtctaggatcaaaatggtttcaatcccagaatactatgaaggcaagaacgtcctcctcacaggagctaccggttttctagggaaggtgcttctggaaaagttgctgaggtcttgtcctaaggtgaattcagtatatgttttggtgaggcagaaagctggacagacaccacaagagcgagtggaagaagtccttagtggcaagctttttgacagattgagagatgaaaatccagattttagagagaaaattatagcaatcaacagcgaactcacccaacctaaactggctctcagtgaagaagataaagaggtgatcatagattctaccaatattatattccactgtgcagctacagtaaggtttaatgaaaatttaagagatgctgttcagttaaatgtgattgcaacgcgacagcttattctccttgcacaacaaatgaagaatctggaagtgttcatgcatgtatcaacagcatatgcctactgtaatcgcaagcatattgatgaagtagtctatccaccacctgtggatcccaagaagctgattgattctttagagtggatggatgatggcctagtaaatgatatcacgccaaaattgataggagacagacctaatacatacatatacacaaaagcattggcagaatatgttgtacaacaagaaggagcaaaactaaatgtggcaattgtaaggccatcgattgttggtgccagttggaaagaaccttttccaggatggattgataactttaatggaccaagtggtctctttattgcggcagggaaaggaattcttcgaacaatacgtgcctccaacaatgcccttgcagatcttgttcctgtagatgtagttgtcaacatgagtcttgcggcagcctggtattccggagttaatagaccaagaaacatcatggtgtataattgtacaacaggcagcactaatcctttccactggggtgaagttgagtaccatgtaatttccactttcaagaggaatcctctcgaacaggccttcagacggcccaatgtaaatctaacctccaatcatcttttatatcattactggattgctgtaagccataaggccccagcattcctgtatgatatctacctcaggatgactggaagaagcccaaggatgatgaaaacaataactcgtcttcacaaagctatggtgtttcttgaatatttcacaagtaattcttgggtttggaatactgagaatgtcaatatgttaatgaatcaactaaaccctgaagataaaaagaccttcaatattgatgtacggcagttacattgggcagaatatatagagaactactgcttgggaactaagaagtacgtattgaatgaagaaatgtctggcctccctgcagccagaaaacatctgaacaagttgcggaatatacgttatggttttaatactatccttgtgatcctcatctggcgcatttttattgcaagatcacaaatggcaagaaatatctggtactttgtggttagtctgtgttacaagtttttgtcatacttccgagcatccagcactatgagatactgaagaccaaggattcagcattagaacatctatacatatggtgatctaaatgtacaaaatgtaaaatgtataagtcatctcactttttgtcaagacattaaaccatcttagatcggagtgtgaagtaaattatggtatattttatgtaacattttaatgtttatgctcataaaacttagtgaacacactgtgttatgccagctcaaatctacagtagccaccaaaaccatgacttaatattttgagccctagaagaaaggggtgtgctgaggacaagagtggggaaataggaacactgaccagtataactgtgcaattctggaacatattaattaaaataatatgccttaacatatagtgaatttctaattctaatgttcagtgcaatggaagacatttatttggacagtaatactagcaaagttggtagatatttgattcttcattttttgtttttttcattagttgaagtgggttttagttttgtttaaaattataaccagcgtattttcacatcattctgtaagttaaatgatatcaaacatgaaagagatgttctcatttttctttttctgattaaacgtctgatgcatatcatttttctataagtaatcagttgcttttaaaatcagaaggctatattattctaatgaccctattcgatctaaatgggtttgagaatccatatcagcaacatacgtgttttttgacagaaagtgaaaacaaattccgtaaaactgttagtatcaaaaagaataggaatacagttttcttttccacattatgatcaaataaaaatcttgtgagattgtttatgttttgaagcaggaggatttcttgagatttgatggaagtgggagttgggaaggattcaccatacttgtgttctcctccctttataaattttattcataggacttttaaaaggcttgtgctatctttccagtgaaaactgaaagtgcattattatggaagaatgtatttgcaggtagtaatagcattaaaaaatatactcgtgtgtaaacacatactaattttgaccttgaaagatgaattccttcaagaaaaataaaataatgcttaagataatgtgtacgaaattaaataaaggactttatttacatactacataaggtagcaaactgttgaatgagtttgaaggtatcacttattttttatgcatgtgattttagctttagaaagaaatgcgttatagaaacaagtaatagcaagaaaattgatgtatattttaatgatacattaaaattcccttttaatcataatagttaactctacttactgttttaacatacatttgatttaacaaattgttcagcataacacttctaattaagtttatcaagttgtactgtattagataatcagcagtgtatctggagtatgtttaaagagaacagttcgcaatacaaaaagttacatggagctttacatcttaactttctttgtcaatttaaatgcaatgtataaaaagtttattttgctattgtgaaaaactaaatgtaaaggaaatcacctactttcatgcaggtgtataatcttgaaaaggaaaaatgcttccatgttgaagccagattttctgtagtaaaacttttaaatattattttaaaagaaatatgtatataaatatctctatattctttggaatgatactaaagtctctggtctaggaccataccttatataaaggtataagagaccatgacaatgtctgaaaatggaatagataatgatgccttttatttaaagtggcccacataatatacattgagtactccatctctccaaatgtatttccataatgtgttgaaaacatgctaacatttgtatgatttttatacttctgccgaatagacttagaatcagatgaattgtctgtgtgtcttgcaaaagagttggggacaacttgggcaggcctatgaagtgcatagggagtgtatgtcttctgaatggttttattgttcttgtaatctagcttaaagaaatgttaactgggagggtgctgaggccactcactgcattaattttgtgtgtttagagttctgttgtcaaaagaaaactaatgaataaattagtttgtcattctagaatttaaagttctaagattagtataaagagtatatagattgttaatccccaccagctagactttgaacttaagtcagacttaaagatttgagaaattatttgtgtcatttactagacgtgatttttagttctgtttgattatatttcctacacaaacttcttatttaacaggatagcctactaaattaaatgtttcttatttcacttaactcatttgattaaactgtattctaaaacatttggggtttttccccctattcagttttaatcttggaatatgcatttgtaaattgtgatgtcattgagactatatttatatttgacttggcaacattaacatgtcctaagacttagtgcagagaagcttggcagtacgttctttgacttaaggatggcataaaataatcatttttgaacctgtgtaataaagcttgaaagcagggaaaagaatttccttttcccccttttttgtgttgtctataggaattaacttgggattgttttgtgggtttttgtttgttttaaatgtaaattgagaatcttttataagaaataaaagcattattgggtgcctttgtttgtaaaccaaaaagtaataaatgaatccctatatttccattatagtatttattgtatttttatgttctgaaaattacccatggaacaatatgcttaggattacaggaagcagtccttacttacacttcttgtctgttttaggtgtacttgttaattcttatgtcctaattttatttaattctgagttccttacacagcattttagggaaagaatacaggcaggatgacactttgtgttaaagtgttatttttatgtattacctggaatgaggcaggtttttttctgttttctaaaaagagtaaccaagatacctccagggtgtcattgggttccagctgctctcctccacattgaatgatatcttgttaatttataggcacatttgtggtaatttatatgtctatagagtaagtataagagataattcattagtaataggaattaactgaccccttttggatgggggagagcatcaggctggggtcaggtaagtgtaaatggccttctgagcatgctcttctaggctgactcccagccctgacttgaaaccattagcgctaacttgctctgttttgagaaaaactttccaaacttttgcatgagaaactagaaaaaggaatgtatgccacgtaactggattacagaaatgagttaattgtctctgtgataaaaaaaaaaaatgaaatattttcttattgaattaatatttttgtcttgaagcattttctagtgatagaatgtatttgtcttttttcctggtggtaccctcttagcatatatctttgctatccttaagatcctaaacaaatcatctttgtcagttaagtatagttgcgcaaaaattgttaaatcctttgtctttattaaagaaaaatttgagt

SEQ ID NO: 967 - protein, 509 aa, Homo sapiens; identical to SEQ ID NO: 963

SEQ ID NO: 968 - DNA, 31649 bp, Mus musculus
acagtgggtgaagttgcatcattgtatccaatgataaaggttaaatcctttaacctcctttgtaccaccagaggtactggaaaagaaaggatacagggagaagtggatctgtttagaaaggttcgttggagcaactcctgtttgtgtcgtctggaaattggcagttcagttcacaggttagcagcagtagcttgatccactcgcaaacacttcacggatgcaccaagagtccagtttggtagagttgggatagcaaacacgaataagcagtggtgacactacctagcagacacagccaggcctcggcttcatcatgcatgagtcagcaggaggaaacaggagagacatcaggaaaagctctcagctgtgcctctctcagcgaatcgagagaccagcaagcgttgcacagctagctctataagtaagcctcgaccagcttcatatgattttatctgtaaaaattcaggaaccggggctggtgagatggctcagtggtaagagcacccgactgctcttccgaaggtccgaagttcaaatcccagcaaccacatggtggctcacaaccacccgtaatgagatctgatgccctcttctggcgcatctgaaactacagcgtacttacaagtaataaataaataaataaataagtcaaaaaaaaaaaaatccaggaaccacaaatgagaaaaaacacacaatacttatctctctgatattacttaaccaactttgcctaatgtgattatttccagttctaccaattttcctataaatgacataacttcaattcttctttaaggctaaaaaagttcctttgtatatgccacattttatcattcctatactattggacactcaggttgtttccataatttaggcactgtgtatagagttacagtaatatacaggtttatctatatattgacttgaatactttaggtaaatacctaagaatggtcaagctgggtcatatatatgatcattttttttgttttgttttgttttaaataatattttttatcaattctttgggaatttcacattatacacccccatctcatttcctagtccttccatgcctgcctctccccactattgtgatatcccccaacaaaataaatattataattaaataaaacaagtccaatttgtgttgtgcataggctcactggagcatggtcaatctcccagtggccagtccccaaaagaaagctgagtggtccatccccagtccgtcccgtcgtcgtcgtcgtcgtcgtcgtcgtcgccccccccacccccccaggagccatccgttgtggagagctgcacttcagcatcacaaggtttaagggttctctttgatgacttccttttaggttgttccttttgttgaagggttgggggttatcacagaagtcttccaggcccctccctctcaactgtgccatctgcagtcatcgatgtcactcccaaagtagcttcctgactctttacagaccatgggtttccgaatgattcctggccacagcacagaaacaccccccccacacacacacacacacacacacacaccatactcccctgtcacagtaggatcacacatccagacatggctcttggaggctgcacagcctggacatcaccatagcctccattggcagtgcaggccactgataccaatatgcccctctgaggttgggggaagcagcatggtccatggacatcaacagggcttcaggctacagcacagtctaaggacatgggcatggcctttggtggtaacatgggtcacagagatcaatctgtccacaggccacatcagaaccactgactcacacatggcccttagtggcaccacagactacagtggtccttcagtgagatccaatccagaaagtgaactgttcttcttcttgggctcttgacagggaattcaggcccagtggcatgttgggggaggggtgggggttgagtctgtctggcaagctccaggcctggccagcttctgggctggtttcaccagagccaacttttttaaagaactaccattctgctgagtgtcgtggcacacccctttaatcccagcactctggaagcagaggcaggtgatctctgtgagctcgaggccagcctagtctacacatatagtgagttccaggagagccagagctacccagtgagagcctgtttccaaaataaacaaacaaacaaacaaataattttaaaattgctaccagcagcatataagggctctcttttgttcatatactttgaatggttcttaatatctattcatttgttcatttattttttgagacagatcctctctattaagtagctctacggtcctgtgacttgcttggtagatgaggctggtccctaactcacaaaggtcatctgcctcttccttccaagtgctggatctaaaggtgtgcaccaccatactctgttgcaggaaatattgaaaaagaaaggcaagttcctgcgctattcccagctactctctgccctggagggttggccagccatacactgttcttatcttgtggagactctgactcagagctccaaaatctctccacccagctcactaaattcccactggcaggtcgctaccacgccagccccatgcttcaaaactcccacggccttttgtggtgcacatctggcaaacccatgctttgccactgtaccattctctctgaaaccctattgaaccacaactaaaccctattgaaggaaaacaccacacaaacttagttcagaatcaatggtaacccaaatcgctgggtgcaacaactagaatcctaatcttgtaaaccatattaaatctaaatcctccggtggcgaatcctggtggatccagcattgaaactcatagctacatcttgttctctagctatccccttccaaaagcccctctctctcctgcttcctctcttccaccgtccaacccggaagtcccgcctacttgctcggtgattggtccctttattcattagggggaggggagaggttcacaagaagtcacctgaatacacgactcatacctcgttccagacaacctctcacaggaaagtagaaataacatcaaaaaagaggcagcaccagagccatccacaataatacccagccatgttgttatttattgtcttaacaactggtatcccaattggggtgacaggaaatctcaatgtgacttgaatttgcatttctgattagagtaagattgactatctatttcttgtgtttatcatttgtgcttcacctctgaggtatttgttcatcttattagctcatttattatcttactacgtttgacgtctttgtgtgttctaaatgttaatcctgtcaaaagcatagctagcaaagacttcctcccatcctgcaagctgtcccttcatttcattgtttttttcctatgcagaagctttttaattttgtgagagcccgttgtcaagcgttgctactatcctcggaaaaacggagcccttgcctgcgcctgcgccttaaggtggttttcttactttttttaaaggcaatgttgggggtcagcttttcagacttgctcaagctagatacacattctagcactgagcttcgatctccacagactatcttcatttaacaggattcagcaatacacactgaaggctcagggaggccagagaagttataaaaggcctcaaagcttagaagtagctaaactcaaatacaaacttagatctaccataatcaaccataattttggagaactccagcatacaggtcttataactcttttctattctcactctagtctatgaaaattaccccccactttagggttcccagctgtgatggttaataggtgaacacaaatacccaccttctttgcttcttggctgtgagtacccagtgtccagcagcctcaagtttccagccacagtggactgcaccctccaactgtgagccaaaagaaatccttccttccttaagttgcttttgccgggtagtttgttgcaggaaccagaaaagttaactcacgcaccagcttagacctccacacatctgcccccacttatttcatatgtgcacccggatgtctgacattccaaactccaaatgtgaaaatagttctagaagtataacataaactccattttgacagattttttttttcacacgagaaagagaatcatgtctcctgccccctgatggaaatttaaaacactgttgtatgtggatccagggttatactcattggttgagatgcctgtggaggccagtagagggcactggattccctgaaacttaacttacaggctgttgggtactaggaactgaacaaacctaagcaagacctctgtaagagcagcaagtaccttagccatctcttcaggccctagaaattacctttaccctaaaagtctggcctcgcttactaatggctttaaaggaatactgctttgctggattggttaccctacaacatttttgttgatcaattttttagctcctggctaaagacatcatcagccaaaacctgtatttactgttagggctgtgggaagcaaaagggagccacaggacctgtctggggataccagctaagtctgtctgactttcttcctttatcatttgtgtgcatatgtatatatgcatgtggactttatagacaccgcaggagccagttctctttccaccatgtaagtcctaaggagcaaacttaagctgtcccttcacgtgctgaaacagggtttctctgtgtagccctggctgtcctgtcttgccagttacatttcactgggcaccgagtttgtgtgacacgtgccatgtatatgcatatgcacggtctagttcttgtctctcaggggtgaaggtttgatagaaagggacaatctgtaaacaagtgaggttaagaatgtgagtggtaagatgggagtctgcctcgagtttggctgaggatccaaggaagtcaaatgccaactattccaccataaaatggaaaaccaccaaaagcagaaattctcagtaacgggggaatgggtggagacgacgtcttttgcaattcctgactatcttctactcactcctaagctagggaggaaatttagtttagaagggttttagagcaatttttttggattgttgtgagtcaacagctttttcctcagctattcctagggaaagaaacttcaaggatttagtgtaattttgctatataaccatagggtcagaggccacagtggactggtgccaggcttacactgagggatttatatacccagtgctcacatacttttctcatgtacagtcactactctaggaatacaaaaacaaaaacacagcaaaacaaaaaacaaacaaacaaacaaaaaatggtgaacagaatggacaaaactctgggccttcacagagccaacgagctaggggggattttgctgatacactgaaaaatgagtctggggtttggtcaaagtccatggttactgagatctgaggcaaagtattcctctgagagtgtttctttggatcataatgtgctattgaaaaggaccacatcaggcaggcgtggtggcgcacacctttaatcccagcactcgggaggcagaggcaggcggatttctgagttcgaggccagcctggtctacagagggagttccaggacagccagggctacacagagaaaccctgtttcaaaaaaaacaggaccacatcaaaggacaaaaatattccatacaaagaagatggccacggacctgaagtccctagcgatgagctgatagcctgaaagtacgtttacccatgtgtgcaaggttaccagtgtgttctcactgaagcaaagggggtctctgtaaaacccgagcggtaaccagggttaagttaacatcactagctcaggaatcaacctttagtcacagaactgaagcagctgacattaaaccgtctcccttcctgtttcacctttgaagacagcctagttggcctggacagagtgcacaggggaatacgcaggtagggacataatcacccatttgttcaagctagggaagccaagaagcatctcctttaatattttatcaccatgatgaatgtgttaattactggtctcacattagtaatggactagttagcctcagtcaatttgttggctttttttttttttaacttgatagaccaaaaatgtcatgagatttctaagatagttcattcgaaagcagggaagaagtccacactgggtttgtttccaccatgcagagggaacaaactcacttgtatgtggcaccagctctgtctcatttcttcagcatatacagatcaccacagacatttgcaagtcctcacgaaaaaaaaaaaaattcaactttgcttttatttagaagttactcttatatggttgccattgggctggaaagacagctcagcagttaagaacattggctgctcttccagagaactcaggctgtactcccaacacccacatggcagcttataaacctctgttaactccagtagaaaggaagctgaagccctctctggccttcatcaacactatatgcatatggtacacatatgcatacatacatgcaaacgacccacacatgaaaaataaataaaaataaaattatttaaataaaactaaaaatcctgacctagcttactaacatggtttgctgagctggcattcccacaagatgtctttgttgatcaatttttcagcatcattagccaaatcttcaaaaacaggtatagaagaactaaaaatgtaacatgtgctttaggaccttaaggagaaacacagagacagagagagacagaaagagagcgccagaacggcctgcctcttctcttggcctgtaagtggagctttgtgaataaagaaagaatatcatattattttctgagaagatagaaatcaaaagggcatttttaggaatgataggtccatttttagtagacttttcttttttaaaaagatttattattttttatttatatgagtacactgcagctgtcttcagacacaccagaaaagggcatcagatcccattacacatggttgtgagccaccatgtggttgttgggaattgaactcgggacctctgaaagagcagtcagtgctcttaactgctgaaccatctctccagcccttcattagacttttcattaatttaatcaagatttagtgaataccatacggtatcccaagctccccaagctttctgccagatatgatgaatgcttcagtaaaaaattttaaagtgagccagttgtggtggtacatacttttagtcctagcactctggagacagctggatttctaagttggatgctagcccaatctatgcagtaagtaccagaccagacaaagctaaatagtaggatattgtctcaaaagaagattttaagttaaaacttccgatcttcccctgcatagtagtgcacccctttgtgcataccattaatcccagcactcaggaggcagaggcaggtagatctctaagtttgaagccagtctggtctacagagcaaattccaggactgacaggattacacagagaaaaaataaaaccaaaaatccaaaaaaactcacaaaaccaaaattcctatccttgactgtttatatggtttcctgttgtacatttacaataaacacagacatacacaccagcttttatgtgagccagaatgaggattttcttttctttgtttctagaaagatctttccttcgtaggaccacagtggcatcattatcataactacaagctaatgagaaaacaacaaaagcaaaatcaagggcaaatcattaagtaacttccttaatcattggaggaacagtgaagaaacacaaaaatattattactagtaatgaaaagacaaagcacactcaaattagaggatttttttttctttttctgctcatcagtttgacaagttagaaggaatacacaatacccatggtgctgctgaaagtatatacaaagtggcctgtcagtcaccactgaatataagttgatattccatcttataactaacatatatttattgtaattataactatcttccctttgacctcacatgttataaattcatcaaacacacaaaaggtgtacactagaatagtcatattactttaataacagcaaaaacctgctaagatctcaccgatactagattattatatttccacatgatagacttccatgcaactactaaaattaatataggtcattacctacaggcatggtaaattggctaaaactttttaagtgtattagtaagagacagtttagtataatcttatcttaaaacatgtatttgtgtgaggcacatgactatagaaaagaattgtgaagatttttataacatcttctaaaagaaatctcaaaagtagatgggctaatttgggtgctttaaactattttatgtctatgagtattttctctgtatagaagtacaacatgtatcaaaagatggcctagtcggccatcactggaaagagaggcccattggacacgcaaactttatatgccccagtacaggggaacgccagggccaaaaagtgggagtgggtgagtaggggagtggggggggggagggtatgggggccttttgggatagcattggaaatgtaaatgaggaaaatacctaataaaaaatatttaaaaaaaaaaaaaagaagtacaacatgtatgcacaagcgtcacggtagccggaagaggtccgattccctagagttgcagaaggttgtagacagcactctgcagttccacaaccatttttaaatgagcatttaattttcccattcattccaaatccattgttcattcagcaatacaaattatgtacctaatatgtgctaggcaccgtgctggtgctgcgaaaacaaaacagcactatctatcaatttaaagtcagaaatttttaaaaataacaagagccagtgttggtgaatttaaagaacaaagcaatctaattaactgttgagagcatataaacgagggagggagggtgcaaacccagagagagatgagaaaaagaaaagcaaaaagcatgatggttcagaggattgctatattagctgccaagctgtgaacctgagttcaatcccagaatccacgtggcgcaaggagagaaccaccaacttcaagttgtcttcagactcccaaaaaagggtatgcagggacacagacacacacacaaaacaaatgtaaaaacaaaaaatgtacatatatatacagacatgaaaatatttagaatgtgatactaattactgtgaacatagacatttaaatgatgtgttactccgccatcaaagttcagatccttaaagatccttacctgactctgggtacacgttattcaacagaattagcagtcttgatttcatttggggattaaaccaaaacatactcttttaaaactcgtaagaaaactcgcaccttccccctagtggcctaatctaccagatacggtatttggttgtggacagcagaagatcaagtgccaggacagaaaccaggtcctacaatagcaactaatgatcataagtatcacgatcatgcgagaccatggagcctttaaggatgggctctccaagtactcaagcatctcaggccaggaatatgaacacacacacacacacacacacacacacacacacttggtttttttttttttttttctgcagcctctttcagacacgctgtttcccaaacctctctgtgcactgtgacagatctatgagggaccaccgcaccatcccgagctaggtggcgacgttcaactgagaggaccgagagttggcgggaatctgcaatccacttggggattaaaaaaaaaaaagcaaggaaactctgggcgtgacgtgaagccacgccccccgctctctctgcgcattggctttcccaccccggagcttcctgccaatcccacgttctcagctttcgcaggccccgcccacttaaggctggagggcggggcagcgttagacgccgatccgtggctctgggatagattgcacttcctgcgtcgccgccgtcaagactccgcaggcttctttgacgatcaccgaaccgtagttggggccgtgttcctgtgtccgctgctgggtcaggttgtcgctgcgccggagctatggtgtgttgagccccgagtcctcgaagggtttggggctgaggtccactgacgtggtcggggatcggcctctgttccctggggcgtggggcggtgggagagggagcttacctcacggacagtctcctacagtgattcagcatctgcggcctggccggcgggaaacgatcagtaacctgggccgcctttcgctcagcttctccaccttacgtggggtccaggcgctctccctcgcccagccagaggccctcccctctcaatttacttaggtggccgatttcaagatgccctatggtcctttgtcatctgcataggaggaaggctataggaatggaggggtgcacctggcatcgcctgcgcagacctgagcctgcagtcaggtctttagaccaaattcatcttccttgtgggtctgtcttaatctgtctcattagaatgccgtcgggaaaggctccatacagtcactttgttctaaaaggggaagtaatggattcaggtttacagcacagggccctgagctgcttctgtggagtctgccatgcgaactcttgccttttttgccattatgagtattctcctaagagccgatacacttgctttagtaatgacattatggctgtagtgggtctgccacggtagcaatttgtgcccacctctttactgaggatttgtgtatatgttaattcatccagtgacagggtgcaggtagagagctcaaagttaaaccaaacataactttattcatactataaagataaaaaaggtatgttggaaggtgttatggtacacgagtttaatcccagcacttaggaagcagagaggcagaattctgtgagtttgaggcaagcctaagtcaaagttccaggacatccatagtgtagagaccgacaccaaaaaaaaaaaaaaaaaaaaaaaaaaggaaggaagaaaagaagaaaaaaatatgtatagttggtcatgatagcagacacctgtaatctgagcacttggtaggttgagacaggacttcaagatcattttcccaggtatataggaaaaagccagactgggcttcatgaaacctgtatctcaaagctctgctggaatattgtgctgagaattttcagagaaaagaagaaaccttcaagctctgttggaatattgtgctgagaattttcggagaaaagaagaaaccttcaaagatagacatttgagtcaatgtacagaaaaggcctttgccagattattagagccctgtgtagagaacagtatgaggaaagtggagggaaagttggtgtgtgcattctttagcacttgactacccaaggggagtgctgtggagaatggcaggatatagagttagggagaacctagtccattcatcccaacagctccagcatggttaagggaccttgttaaggtagaattgcattgcaaactgagtgctgtaataatgtctcaggaaagctgcactaggagagaggctgtaacaattgaaacacatgtcttaatgttaaaatttgaactttgtaatgttctcatttaatctttcttccactttcagtttcgaaaccagtatgacaatgatgtcactgtttggagccctcaggtaaaaaatgttttatgccatatcaatgaagtgacttttcatggctgaagtaggttcagggacctatgagattgtaaactgggcttggtggtacacatcttaatcttcattggtctgccgttggctgaagccataggatcatggagtcagtgggcaatttgagcagcttagtagaaccccttaaaagaaaaggaaacaaagcttgtgagattataggctgtgaccttcaagttagaattaaaattcgtttattggttttaaaacgtgaaaaaaaatgtttgtctttagggcaggattcatcaaattgaatatgcaatggaagctgttaagcaaggttcagcaacagttggtctaaaatcaaaaacgcacgcagtgctggttgcactgaaggtgagtgaaatataaccctgtcttcttcctcaggaacagaactatcaaatgtagattccactgataaacagtgaacctctgaactaaaataccatattgtgtctatttagagagcacagtcagagcttgccgctcaccagaagaaaattctccatgttgacaaccatattggtatctcaattgcgggtctaactgctgatgccagactgttatggtatgtatgatgatgaaaaatgaaacatccattttgattcttaatagactatttttctaaaaaaagaaatacctaaataagatataggaagtcatctcccagaatattgtaatttttaattgtttattttatttgtgtgcatgttttgcctgtctgtatgtctgtgcactagagtgtgcctggtttcctcagaagccagaagaagacattagattcccccagtattggggtaacagaagattgtgaggttctatgtggatactggaattgaaactgggttctctggaagaacagctaagctatctatctctccagtccccagaatattaaaatttgtactactgtaaataccttagtgggtttgagtatgaaactaagtatttctatttcttaatttttatagtgctattaaaatggttttgaaagtcccttaaagtgatacttgctgacatgtatattgtctcaagcccttcatgcctaagagctgggcactcttctgttgaaggatgacctaaaccattctagttttcttcataatgtcaatatttagtatatataagccgggtagtggtggctcacgcctttaattccaacacttgggaagcagaggcaggtggatttctgagtttgaggccagcctggtctacagagtgaattccaggacagccagggctacacagagaaaccctgcctcgaaaaacaaaaacaaaaacaaaaaaatatttagtatacatttgtgttcataaagttcaggagcatataattgtatgcagttatagatcttgtctgcagagagcttaaaccatattttatttgtaaaacaaggtgggaaacagagcaacaggtacatttccgtagctgtctgaggaggcaggtacttcctgttgggaaatagcacatgagtgaagtgacaggactttggggtcacactagttaacttctcactcatcgcttagtatctgagactgagctagtcccctgacatgtaaaccacttaacacagctttcagaaagagggacaggactgaaagtggccagtgctaatctctttagttcagcatggttttattaggaaaaagcaaggtaagggtaaggactaagttgctgtttgttaacgttttcaaatgattccgccagtgtcttaagtcagtagcagatcctctgtgcttctgctctcagagtgtaaagtgtagtcaacctgctgtttaacctaggtgtctgaaatagtgtcatgccaacattcagtcagtatgaaaacttcatcagcaagatgctgtgtgtggtttcggtgttgtcttttcaagtttgatgtatgttttgtgcttaaagtactttttagcctggtggtggtggtggcacatgcctttagtctcagtgcttgggaggcagagaggaatggatctctatgcgttccaggccagcctggtctgcagagtgagttccaggacacccagggctacacagagaactcctgtttcagaaaaacaaaacaaaacaagaaaatacattttagttagctacttttcaagaccttagacccacatgtaattagtgcttgccatgttaaatagtgtatacacacacacacacacacacacacacacatatatatatatatatatatatattttttttttttttttttttttggtttttcgagacagggtttctctgtatagtcctggctgtcctggaactcactttgtagaccaggctggcctcgaactcagaaatccacctgcttctgcctcccgagtgctgggattaaaggcgtgcaacaccacacccagcagtataattttagaaagccttaaaaaattggctttaatatactggacagcttgatgttgtcaacagcttgacatctagtcaacatttgatgagggccaggaggtcaaggagtttacctatcttattagaggcctggggtatggcttctgcactagaaaaacagccccaaaataaaacttggtcatcagatgtgacatgatgtcttaggaagccagtgtggagacaggagcatagctttttctaactgtccccttccatgggcaccggctttcctctccttgctacttacctggcttggatcttgttagagttatcagtgagattcagccgtagtatggctgacatctcctctagggtgacacttaagcctgctttcaagaaaaaaacaaaactttttctctttttctggtttgaaacctaaaattaaggcatgtgattgctgacaataggaaggacaagagaagagaaggtactttttttggcttctcctctagtctataaagtactgagtccaggattttgtactgagtaatagtaagatcatttattcagttactaagttactaagcattttacattatgaagctggttccaaacatctggtcttcttgctgtcactttgcaaatgcttgattgtcggggtgtgatgccttgcctcacccgtcatttatttttaaaacttcatatggtcccagagtttagttcacacacaaaaaaaggaatctaaacatagcttacctttctgattttttttatggatgtattccatgaaaatgcttgcaggaaagcaaaatggaatcaaactactttgtttaaatgttatattgtatttattctctgtaatccgaactgattaatttttttgttttcttttttagcaactttatgcgccaggagtgtttggattccagatttgtgtttgacagaccacttcctgtgtctcgtcttgtgtctctaattggaagcagtatcctttatgttggcatttctaaatgtaaactgtaaagtttgggttacctagtgtttgcttagttacttggaaagtgatagtataaacataaatcagattgtaaaggtttgaagaactggattactctttcactagcctttataaacagttgatatttccaaaatacaatagctcaatttaaggaaacaattcagttatttttagacaataaagtttctgaatggttttggttagccgctcccccccccccccccccccagttcttgcccctcatattcaaaataagttcctttataggaagagattactttgttagtgttcattattggctttggtgaaaattcaaactttgtatattaggccaaaggcatactcttctgttactttcttgtagaaaattatgaaacaatcaagctagaagtccccaggtgtggtagtacctttagtcccagcgcttgggagataaccaggtggatctctgagttcaaggccagcctgatctacatagtgagttccaggacagccagggctacaatgagacatgagaccctgtctcaaaaaccaaaaaaaaaaaaaaaaagaagaagaagaagctagaagtttttttaatttattacatgttgaaacaggctccttaactagcttcagaaacccagatcccaacacagcgatatggccggaggccgtatggtgttgggctgctcattgctggttatgatgtaagttcttgtattatctactttactgcttctgtgacagagtaccttacacaaaccacctggggaagaagggtttattctgatgtagggttgaggagccgagagcgtgctgtgatggggaacctgaggtggccggccagtcatgctgcattgcagttagaatgcaggagagatgagcactgatgttcagcttgtttgctcctgtaggtaatccaggacagagcctataagatggtgctagtcaatgtcagactgagttttccctgttcatttaaatgtgtctggagccgggcatgggcttgcatgcttttaatctcagtactagggagtcagatgcaattggatctctgacttcagatttattaaaataataaccttcacacttatcacagttatatcctaacaatggtttagcctagaaattttatgatttctagtcaattgaaagtaaagaattatataatctgtttttctgtttataggatatgggccctcatattttccaaacctgtccatctgctaactattttgactgcagagctatgtctattggagcccgttctcaatcagctcgtacttacctggagagacatatgtctgaatttatggagtgtaagtgtagtttggcttactttattttgttttgcctcttctagtctatatagttagcaaatctaccctaagtgaggaaaactaatagtctttagttttttaaaaatcttaaggtcataaagtgtctattgttttatttaattctagctactaagagaactttatcaaaatataaatatgtttgccgggcgtggtagcgcacacctttaatcccagcactcgggaggcagaggcaggcagatttctgagttcaaggccagcctcgtctacaaagtgagttccaggacagccagggctatacagagaaaccctgtctcgaaaaacaaaaaacaaaaacaacaacaaaaataaatatgtctccaaccttgaaaagtcttgacatttagtctgaagtaggccccagtcagggttgaaacccattatactagttgttatttgtaaattctgtttacaacttaattgtttgtaagtctgtttctactttaggacacatagaatttctgcattaagtggcccataagcagtataactgtgggaaaagagggtgaagggtgtaagatgatgaagtggttttcaagcgctttgctttgcattagaagaagggttaatagcagggcttttgttttgttttggtttttttctcaagattttttttgtcttggtttcataaattttcctgtggcagtatagtattttttgaaggaaataggagttcccaagatcacccacatattgggagatttttgagaactcagcttgctgtcatatcctagccaagacttaacgtgtgtggcataagggtcctagcttggtcacagaaggaaacaggaacctgcaggcttccctgtgctcctacccttctcctgagtgtcagggcagctgagtgatgcttctgtctaaggagctttgctagagagtcgttccaacctggcgggtacttagggaatagttcagtgttgtaatatagatgacactgccttatgatggcttagctcaggatgtcttgactttataatatgcaaaaacaacatgcactgcaaaggaaatgaagtcctgaatttagatttttatctcctcctgggttagccacttcgttaagatcctctatctaatgcagggcagcagcagtgagtcatgagcctaagccagccacacagtcacatacgctacgctgcaacatttggtaggcaaggtgtgttgtatgcacattttacttaacattggccatttactgtgggtactcccattgtaagttaggcaacatctggacatagacttttgttacatttacttaagtctttcagtggtattttgtaatttttactttataagtcttgtgtttcttttgtttaacttattcatactttattcttttcatattgttttaagcgttttctcaatatcatttgcagattgcttataagaacttgatatttacatattgattgcatgtcttgaaaccctaagaacacttcattaattccaatctagtggattccttagatctgagattatatcactaggtcacatcatttgcagtagaggtggttttacttacttcctagtcttaatgtgtgctgtttctttcttgcttcccagataggtgcattttgtttttattgaatgccttggctagaactgtcagtatagtgatgagtggaagtgatgagggcatttgtccttattttattcctgagactgagggaaagcgttcagtcattctcttaggtatgatgtgagctgtgagatgagtaagtgtttttattaggtaggagttgggagtttatcacgtgcttgttatagctgactcaaatggtcgtaccttttttcctcttagtctattaatgtattgtgttacatcagttggcttttcaaatgttaaccatgtctacattcctgagaaaaaatacagttggttattatgtataatcttttctcctttgttgttgggttctggtggtggtggtagaaatggtggtagtaattttattttggttaagatgaggtcccattgtgtaattgggattgacctagaattctctatgtagctcaaactactcataatctccaccccagccccataccctcccaagtgctaaggtaatagatatgcaccacttatttgggtgtctttattcatagggaagattggtctgtaattgtctgtaatgactttgatatcaggtaatactgaccacaaagaattgaaggctcattatttatgaatataaaaacctgaattctacaaaacacattctataaaattgaaatgtcatttgtgaccaggacttttatttaatctagtgaaagacagatcatatttattactaaaaagcatcaagtagtcattgatgttggttgatattagattagattagatgctaacattacacttttggctgttttattctatataatatgtcattcaagccacaattaaagactacagacttgataattaaaagaagccttattatgatggtgaaattaagaaattattttgtaatttattgcatacaggcaatttggatgaactggttaaacatggtctgcgtgccttaagagaaacactccctgcagagcaggacctgaccacaaaggtaactcaaggtcccaattgtaggtatagtttaatcctcagtcacaagggataaaacagcatgtccttaagtcattttaattgctttgttcgttatttcctttctagtcaccaaattctctggttttgaaatgtcatgtttaaattggggtgggaggttatacagcaataaaatgtctgcagtttttattttgttttgtctacagtaggtattcgtacctttatcagatatttacattagattcctaacagtctcagaagtgcagttatgaagaagcaatgaaaataatttcctggttgggggtcacaacagcgtgaggagctgtattaaagtattaggaagatgaaaaccactggttgaggggagacttcattactaatgacatggacctttgagatttctcataataaccgacagtgaatattggatctgtaattgaaagagccatggtttcctgcctcttttcactcctacctataggttttaaaactttgaacttaattgctatataattttttctactttgtgcccagcgttttattcatatgttaatttcccccccacccccatcagaatgtttccattggaatcgttggtaaagacttggaatttacaatctacgatgatgatgatgtatctccattcctggatggtcttgaagaaagaccacagagaaaagcacaggtatgttccatgttacgcatcataacatgaggtttcagctttactgtaaactgctgttcctatcacaaccatgtaaattctggcttttgtctttcattattgaggtaggtccataattgaaataacaattaagaaagcactgactcaagtaaaatatttttatagtagtgatctccagaaacacaaagaggaagaagggtttggttctctatcactgcataactaaggtcaccccagaatttacagatttagatcacatttcttagagttctgttgttgactgaggcatggatggtagactgctgctcttacttgggacctcacaaatgctgccatctgactgaagcaggggcagagcaaccaagacgacttcattccttacctacccactcactagcaatctcagtgacccaggtagaaggctgtgaggccgcagactgctagaatgactaggcttcggtctacaaaaggccccttctacaaagtggcaggtcagaacttccaaaacctgaaaagtgaaggttgccagccattcttgaggctagaactcaggactgattcaacttcagtttagcacatttttaggttaaagagaatgagaggaccagcctggattcttctgagaaaagtccagaagagaatacatgttggaagctaacattggacactaagttagctatccataaatggtgacaaaaaagcactaagaaatattgatctcagacaaaacacaacctgaaaataaaagtggttaagtctagggttatgaatctttcctgacaatatgcgtttgatttttttcccctcaatcctgttaacctctaagcaggtagaattacagacattcactctacatacagctcaagtttgctgctaatggatgtggattttatggttgtggaacataaagagtggtacaggaattcttttctacagattataagatcatgctacaatcctagcacaatgaccggcattctccaaaaagggggtggtggtggtagagttttttccagcttgagtttttaagtttatcttaaattggcaaagatactattggtactgtttgggagaacgagatttgcattttagatgttagcaagaactagcatttagaaagaatgcttggagttccacatagctgctgtaacttttttctatttgttggttgaacagaaggaagtctaaaaggtgctggctgtgttctaaacacagcagtgaaacataagaaaggcttaactcttaaggaagacaaatgataaacagtggaattgtctttaagttgacagaactgaaattacatatatatatatataattttttaaagttttattcaaaagtttaacaggcttttgtactaaaatcaagtatctgcaaaatcttataatcctcttactgatatttttatattataatacttgtgatttaatggtgtatattaagtgctcactttacatcttcaattcttcttttttaaagccttcacaggctgctgaggaacctgcagaaaaagccgatgaaccaatggaacattaagtgataaaggttacaaggacataagaatgcagggacatacactggcgacaataatctgtattttaaaccaacagctgcagtgtattgggtggtatgttttagaaatcagtccagatgtaagttttctctaagcaacttcacagaaaccatataatggggtgcattttctttgaaagggtatacataatcattttctaggaagtataggtatctataccaatgtttttatactgaagaaaataagtgtctttgcagttttaaagacaactgtgaaataaaattgtttcaccacctattgtgtcaagtttttgtttttaagtagtttcaactgtacatggaagctaatattacaatggtcacttactatatctgtcagattatattgttttggcattttttagtgatatagaaaaatgcctcttaacaataaaactttaagcaacttaatttgcttatgtagactggctatattgcaaattcatgcagaaggtctcagaatacaaattccccaatacatacctgggatttattctgaagatgacaagccaggcttggcagtgccagccttaatcccagcagttctgtgctgaggcaggagaatcaggagttctagaccatgctctgcttccgatgatgtttgaagccagcccaggaacatgagaccttgtgtaactagtaaaaagtcaacccttccaaacagagtggtgctacagagctggagctgtatctgaagttgtagtctgcttattcactgctcacgcttaggttcagttaccctactactcttcttcccacacctaagcatattattaaaatgagcagttatagcaacaattatgaccctggcctatgaaaaacttgtcaaaattaagagaagagacatcttaatctcaaacctttttaccctaccccaagtctggaggttgccttctgttctcatgagccatgtatttgggtatagcaaaaacagttcttaagccatgaaaaaggaaattaaaggaagtcctttttagagtcaaattttttactgtgttaaagcatggaggaatttttcccagtgtaacacccagttctagagaacagatctttctttatggatggtaacccagattttagacataattctcctaatcagctgcttttggttttaggcaatttatttagccctattttaaagaagctctttccccttccggtcagagccagcaccagggcaccttgggcgtggagttggcagacatccccaaggtccctagaggacagcttctgagaccccattttgtgctccagacatcctgccagaggagaggtgtccgccctgcccgggagggctttgctagagcacctgggggagccatcttggttcccagatccctccgagactagtctgcaggtgagagtgtggactacagaagctaacagcttctgtgacaggcctaggcaacacagcttctgggacaggtcctgtttcaggccttcatcttctgccaggagggaggtccgaaatccagatatctgtgtaccttccctgtaagaggagagcttgccttcagagagtgctctaaccactgaaactcagaggagagagctagtctcccaggtctgctgatagaggctaacaaaatcacgagaggaacaatctctaaccagagacaactataacaactaactccagagattgccagatggcgaaaggcaaatgtaagaatcttactaacagaaaccaagaccacacaccatcaataaaatgcagcgctcccacctcgcccagtcctgggcaccccaacactcccaaaaagctagacccggattaaaagcatatctcataatgatggtagaggacatcgagaaagactttaataactcacttaaagaaatacaggagaacagtgctaaacaggtagaagaccttaaagaggaagcacaaaaatcccttaaagaattgcaggaaaaaacaaccaatcaggtgatagaattgaataaaaccacccaggacctaaaaagggaagtagacacaataaagaaaacccaaagtgaggcaacgctgatgatagaagccctaggaaagaaatctggaaccatagatgtgagcatcagcaacagaatacaagagatggaagagagaatctcaggtgcagaagattccatagagaacatcagcacaacaatcaaaaaaatacaaaatgcaaaaagatcctaactcaaaacatccaggaaattcaggacacaatgagaagaccaaacctacggataataggagtagatgagaatgaagattttcaacttcaaggaccagcaaatatcttcaacaaaattatagaagaaaacttcccaaacctaaagaaagacatgcccatgaacatacaagaagcctgcagaactccaaatagactggaccagaaaagaaattcctcccgacacataatatcagaacaacaaatgcactaaataaagatagaatattaaaagcagtaagggaaaagggtcaagtaacatataaaggcaggcctatcagaattacaccagacttttcaccatgactgtgaaagccaaaagagcctggacagatgttatacagaaactaagagaacacaaaagccagcccaggctactatacccagccaaacattcaattaccatagatggaaaaaccaaagcattccatgacaaaaccaaattcacacattatctttccacgaatccagactttcaaaggatactaacagaaaaaaaaaaaaaaaatacaaggacagaaaccacgccctagaaaaagccagaaagtaatccttcaaaaatcctaaaagaagacagccacaagaacagaatgccaactctaacaacaaaaataataggaagcaacaattacatttccttaatatctcttaatgtcaatggactcaattccccaataaaaagacatagactaacagactggctacacaaaaaggacccgacattttgaagcttacaggaaacccatctcagggaaaaagacagacactacctcagaatgaaaggctggaaaacaattttccaagcaaatggtctgaagaaacaagctggagtagccattctaatatctaataaaatcgacttccaacccaaagttatcaaaaaagacaaggaggggcacttcatactcatcaaaggtaaaatcttccaagaggaactctcaattctgaatatctatgctccaaatgcaagggcagccacattcattaaagaaactagtaaagctcaaagcacacatatcacctcacacaataatagtgggagacttcaacataccactttcatcaatggacagatcatggaaacagaaactaaacagggacacagtgaaactaacaagttatgaaacaaatggatttaacagatatctacggaacattttatcctaaaacaaaaggatataccttctcagcacctcatggtaccttctccaaaattgaccatataattggtcacaaaacaggcctcaacagatacaaaaatattgaaattgtcccatgcatcctatcagatcaccagggactaaggctgatcatcaataacaacataaatactagaaagccaacattcacgtggaaactgaacattcttctcaatgataccttggtcaaggaaggaataaagaaagaaattaaagactttttagagtttaatgaaaatgaagccaaaacatacccaaacttatgggacacaatgaaagcatttctaagaggaaaactcatagtcttggaaagatcaggaattcaaggcccatacctaaacatgataaaagcaatctacagcaaatcagtagccaacatcaaagtaaatggtgagaagctggaagcaattccactaaaatcagggactagacaaagctgtccactttctccctacctattcaacattgtacttgaagtcctagccagagcaattcgacaacaaaaggagatcaaggggatacaaattggaaaggaagaagtcaaaatatcactttttgcagatgatatgatagtatatataagggacccaaaaaattccaccagagaactcctaaacctgataaacaggttcaatgaagtagttggatataaaattaactcaaacaagtcaatggcctttctctacacaaaggataaacaggctgagaaagaaattagggaaacaacacccttctcaatagtcacaaatcacataaaataccttggcgtgactctaactaaggatgtgaaagatctgtatgataagaacttcaagtctctgaagaaagaaattaaagaagatctcagaagatggaaagatctcccatgctcatggattggcaggatcaacattgtaaaaaatggctatcttgccaaaagcaatctacagattcaatgcaatccccatcaaaattccaactcaattcttcaacgaattagaaagggcaatctgcaaattcatctggaataacaaaaaacctaggatagcaaaaactcttctcaaggataaaagaacctctggtggaatcaccatgcctgacctaaagctttactacagagcaattgtgataaaaactgcatggtactggtatagggacagacaagtagaccaatggaatagaattaagacccagaaatgtcacttgatctttgacaagggagctaaaaccatccagtggaaaaaagacagcattttcaacaaatggtgctggcacaactggtggttatcatgtagaagaatgcgaattgatccattcctatctccttgtactaaggtcaaatctaagtggattaaggaactccacataaaaccagagacagtgaaacttatagaggagaaagtggggaaaagcctcaaagatatgggcacaaggggaaaattcctgaatagaacagcaatggcttgtgctgtaagatcgagaatctagggctggtgagatggctcagtgggtaagagcacccgactgctcttccagaaggtccagagttcaaatcccagcaaccacatggtggctcacaaccatccgtagtgagatctggctccctcttctggagtgtctgaagacagctacagtgtacttacatataataaataaatgaatctttaaaaaaagaaaaaagaaaagatcgagaatctacaaatgggacctcataaaattgcaaagcttctgtaaggcaaaagacaccgtcaatgggacaaaaagtccaccaacagcttgggaaaggatctttacctatcctaaatcagataggggactaatatccaacatatataaagaactcaagaaggtggacttcagaaaatcaaataaccccattaaaaaatggggctcagaactaaacaaagaattctcccctgaggaataccgaatggctgagaagcacctgaaaaaatgttcagcatccttaatcatcagggaaatgcaaatcaaaacaaccctgagattccacctcacaccagtcagaatggctaagatcaaaaattcaggtgacagcagatgctgacgaggatgtggagaaagaggaacactcctccattgttaatgggattgcaagcttacaaccactctggaaataagtgtggtggttcctcagaaaattggacatagtactaccggaggatcccgcaatacctctcctgggcatatatccagaagatgttccaactggtaagaagagcacatgctccactatgttcatagtagccttgtttataatagccagaagctggaaagaacccagatgcccctcaacagaggaatggatacagaaaatatggtacatttacagaatggagtactactcagctattaaaaagaatgaatttatgaaattcctaggaaaatggatggacctggagggcatcatcccgagtgaggtaacccaatcacaaagaactcacatgatatgtactcactgataagtgaatattagcccagaaacttagaatacccaagatataagatacaaattgtgaaacacatgaaactcaagaagaacaaagaccaaagtgtttgccccttcttagaactgggaacaaaccacccatagaaggagtttcagagacaaagtttggagctgagacgaaaggatggaccatctaaagactgccatacccggagatccattccataatcagcctccaaaagctgacaccattgcatacactagcaagattttgctgtaagggccctgatatagctgtctcttgtgagactatgccagagcctagcaaacacagaagtggatgctcacagtcagctattggatggatcacagggcacccaatggaggagctagagaaagtacccaaggagctggggggatctgcatccctataggtggaataacaatatgaactaaccagtaccccctggagcttgtgtctctagctgcatatgtatcaaaagatagcctagtcggccatcagtggaaagagaggcccattggtcgtgcaaactttatatgcctcagtagaggggaacgccagggccaagaagtgggtgttggtgggtggaggagtgggtgggggagggtgtggaggacttttgggatagcattggaaatataaatgaaataaatacctaataaaaagtatattttaaaaaaagaagcccttttgtagaaatactatagttaaaagaatttgtgacacattataagctcaaaattcacgatctttaaaatatttttcaaaaagtctcaattgctaagacccttttataacttcttgaagggaaaaatgaatgaaaggcaaaaccctgtttgctttattaacagtctctgatcattagtatttgtgatgtcagtatgtactggaaataacctcagaacactgtctataaagcttagaacaggcgacagtaccatgtggctgtgtgtggagttgcatcaaacacatgcaaaacactaaaacttcctaatttgctggacttacagtgtgttgtgtagggagggaggctaaagttaataacttgtatcctgtacctcttcttctatgcctttctctctttgttgttaaaagataaaaattgtgtgcttttttatctgtttcctaagtacaagctagaactcaaaggattaaaaaatgagtgaacttggttctaaggacagttttagtagggttggttgttggtttttttttttttttttttctcacccagtatgtatgtggttttagtcttaagacactgattttaaaatttcaatccactttggaactaggaaaaaaatgacttcagtaagagccccttgctaaccctgtttgtaggggcgcatgtcctcaatcccagcacttggaaggcagagagaggcaagtgggtctctagtgtgaggccagccaggctgactgacacaaagaaaccttgtctcaaaagtcaggaggaagaaaaaaggcaatcactgtgcaattaaaccaggaactctagcgctacaggataaaggtttgctgctgctgaccggctgctggtctaagtccagtttcagtgagaccccttctcaagcgagtaagtcaggacgatggagcagagtgcccaaggtctggccacctactaatatgttcaagtatgtggacctcatacaaaagtttttcgcttaaaggactttacagagttggatgtgatcctctttctgtttagtctgttgtactcagttactccatttagtctgctggacaactgaacagtaagattccccgagtcctgtaacaaagatatcatctggaatctaagcatcttcacatgtaaatctatgagctggcacaatgaaaaagaaaactagacgtcagaactcatgctctaagctcttagtgtttgaccattaagccactggagcaagtctctttagtcctcagcttgtacacttttataatccttgatatacagagttttttacatttaagtaatttgtgatttggaaagtatttgaaataatatagttaaaaagtgtaaaaagtcttattaaaaattataagaattggcaaagcaacagaagaatttgatatcagttaagctccatgctttaaagtgcaaaaccattcatgttgccagtggcatgttcaggtgcaggcctaaaatgctagctgtaagtgactcagtcatgaagaacctggaagtttaacgtaaggaccacaacactgtggccctaaactgctgagcttccttgttgctaaacctaatctctacaccttgtttggtgtaatttctttctatcacctctcagtaagtcaagtgatcttggagaactagtaactgcgtttgtgatgattccatgtgaaaaaagctgagtacacaaaagaaacatgcttgaatgcatctcattctcagagaattgtgctgaataaagaaagctaatctcaacaattctgttgtatgattccatttaaatgtcaggatggatagatagttgcccgggttaaagtgggcacctggctgtgacagctggtgggcagtaggagcgatctctggtggaacagttctttatctgactgttgatcatcatactgaactaaacatattgtttagaagcaagtacataagtgagattctataaactggtgaagtctcagtgaggagacatgtcagtttcctgcaagacttcccgagacagaggaactgggtgaagagtagagggctgttagaatcatgttgtcttacaattacctagattaaaaacatcttttaagcataagccagacgtgatagcgcttgtttgtaattttttaatgtattggatgctttgaaagaatagcaagaggccattcttttttttttgtttgttcttttgttgttattttgttttctggttttagccctggctgtcctggaactcactctgtagaccaggctggcctccatctcagaaatctgcctgcctctccctcctaagtgctgggattaaaggcatgtaccaccgctgactggccgagaccattcttttttttttttttaaagatttatttatttatttatttatttatttatttatttaatgtatgtacactgtcgctgtcttcagacactccagaagagggagtcagatctcattacggatggttgtgagccaccatgtggttgctgggatttgaactccggacctttggaagagcattcgggtgctcttacccactgagccatctctccagccctcttttttttttttttaaagatttatttattattttatgtaaatacactgtagctgtcttcacacactccagaagagggagtcagatctcattacggatggttgtgagccaccatgtggttgctgggatttgaactctggacctttggaagagcagtcgggtgcccttacccactgagccatctcaccagcccggccgagaccattcttaaataaagagtagaaatgatagcgcttgtttgtaatcccagcacttgggaggctaaggcaggagaggagtagattgggagttggccagcctgggcagtaagactaaaatcaaaattccgagaggtagctgttctctgtgctggaaatatgtagcctctggtatattttgagtggtggggatttgttttttaaacccaatgtttccagaaaagagaattgttagaatagctgcattccaggtaaatgagaaaacagtttgtattctgtatcctgcaagtgaggttagcaggttttgtatacacagtatgtgtatccatgttgtaatcccaactcctcagaaactgaagatcacctttcaagaccagtctggcaatcatacttaaattttttaatgtattggatgctttgaaagaatagcaagaggccattctttttttttgtttgttcttctgttgttattttgttttctggttttagccctggctgtcttggaactcactcgtagaccaggctggcctccatctcagaaatctgcctgcctctgcctcctaagtgctgggattaaaggcatgtgccaccactgactggccgagaccattcttaaataaagagtagaaatgatagttgtcagacaacttctgatactccaataactccagttaactgaataaagtcagattcaggtcaccagaggtgttaagccctcaagtgtattttcatataacctagtcatcttattaaggtctctgaaatcatctgcctaagaattggttgtttccagtttataagtgaaaggaagaagaaagtctgcaggacttttctgtttctcttttgtacagtttagttcctgggaagacaattcctaaggaactgctaactgaccacagcgcttaagtcagctcccaactcgctgggaaaactaaaatacttgtttacactgctgcagaaaccaactctgagagaggaagaagacaacacacttccagggcgcagctcagggcgaaagaggcttgtcctttctgggtctccgtacaggctctgtagctgcatccttgctggtctccccgcccccttccacgtcagccaaggacttggtggagccgtcgcggcagcggctgtc

SEQ ID NO: 969 - DNA, 1073 bp, Mus musculus
ccgtcaagactccgcaggcttctttgacgatcaccgaaccgtagttggggccgtgttcctgtgtccgctgctgggtcaggttgtcgctgcgccggagctatgtttcgaaaccagtatgacaatgatgtcactgtttggagccctcagggcaggattcatcaaattgaatatgcaatggaagctgttaagcaaggttcagcaacagttggtctaaaatcaaaaacgcacgcagtgctggttgcactgaaggatatgggccctcatattttccaaacctgtccatctgctaactattttgactgcagagctatgtctattggagcccgttctcaatcagctcgtacttacctggagagacatatgtctgaatttatggagtgcaatttggatgaactggttaaacatggtctgcgtgccttaagagaaacactccctgcagagcaggacctgaccacaaagaatgtttccattggaatcgttggtaaagacttggaatttacaatctacgatgatgatgatgtatctccattcctggatggtcttgaagaaagaccacagagaaaagcacagccttcacaggctgctgaggaacctgcagaaaaagccgatgaaccaatggaacattaagtgataaaggttacaaggacataagaatgcagggacatacactggcgacaataatctgtattttaaaccaacagctgcagtgtattgggtggtatgttttagaaatcagtccagatgtaagttttctctaagcaacttcacagaaaccatataatggggtgcattttctttgaaagggtatacataatcattttctaggaagtataggtatctataccaatgtttttatactgaagaaaataagtgtctttgcagttttaaagacaactgtgaaataaaattgtttcaccacctattgtgtcaagtttttgtttttaagtagtttcaactgtacatggaagctaatattacaatggtcacttactatatctgtcagattatattgttttggcattttttagtgatatagaaaaatgcctcttaacaataaaactttaagcaactta

SEQ ID NO: 970 - protein, 197 aa, Mus musculus
RSPNRSWGRVPVSAAGSGCRCAGAMFRNQYDNDVTVWSPQGRIHQIEYAMEAVKQGSATVGLKSKTHAVLVKDMGPHIFQTCPSANYFDCRAMSIGARSQSARTYLERHMSEFMECNLDELVKHGLRALRETLPAEQDLTTKNVSIGIVGKDLEFTIYDDDDVSPFLDGLEERPQRKAQPSQAAEEPAEKADEPMEH

SEQ ID NO: 971 - DNA, 159031 bp, Homo sapiens
taataaacgtgtttttatatttcttatataatccgaagctttggtgggtgtggtttttttgttggtttttttggtttttttttgagacggagtcttgctctgtcgcccaggctggagtgtagtggcatgatgtcggctcactgcaagctttgcctcccgggttcaagccattctcctgcctcagcctcccgagggcggatgtgtttttgttgtgtactttttcttaggttcttattcatagtgccttattaccttgcctgatttgtggatttttgactaggcactgctgaatttccttgggattttatctgtaggaattatttgaggccttggagaatctgaatttgcttctaaccattgccttggaacattgccaacctgaggccaatttaaatttttacgtgaggtttctgagtctacatatgcagcactaattttagggatcaaaaactaagttaagaccctgaagattccaccaaaaaaaaccattagaacaaacaaattcagcaaagctgcagtatataaaaatcaacacatacaaatcagttgcatagagttatatactataaataattcaaaaaggaaattaagaaaacagttctatctgcaacagcattgaaaagaataaaatgctcaggaataaacttaaccatggaggtgaaagactcatacactgaaaactatgaaatattgctgaaataaattaatatacaaataaatcaaaagatatcccattttcatggattagaaaacctattattgttaagatgccagtgctactaaaagcaatctacagattcaaggcaatctctatcaaaatcccaaagatgattatactaagtgaaataagcaagtcacaaaaaaatactgtatgattccacttatatgaggtatctaaagtcctcaaattcattgaaacataaagtcaaacggtgattatcaggggacagcggaagggtagttgttatttaatgagtatagagtgtcagttctgcaagatggaaaagatagggagatctgtttcacaacaatgtgaatatacttaacaccactgaactgtacacttaaaaataaagaacagagtaaattttatggtttttaccacaataaaaaataaaccccaatgacattttttgcagaaacagaaaaattcatcctaaaattcatattggaatctcaaaggacactcaaatagccaaaataatcttgaaaaagaacaaagtttgaggtctcaaacttcatgatttcaaaacttactaaaagatacaataatcaaaacagtgtggtactgacagaaacacagacgtatagacctatgacatagaacagagagcctagcaataaatcctcacatgtactgtcaaataattttcaacaaagaagccaacactttgttgaaaggttattaacagtttttttcaacaaatggtcttagaaaaatgtaacatccacaggcaaaagaataaagttggaccattaccttacactgtaattatacaaaattttgtatacaaaaattaactcaaaatgaatcaaagacctaaatattagaactaaaacttttataaaactcctcaaagaaaacacagaatgagagcttcattacattgaatttgcagtgatttatttgatatgacaccaaaatcataggcaacaaaagaaaaagtagataaacttcatcaaaattgaaaacttttgcacatcaatggacactatcaatacaggatattaagtcttattagaaagctattataactaagatagtgtggtattaacacaagatgcataaactaacaaatcaaacataatagagcccagatacagtcatacatatattgaaatttgatataggacagaggcagcactgatgaatggagaataaataaacttttcaatatagtgtgttggcatgactggatatccatttggataaaaaatgagattgaatctctacatcacaacatacatataaatctagaaattagaaaaatgcagattacaatcacaaagaaatgccatttcatacccactagactagccaaacttaaaagtcagtaaataggaagcactggttgataagaatgtggatccaggggcattcttactcactgatagcaaaaatataaatgtatcaatttatattcagcatccattttgaaaaacaattcaattttacgtagctttagttttctgtttctacctacatgggttgaattgtatcgccccaaaaaaatatgttgagtcctaatcctcagtacctcagaatgtaatcttattaggaaataaggtctctacggggataatcagggtggaccccaatccaatatgacctggatccttagaagattagaaaatttggaaacaaagacaggtacagggaaagactatgtgaacatacagggagaatgccatgcgaagatgaagaatgagatcagcgtgatgcatctgcaagccaaagattgccagtaaaccaccagaagctaggagaaagacatggaacagattctccctcacagccttcaaaaggaaccaaccctggagataacttgatcttggacttctggcctccagaacttgagacaattcatttctgctgttcaagccacctagtttgtgctactttgtcatggcagccctagcaaactagtatgctcctgtaacaaattatcgcaaattcaaaggcataaaataacacaaatgtatctcgtaggtctgcaagtcagaagtctgatataggtctcactaagctaaaccaaggtgctggtggggcttcaatactttctgggagctctagggaaaaaatctacttccttacctttttcatcttcttagaggctgcctgctttccttggctcagggtccccttctttcatcaccaaagctagcaaagatgggttgagtaatctcggctcactgcaagctccgcctcccgggttcaagccattctccggcctcagcctcccaagggtggatgtgtatcacactgtattactccaaccctgcttccactgtcaaatcttctctaatctcttctgcctctctcttctactttttaaggaccctcatgattacactgcacccactcagataatcctggataatatcttcatctcaaaatccttaaacccatctccaaagtccattttgccacataaggtaacatattctcaaatgtggacatctttggccaaggtgggcagatggctagagcccaggagtttgagacatgcctgggcaacacagcgaaaccccttctctacaaaaaaaagatacaaaaattagctgggcatgatggcacgcactgcagtcccacctagtcaggaggctgaggtgggaggattacttgagcctgcaaggcagagtttgcagtgaggcaagattgcacatcactgcaccctagcctgggcaacagagtgagaccctgtctcaaaaaaaaaaaaaaaaaacattgctgaatgcaagttgtatgaaatgtaaggaagaggtggccaaagaacgtgctgtagcagatggaggaggagaaatctgtaaagttatctgctaggtaaatcaatgccagaaggaaagttgttggttgtaaaagaaaaaaaaaaaagtgggagatacactcttctgccccaagttctaagaacaggcttataacaacaacctaaataagtgcagatcagcttgtaaataacaagatgaacaacaagtcaatgttataaactgtcaggaaccacccacagacagaacccagttcttccaaaatgttgtttagctaacagtttttcagtttcttttgtttaaactgaatgcctttaagcgaagcaggcaatagtcagttcacttccattcttcctactctccttttgaccctcccctctgtcttcaacatataaaataaatgttatgtaggtacatgagtttgcgaccagctgcatccttacaaattactctgaaataactgtatcagaagtttgtcatcaaggtcattacaaactataggattttcaagagtccctcttaactgactctctctcacttcttgcctacctcctttaaccagagacactgccttttttcacataattggagatacctggcaaaattaagtacagccttggaaggctatgatgggaagtatatatgctccttgtggaaagtaaaagtggactaggagtaaagacctaggttctagtccccgttttccaaatatctcacagaataaccctcagccagtatttttatctctctggagttcaatttattttccttgtacaatatataatgagcagatttcaattagattagataaactctgaacctgtcctatattttatatatctataccaacatttatactgaaataggctttttcggcaagaataaatttttgctttgaatggggtacagaaggcttagaagagtgtgctagggaaataagctgacttggtaattgaaagggaaaagagaaagaatgagagaagggcctgccactgaggaggacagagtctgatgacaatgaaaaacaaactttatgcttttacttatggttaccttctactaagtgtataaaaacaaattatggagatgtgactatctaatgcactataatggaaatactcatcagcactgtttcatatggtttgtcaacttttatttttaaatatggcccattctgctataatttgttctcagcttatacataaatttgagtatcagtgcactgcctaaagtcttcctaatcttatttgttccttaaaggagatttcaacaagtggagatgttaaaatcaaaagagaaaaacccacaacaatgtcaataacaagaagcagccctcaaatagctagaatgcatgtggagagggagtgtcccattagtaataaaatgctttttaaaaaaataaaacaaaaaatggcagagtgcagattatgaaggactttgcaagcaagggtcaagggcatgaacagtatcctgtggacaatgaaaagccataagagatttttaaaacagagtgactctatcaaatctgtgtttttgaaaaataatactcatggcagagtacatactatatttacaaaataaagtataaaattattatgtaggctgatattttaccacaaaatagtaacatgaaattggaataaaacactcactcactgaagccataaaataaatttcacaaatactacagtattcttaaagaaattaacagggaattatgccttgcaaattccttaggtgagtaaataaccacactttaaaaaaaactctcttttttaggctctcacactacatatgtatacctttttcaaataaaattaaaactttaagtaatatttatgggcattagggccacggaatttttaaatatttacctaaccatttagaaagcacttagcactaaagttatagaaaaatatctcacacactaacttatgcctttcaaaaccttgtatttacctagtcaaacacaaagtgatctcattgaaaagctgaaaattgcactgtagaatatgcaattaaaatggcatagaaatgtagcttgtttaattctgattaaagcttctatgcagacgactgatttttttaaacttcctattagtttctgctgattcttggcagataagactacaaactcagtgcttctttccattaacccaccaaagcagaacaccattaacagcacctagatttgggcttcaaatctctaaaagctttgccaaaaaaaaaaaaaaaccttagttaagaactgaactgatacatatatagcatttaaatcaaatattataaatctaattataaaatcaaatgttttacaaacatgccattatttttcaacacagtaatataacatcccaaaagttaaaaactactttaaatctattattctacaattaaaaacatttctattgatagaagtttaagtggctttcaaagaggttaataaaaatgtttaaattcttaaggaaatgaacatgtaataattttgttaccatcctacaaatgaacccccatatacttttttaaagtcctatccaaaatatacaggatatttgctcatctttttcaattattataccttggaaagtataggttagcaaggtcaacattcaacatttaagtaaaacttcaagaactactagtttgtgacatcttattttattttaatttctaccttaccaaaagtgtaaactaaaagaatttaattttagaattagaaggtattatataatttaattttagaattagaagatattacagaattcatctactaggatcccttaatttgacaggatactaagattcagaaaggttcacagacttttccaaaattaaacagttaagccaagactcctcaatcctctgtctatgaatccaggacattttctcctatgtcaggtcccatctaaaatcttttcatcttccttcaccttctgaaacaagcaagtgtttttaccattgtcatatacaacactttgaaaatcagaaaatctcctgatcttttacttccataaaagtactgatttcctctcaatatatttaacataatatacatgcaaacaaaaagcacaaatccactgttagacttctggaacaagcataaataaacattcttgttatgatagtatctgctaagttaaaaatacccttttctagtaatgtcaaaatagaattattttgtagacagaatattaggtaggcatgtataaaccctgaactattcacatatactttaagtgtgcaaaaatgttcctattagaagtagaatgtgaataagggttttctgcactaagaaattacaccctctttagaagcacaaattgtattttcctctaatataaacaataattgaagctacctggtatagctatatacatatatagctatgctgtgatggaaagagcaccacactaggattaagaagcctagaaattttccacttacaagaggacagacagaattaccgcaccaacaaattacaattaaaatatgttaaactgtaactgttaagttcaggaaaattgcccacaaaagtgatgaaactgctaaaacaattttccagtgttaaaaaatgcaatttgttcacatttggtcaaaattcaattaattccattctatgaaaatagttgataccactttgttccataataaatcctctcaaaacaatttttctcccgacacacattttcctaaagtactatctattatcactggtagtaaactgagaaaacaaaaggcataacagaactttttcaagtggttgaccacagaagtggcctctgaagccaaatcaagaagcaaagtattgtgtcattggaacattacagatcagtgttcaacacgtcataaaaccaatgtagtagcttggagattatttcgaagagaagacagacaagaagtgaaggaagagaacagaaaagaagagagaagaatgcatcaaatgcattaaggacaagaaacttttgtctccaacatattggctcccagtgtaaagcatatcactaatccaaaaattcagaaaacctagggtgtacgctcttactctcctacttaaaaccactatacttaccagttagtcgtgcagaacacagcactgaaaactcaaaaatctaatcaaatcccagaactaccacttaactagacatgtgaagctgtgttacctctatatgcctagatttctcatctctagaggttaatggcaccagccaaacaccgttcttgtgaggatctgagacagtatgtgtaaaatgttttgcacttcataaatgctcaataatagtaactatacttattaagtttcttggtgatgtacaacaggtagcttttccaatactatataaagatgtaaactcatttgctaatgatttcaatcccttttaaaaaaaaaacaaaaatatgtaaacctatggtgaaaaaatggaaatgcttttggcatctttccaggaattaccaagtttaaagtttaaactgttaaaacagtctcctaattatgcaacaaatacaaagaacattgaattaatctgtaaaatattatattcacctatactgctgtcttttcatctaaattactctcatttgcaaagctcatgtcttgtaacgataaaatctcagatttttcctctcgattttcaataacgaaaccacactgattaaaactcatagatgtatcctctcattctaaaggctgtatgttatttttgggtaggcatcattataacagcaaacagataaatggcaccaaaaagacacatatcagaggatgccaaaagcgggagtagtcaatctattcaaccacaaatgattcacctcattcttctgcgaactcatctattgcatatacagtccttaaaaagtgccatgtgattagcgggctatttgatttctattcaatgacaaaagctacttgcttctgcatttttaaaaggcttcctgtattttaagaatcctttccagaataaaacattatttcctcccccccccccccgcaacacaccctttttccattctgaaagttaacatgctttgaaataagcgaattcaactcggaaactgcagcggtaaacccgaacccgctcgcgtcccagacctcgccttccagctaacatacctgttctctggaaatacaaggcaacgacggtctcctgaatattttgcaactgccatagtaactggctgcagtttctcctaacgacacgcagctggacctcctccggggtcggatcacaggcactttttcttcggcggcactggacagtcgaggatgaagaggcgcttccctgatttgaaagaagtgatccaaccccagggccagcaggcagccagcgccccccaccaggccggagagcagcggcctgagggcggagggcagcgacccgaggctggtgaaggagacccaccagacgaagctggccaggagcagcaccagaacgcagtgccggagccgcagcgggtgcgcgagcgtcagcagcagccctacgcagctcagcaccagcagcaacctgcccgctgccgcctccgggggcgtgtgcggggccgcggaccctgcgtcgccatccccccaaggccaagaccaccactgccacaccaagaagtcccccaggtaacagcaggcgggcagcgccagcagccaccaggagccgcagctccggcccgggccgggtccccgcttggtccgggtgaggaagcaggtgaggaagaagaaggcacaggcgatgctgaagagggggctcaagctgtgcgaacacacgctcagcagcgtccgcagccaggcggccccggcagcccagctctcgggttccgcgcccagcagcagggcgaggacaaaggcagccagggcgcccagcgagaggcgcgcccggcagaagggggagcagcgccgcggctgctggggagaggccggcggcggccgcagctccacgttgcagaagcggcagaggtggaagaagaagccgcgcggagggtcctgccgcaaggggctcacgcagctcttcacgtagccgttcctcagactctcggggggcgagccggccccatccggcggctgcagggaccgcatggctttggcgtctcgctcgtccctcctcatggctggggccgggggtggccacgggactcagcacaccccgctcgtaccgtagcggccgctcgcgctcccagaccccaacccccgcgttcggggcgccccctggttcgcaacccgtcagggctgcgccggccgccacggcccggggtccccaccgcgcggactgaggagcggcggagtccgggacatgctggctgaggagaggggcggaaggggcttctctccaggaccagtttagctgccgcctccttttccctcgggcacctctcgggactggagactcagtgtcgcctcccacctccgctggctgcaacagttacctcacggccccagcctggtccgttgggcgcgcgacgcgggcgggcgctcctcccccgcgactgccccggccggcgcgcgccagcgctcacgacttgtcccgccgccacccgcgccggccgcccaacagggacgcgagccgggaccacgccgacccagcgtgcccaggccgaggaaagcgcggcggcggcagtccgaagacccaccgggactgaaagagaaggacgaggtcatcttcggacgggaggggcaagccagccatcctgggaccccaggcgtgcaggttctctttgagggtaagtcacggacacccagccagaatcccacaggtcactactggggtcttcgggaaagagggcgtttgtggtccccaaggggtgtgcttagtggggatgctgagctaagggtgggaggggaggggcgctgtctctaaccttagtccctttcagggtgggtcttcagactgtgaccagtttagggccagccaccaccaaggccatggcgaagaaaccctaatcgctgtggctagatctagcctcagaagcaacgtggattcttgggccacgcagcaggcccaggatccttgcagtggctcttagggaggaacgtgcacgtggagtgcactctagtagcactccacgtgcacgttcttgagtgttgctcaagaaccatcttcacaggcgaagaactaacgtctcgccttccattttgtacccttgtcatacatatccgccggttcacaacttgtatccccttccacacagcacagatttgctgtcgcaattggtctttgcaaattgaaggctttttcactgtaacagcactttctagatgggggagcggagagaactaggaatcctctccaagaccactccccagtttggatcagcaggccttgaaggaagccgaataagatgctatctgtgaagtactggtgaaactagcaacattaggaaacacagacctgaaagcgagaagaaaagaactttactacaccaaagggactgctctggaatctaaccaatcataactgccttagagagtgaactgtgtttccctccctaagctctcgcttcaacctcatgaccggactgcatttctcaaagagctaattccacatttttccaggcagatgagaaaccttactgtgtggtaaatcccacaaacaggcccatttttcaccaattaatctctgcccacagtcatgacctaaaacagaccattttcgtatatggtcatagttcacatgcatagcaaaaggcactaagaaattagcacaagaatttaaccaaaatgaaaaagttccagaattccctttcctttgcttttccttttctaatgtattacccaaatgcttgtcctaaaagataaaaattcaaaaggtcattttatccccatgacaagaaaaaaaatgctcatttcagcaaaactcagcaaatgtattttttatatgatgtgcatagaactcattaccaccagttgaagattaaagtaaaaaatggatacattttgagtttgtacagaagggcgtgacaaaactagcaccagcattattgaaattcccgttataaattccataggaaataataaattgatttgaaaattagaacaaattcagattaacaggtgtgtgtgtgtgcatgtgcgtgtatgtgtgtgggcatttaatctgaagttatcatctaaagtaggattggcacgtgatcatggaaacggtagggagtagaaatccagttttgtgagtttttgtctgggcctagccattcatactctgccattaagcaatcctataacttttactggccttgttcttctcaaatgtgaaatgaagcaattaatttagataacctttgaaatcctttctagtcttaaaaagctctgatttctgtatgccaaaaatacataggcatccttaagactcacctttcaggttgccaataatataataagagcaagagccaagagcaaccttttatattatttatactaccaaactaaaccaaagtctcagtgttgacaagtaaaaataaagggattgtgtcaaatgactgttttctgaaaaataaaatccaaagccctcttcacaaaatcgtcttcaagattctctagccgccttttagctgtcattcaggtttttataaggctacaagcccaactctttcaataacccatagtcggagtgcatccctctgaaggccaacctagcacctgagagaattctaaaataaagtgtaaggacgtgaccaaagaccatcagaagtttacttaactaaaaatatgcacaaaaagaatgagctagctatgtttatagtaactcccttctctgtttacagtctttgtcaaagattattactaggccacatttcttagaggtcagattatttaattattcccttgccaaacttaaacaaccaataaaattacttagttctttaggttcaagaatttatgaccattatctgtcatgaaaaaaactgaagtcacagtatacctttgacttttcccagcactttaccccatccttattttacctgactttgccttccctcacgtcttttttttttttaattattactatactttaagttctgggatacatgtgcagaacgtacaggtttgttacataggtatacacgtgccgtggtggtttgctgcacccatcaaggcgtcatctacattaggtgccttccctcacgttttgacccatcatctctccactccttagtggatctctccactctcctggtttaccatgacatgggatcctggctgttaccaccctgctcccaagtcattttaggacaatgcaagcccctgggtatttctttttttctaatttctcaggataaagtggtctgacacattttaaatatcaaagaaactcagaaataggcagtaaattaaccagtatcattgagattccaaatttataaaactagagtcatccctgaagatacatgcaaaaccttataaggtttttcaaagaattaaataattaacatttacgaccttatatttaaaaacaaaaatggacaagcttttctctagcatagaaaggatcattgttttctgtgtgcagtagcgactctgttgcccaagtatgttaacaatacctatgttccttccagctaatactcatctcagaatctgagcctcattttgactcattcttttagttcttttcaacaagtagctatttagtgcccactatatgccgagatttgtactaaatgctatttagaacattttttaaaactataacaggtccttcagagttttctcagagctgcagctttatctgggagatagaatgtctgcacatagactattaaatagcacaaaagaataaatatgtgattaagaactgttgagaacaatgtgttaggactattaaaacagaagaaaatcattttcttctagggtgcccccactgtgtaattgtttcagcttgttctcagtttctcattcttctagttccatttctctctcttacagtcttccttctttctctccccagcatctgtccagatggctgtcttctgatctctctcctctttcccccgacctctctctttcaactctgtattatattccctaacttcttttacttctcctacgtaccatcccccctctaccagcatttaatctatctccattaatgaatgcattcattcattcagtatttattatgtgcccggtgtgctggacactgtgctagatgacaaagatataatggtgaagatgtggttccttagtctaatgaaagcaagacagtaagaagactattacagcccgttgtaacaggagctgtgatacagaggtaataatcctcagtgtactctgggatctcaggagcccagactacagtaggagtagcaggtaaggagtaatgctctggaggactcagagaaagtgatttctaggcttgatattaaaaggtgaatataagttacctaagtaaagtaagtagaaaagataatctgggcaaaggaagcaagcagtgcaaaaatctggaggaattcagctatagtgcatttggataactcaagtatcctatggcttaagtgtaaggtatgatgggactacagagatggtgtggccctactaatggaactggagtttgttattatttgttacataaaggtttatgttctgttatcatatttgcttatttacatggctagctctgcaatatattcttcaaacaagaattctctcttattcaatcttagctcaatcttcatgcctatagcaagtacttagcctacagcaagtcctcagaatttttcaagtgtgttgatatttctcaaaactattttaataaatcagactttaactgtatttcctttgatttttggctttattagtcaatgaattttaatagaaaactcttaaaatagaatataatagaaaaaacttttcatattgtgattttaaaatatttttcttaacattcatttgcaccaaatcactaaaagaaccctttttcctagatttacaaaaacaaaattacacatatgtttatgtcgtatttcactttcaacataaaataaatgtttcagagatgtgtgggtcattttttattttaactcaagtgacagtacctgaattctttggctgtgaaagcatatattctagtacttttaagaattttcctctttccgtttcaagttttcagagcaacaattgtatctctgacacaaatttactattatacttttaaaatataacaattggtaaaagtattaaatctataacgcttacccagaaatttcctggattttttattataaatctaaaacctgaaacttgaacaataaacagcaatgcagactctttccaagttttcttgttccctccctagacaagcaggagtttcttcagctctggctatcccagcagatctgaaggatcacagccacgacggtggcagcctaccgttgacactgaacttgtggttaattgtggagttctgccacaaaaccacctcactaccacaaactggatacttgcccaggaaagtgacaaactgccaggccaagcaatctacaggaggcagcaaaagcaaactgccttttcccccagaaagcagtcatttctggattccaaatggagccaacaagcagagcgcaccacaaaaaaaaaaaaaaaaaaaaaaaaaaaaatatatatatatatatatatatatatatatatatatatatagagagagagagagagagagagagagagagagagagagaggtgtgtttctccactaagccaacttaaaatgtattcatgcagttttgcaagaggagctcaaaaggattcatctagttcattagcatcatcaaaaagtgtaagactattcttttcttaaaaaatttttattaagcatggaattagaaataaattgcagttatattactattaactgctaagtgaaacacctacatattatcattgcaaataggagtaaataatgtgacttcgtgtgtgttactaagctgcgcacagcagcacagcagctctgggaacttcatttgaaaggccaggtagcacgatgtgaaggaaggaaactttagcgtcattctgatctagttaccatttgtagctacatgaccttggaggttacttaaagtctcatgttacctacctcatctgtgaaatggggataacaatgtctacctcttaaagagttgctgtggattaaattaaattacacgtgtaaggtaactaacaatgagtagatgcttagtaaatgtaaattagtttatttttcttacatctatccttttccttatcctcccacatcccttcaggacttcacaggactctgttaattctgagtttttccaaggagacctccagattatattgtctgttcaactctttttaagccttactttcaatattattttattcaactaagtctgcctttttactatacaatcaagtaaatagctctctttcttcaaaaagcaaatgctacagggatgttaatgcctctgttctaattactataaatgcagaaatgttttatatattaaattttaaggaatgcatacataatattatcttaatttcatggccctacatatcttagatctcattctgcagaaaagatgttgatttagggcctatatgttgtaacatggagaaacagaaaaaaaaaattaagccgtaaccaatttcattcatattagcattaaacatagggaagacaaaaaaagatttatgtttgcaaatgtattcatttattcagcatgtacttgatgctactcagatactaaaggtacaaatatgaataagacacggtccctgtcctcagtttggtaaaggagaaaataagtaaacaaatgcagtacagtgcaaaatgctctaacagagttcttaccaggtacagtgataggacatggagtagttcacagatgaagagatactaacctaggtattgaagaataggagcttcccaggtggacaaggaggagggagagtattccatacaaagaacagtattgcaaagccatggaggcatgagacatcatgggcatttctggaactttaaacagattggtatgatttgtgggggagggaagatgggaatgggaaaatgagactggatagataggtggaagccaaatcatgggaatccctataggccattctgagaaacctggactttattctgtaggtggtaaggaactgttaagttttaaaggagggagaagccatgatcaatttttattgtatttaattgtttttcaaaacccaatgctggtattgaatgaaggttagtttgaaagaatgtaagaccaaagctaggaaaatcgtttaagaaaccattataattggccaaatgaaagataaagttctgtaaggcaatggcagtagtaccatttggaaaggaagaattaattgaattaataacagctataaaactttctgatcagttccatagaattggaatgtgcagaaaaggagactgtgaagagggttccccaggtctagcctaggtgactagaatatcttgaaaccattgaacaggataagaagtactagaggaataattgagagtaaagattatggatttccttttgaacagattgaatccaagtgggaatgtttcttggccattggatgtatgagtctgaagctcaagaaaacaatctgggctagaggtatagattggaagcctgtagtacatatggagaagtggaaccctgggagaaaaagagatatcccctatgagagtatatagtgtgagaagagaagaggatttgtttttgaactcaggaatacaaacatgtaagggacaaggaactaaagaattgctcaaaagaatgactgaaaaggaagtagcaaagctagaaagagaatcagacaggagtggtgtcacaaaccaaaatgaggaagtttccagaagggggacaaaaaagcataaaataccacattctaaaaagatgaggacaggaaagtaaccacgggtgtcaatgaaacctgacaatgacaagtttcattgtcaaccttatgtggaacagttgccacagttggggcagaaaccagattgcagtggattgaggaatgaattaacacttattttgacattaagaaaagagagtttcattctagaaagtttagccaggaaaaagctttacctttagtttcatcatttctttgttagttttagtgtaaaaagaaaatttgagtagtttattgatacaatataaagtacacatataccaacttttctcctgtgtaaaaaaaataagtttaaaataatggattccccttaatggtatactacctacagtcttccctacatttctagaaatagatatgataaaccaacacttattttgtattcatagtgctatcctacaaataagagagtaaaaaatatgacagtgaggctacagattctatataatacagaaacaaatataaatgtctagcatagctcttagaggttaaaataactaaacagttattatctggcttcaatgagtcatacaaccttattctgctttttttctcctacccctttgaagtcagtgagaaatctcccttttgaaaagattccgatggtaagatcattgaaatgatcttgttcaacattctttgtttaaaatcactatatttttaccagctccagaaataataaacaaacaactagatctactaatgaaaagcaaaataaagacttgtacatttacagaattttattaatgtctagtcagataattcaggcaaaagcaagagtattttatgtcattttcctgctaaataaccaggattaactgcagcgctccagttcttaacctaacatcaatcttcactagaattatgcttggactgttcccagtgacaactctctagcatggtctggtgctttggtaactatattaaatgtaagtgcaaactgtgaaaaataacaagaaaccttatataaattcaagattttaatgctgtattttgggatgtgtaatcatgtttgaaaggatcactaacatccactctaacatgaacaacactttaaacaaatcaaaactatggctctttaaccagtaaacttcatggctatggctgattttattccttagagaccctcctttttacaggtgaaacggtttacatcagatttcctctcattatagcttctcaaatgttgtccagaccagcaagccactctctttaaacaaataccagccaaccaggaaaccatgaggttttattgtgctataaaatagaccagacatttctaaaccttcataggaatgaacctgactaaatctttactaaaaatggtttcaaaataaactgtgggctccaagtttctctaacaatcaaaatttcttcatccttcatcaatctcactctcaagctctttactcttccagaggtacacagtgcagtaagtttctctggccacatgttcataataataactaaaggctccagttctgtttacttattgggatataagaatgaagggatatattagcttcattccctgcatacattcacatttgtcaaaattctgtttcaaattttcttgtatactaccagcccctaaaacatgagctactacttcttgtatcatgggcatagaaagcctgaattttggctatgcacggtggctcatgcctgtaatcccacacttcagaaggctgagttaggagaataacttgaggccaggagttcaagactagcctgggcaacatagtgaaaccctgtctctacaaaaatcacttaaaaaaaaaaaaagcctaaattttacgaagaattaagtggaatcttcgccttcaaaaaaacatatcccctttcattccattcagcaaatatttattaatttaagccctgtcctaggtaccctcgaaaagtgtgtgttgcatgcatttgtgtgttgcgtgtatgtgtacaagtgttgggatagaatcagttgtaaatggtcagtggggaacaagacatacacaaataactgtaatacaaaatggaatatccagaaacagcagtcccaacctttttggcaccaacgactggttttgtggaagacaattttccacagaccgggggggatgattttgggatgaaactattccatcagaggagccaagatggccgaataggaacagctccgggtctacagctctcagtgtgagcgacgcagaagacgggtgatttctgcatttccatctgaggtaccaggttcatctcactagggagtgccagacagtgggcgcaggtcagtgggtgtgcacaccgtgcacgagccgaagcagggcgaggcattgcctcacttgggaagcgcaaggggtcagggagttccctttctgagtcaaagaaaggggtgacagacggcacctggaaaatcgggtcactcccaccctaatactgtgcttttccgacgggcttaaaaaacggcgcatcacgagattatatcccgcacctggctcggagggtcctatgcccacagagtctcactgattgctagcacagcagtctgagatcaaactgcaaggcggcagttaggctgggggaggggtgcccgccattgcccaggcttgattaggtaaacaaagcagccaggaagctcgaactgggtggagcccaccacagctcaaggaggcctgcctgcctttgtaggctccacttctgggggcagggcacagacaaacaaaaagacagcaggaacctctgcagacttaaatgtccctgtctgacagctttgaagagagcagtggttctcccagcacgcagctggagatctgagaacgggcagactgcctcctcaagtgggtccctgacccctgacccccgagcagcctaactgggaggcaccccccagcaggggcacactgacacctcacacggcagggtactccaacagacctgcagctgagggtcctgtctgttagaaggaaagctaacaaacagaaaggacatccacaccaaaaacccatctgtacatcaccatcatcaaagaccaaaagtagataaaaaccacaaagatggggaaaaaacagaacagaaaaactggaaactctaaaaagcagagcgcctctcctcctccaaaggaacgcagttcctcaccagcaatggaacaaagctggatggagaatgactttgacgagctgagagaagaaggcttcagatgatcaaattactctgagctatgggaggacattcaaaccaaaggcaaagaagttgaaaactttgaaaaaaatttagaagaatgtataactagaataaccaatacagagaagtgcttaaaggagctgatggagctgaaaaccaaggctcgagaactacgtgaagaatgcagaagcctcaggagccgatgcgatcaactggaagaaagggtatcagcgatggaagatgaaatgaatgaaatgaagtgagaagggaagtctagagaaaaaagaattaaaagaaatatgaaaagaccaaatctacgtctgattggtgtacctgaaagtgatggggagaatggaaccaagttggaaaacactctgcaggatattatccaggagaacttccccaatctagcaaggcaggccaacgttcagattcaggaaatacagagaacgccacaaagatactcctcgagaagagcaactccaagacacataattgtcagattcaccaaagctgaaatgaaggaaaaaatgttaagggcagccaaagagaaaggtcgggttaccctcaaagggaagcccatcagactaacagcggatctctcggcagaaaccctacaagccagaagagagtggggccaatattcaacattcttaaagaaaagaattttcaacccagaatttcatatccagccaaactaagcttcataagtgaaggagaaataaaatactttacagacaagcaaatgctgagagattttgtcaccaccaggcctgccttacaagagctcctgaaggaagcactaaacatggaaaggaacaaccggtaccagccactgcaaaatcatgccaaaatgtaaagaccatcgagactaggaagaaactgcatcaactaacgagcaaattaaccagctaacataataatgacaggatcaaattcacacataacaatattaactttaaatgtaaatggactaaatgctccaattaaaagacacagactggcaaattggataaagagtcaagacccatcagtgtgctgtattcaggaaacccatctcatgtgcagagacacacataggctcaaaataaaaggatggaggaagatctaccaagccaatggaaaacaaaaaaaggcaggggttgcaatcctagtctctgataaaacagactttaaaccaacaaagatcaaaagagacaaagaaggccattacataatggtaaagggatcaattcaacaagaagagctaactatcctaaatatatatgcacccaatacaggagcaccaagattcataaagcaagtcctgagtgacctacaaagagacttagactcccacacattaataatgggagattttaacaccccaatgtcaacattagacacatcaatgagacagaaagtcaacaaggatacccaggaattgaactcatctctgcaccaagcggacctaatagacatctacagaagtctccaccccaaatcaacagaatatacatttttttcagcaccacaccacacctattccaaacttgaccacatactgggaagtaaagctctcctcagcaaatgtaaaagaacagaaattatagcaaactatctctcagaccacagtgcaatcaaactagaactcaggattaagaatctcactcaaaaccgctcaactacatggaaactgaacaacctgctcctgaatgactactgggtatataacaaaatgaaggcagaaataaagatgttctttgaaaccaacgagaacaaagacacaacataccagaatctctgggacacattcaaagcagtgtgtagagggaaatttattgcactaaatgcccacaagagaaagcaggaaatatcgaaaattgacacactaacatcacaattaaaagaactagaaaagcaagagcaaactcattcaaaagctagcagaaggcaagaaataactaaaatcagagcagaactgaaggaaatagagacacaaaaaacccttcaaaaaattaatgaatccaggagctggttttttgaaaggatcaacaaaattcatagaccgctagcaagactaataaagaaaaaaagagagaagaatcaaatagacgcaataaaaaatgataaaggggatatcaccaccaatcctacagaaatacaaactaccttcagggaatactacaaacacctctacgcaaataaactagaaaatctagaagaaatggataaattcctggacacatacactctcccaagactaaaccaggaagaagttgaatctctgaacagaccaataacaggagctgaaattgtggcaataatcaatagcttaccaaccaaaaagagtccaggaccagatggattcacagccgaattataccagaggtacaaggaggaactggtaccattccttctgaaactattccaatcaatagaaaaagagggaatcctccctaactcattttatgaggccagcatcattctgataccaaagccaggcagagacacaacaaaaaaagagaattttagaccaatatccttgatgaacattgatgcaaaaatcctcaataaaatactggcaaaccgaatccagcagcacatcaaaaagcttatccaccatgaccaagtgggcttcatccctgggatgcaaggctggttcaatatacgcaaatcaataaatgtaatccagcatataaacagagccaaagacaaaaaccagatgattatctcaatagatgcagaaaagtcctttgacaaaattcaacaacccttcatgctaaaaactctcaataaattaggtattgatgggacgtatctcaaaataataagagctatctatgagaaacccacagccaatatcatactgaatgggcaaaaactggaagcattccctttgaaaactggcataagacagggatgccctctctcaccactcctattcaacatagtgttggaagttctggccagggcaattaggcaggagaaggaaataaagggtattcaattaggaaaagaggaagtcaaattgtccctttttgcagacgacatgattgtatatctagaaaaccccattgtctcagcccaaaatctccttaagctgataagcaacttcagcaaagtctcaggatacaaaatcaatgtacaaaaatcacaagcattcttatacaccaacaacagacggagagccaaatcatgagtgaactcccattcacaattgcttcaaagagaataaaatacctagcaatccaacttacaagggatgtgaaggacctcttcaagaagaactacaaaccactgctcaaggaaataaaagaggatacaaacaaatggaagaacattccatgctcatgggtaggaagaatcaatatcgtgaaaatggccatactgcccaaggtaatttacagattcaatgccatccccatcaagctaccaatgactttcttcccagaattggaaaaaactactttaaagttcatacggaaccaaaaaagagcccgcatcaccaagtcaatcctaagccaaaagaacaaagctggaggcatcacactacctgacttcaaactatactacaaggctacactaaccaaaacagcatggtactggtaccaaaacagagatatagatcaatggaacagaacagagccctcagaaataacaccgcatatctacaactatctgatctttgacaaacctgagaaaaacaagcaatggggaaaggattccctatttaataaatggtgctggaaaaactggctagccatatgtagaaagctgaaactggatcccttccttacaccttatataaaaatcaattcaagatggattaaagacttaaacgttagacctaaaaccataaaaaccctagaagaaaacctaggcaataccattcaggacataggcatgggcaaggacttcatgtctaaaacaccaaaagcaatggcaacagaagccaaaattgacaaatgggatctaattaaactcaagagcttctgcacagcaaaagaaactaccatcagagtgaacagacaacctacaaaatgggagaaaattttcgcaacctactcatctgacaaagggctaatatccagaatctacaatgaactcaaacaaatttacaagaaaaaaacaaacaaccccatcaacaagtgggcgaaggacatgaacagacacttctcaaaagaagacatttatgcagccaaaaaacacatgaaaaaatgctcatcatcactggccatccgagaaatgcaaatcaaaaccacaatgagataccatctcacaccagttagaatggcagtcattaaaaagtcaggaaacaacaggtgctggagaggatgtggagaaataggaacacttttacactgttggtgggactgtaaactagttcaaccattgtggaagtcagtgtggcgattcctcagggatctagaactagaaataccatttgacccagccatcccattactgggtatatacccaaaggactataaatcatgctgctataaagacacatgcacacgtatgtttattgcggcattattcgcaatagcaaagacttggaaccaacccaaatgtccaacaatgatagactggatgaagaaaatgtggcacatatacaccatggaatactatgcagccataaaaaaggatgagttcatgtcctttgtagggacatggatgaaattggaaatcatcatcctcagtaaactatcgcaagaacaaaaaaccaaacaccgcatattctcactcataggtgggaattgaacaatgagatcacatggacacaggaaggggaatatcacactctggggactgttgtggggtggggggaggggggagcgatagcattgggagatatacctaatgctagatgacaagttagtgggtgcagcgcaccagcatggcacatgtatacatatgtaactaacctgcacaatgtgcacgtgtaccctaaaacttaaagtataataaaaaaaaaagaaaaactattccatctcagatcatcaggcattagatggagcatgcaacctagatcccttgcatgcgcagttcacaaaaggattcatgttcctatgagaatctaatgcctctgctgatctgacaggaggtggagctcaagcggtaaggctcactcatctgccactcacctcctgttgtgcagcctggttcctaacaggccatggaccagtaccagtgtgggggttgaggatccctgtcctaaaagatagccaaattgcaatgaggatcaggatgggtgacataaagtagatgagatttaaaatctgtcttaaaggatgggtaggatttagatataagagaggatggcattgcaaggaagaaaaaaggcataaaaatgaaagtgttcatgaaatcattgttttatcagaatataaagtatgagaatgataacaataaaaatattatgaagcaactacagcatgtgaggtcctctaagcctcttattctcatcctcacaacaatctgccagtagaaataataatcctcatttttacaacacatgggacaattgagattaagtaatttgtagggcagaaagattaagtaatttgtcaaagattacacatctagtagttggtggagccaggatttgaacccaggccatggaactccaaagctctatgtgctttccgttataacagtaattgttaaactttggtacacaagaaccatccagataacttttacccagatgataaaaatgcagttgctgaatgctaaccccagagattctgattcattaaacccgagatgggactgaggaatctgcatttctaccaagcacctcaagtaaccctgaggcaggaggtctaggaaccacattatcctgaggtagaccagcatagtttcgaatagaccctggaatggatttgaacatacttaatgatgagtgttatggatgaaactgtgttcattcaaaatttgaattttgaaaccctaaccccagtgtgtctgtattaggaaatggagcctttaaagaggtaattaaggttaaatgaagtcctaatggtggggcactaatccaatatgacttatgtccttataagaagaggaagagacaccagggatggagaaaaaaaacttatgaagacacagcaagaagggggctatctgaaagctaaggagagaagcctcagaagaaaccaaccgtgccagcaccttgatcttgaacttctagactttctagcctccagaactgtgatcaaataaagttctgttgtttaagctacccaatctatggtgttttgttatggaagccctagtagagtaatacagtgagttaaattaacttcctgcttatcctaagctatttacatctgtcatatatcaggagctgtcctaaaaaagatccctaattatcatcgctatcataaaaattcacatttatatggcattttataatttacaaagccttttcacgtgctctgttacacttgaactttgcaacagcctacagggtaaccaaaactcaataaggcaataggacttgcccaggtttcttacaagttgtagagctgagttcaggtctctttactccaaatcttatgctgattttttctacatcagacatcacacacttcatgatgtgcatgcacacacatcatgaagtatgattaatatataagagacccatctaaggatatgtctttctttagctctagagagtaaatacctttacttgattttctagttacataagatacggtttcaagaatttaagagatgtgccaaaacggtaatagcatagataagataagaataggtacaagattcctaatgttcagttctcttttcaaacaattgactaggcagtaacaaaatggtctcatttatatgaattaagattatgcttttgctccttcagggcacacttgagtgattttctagtagtgttttgctcaaatgccaagtgttataaatttgtagactgccagactgtacaaaagattatcacttaagtaataataaaaactgtaaatagggaaaaaaaaaaagtgaaagaacagttagagatagaggaagtgattcctttactttcattttattttccagcacttcctctttaagttagcaaaaataacgttttttgaattggcatttgcagaaaacagttcatagaacacagtcaacattgtatactacatttctgtagatccagtacaggaggtagattctaagtctgtcttcttcataccctaccattttatcgttagctaaggtcttattccctggtggcactgtgttagtttgtatcctctgagaaacaaatgccaaaacagaattagacgtgcaagtgacttattgtggaaagtgcctatgaaagataaatggaagatagccagaggaagtggagagagccttcagactgtgatgcaagtctcacaatagggaaagtggggaaaggaaggaggattaggtagaaagagccttatactacagcatcattctaagaaagtgtcaaccaggccaatgtgaggtcctcaagccaaagtctcctattaaaaggagtccctcatctcacaggaatgggcctacattatacccttgctgttactgactaggagaagcccaaaagaagtattgcctcagtactgaaacaggggtggatccagaagagtaatggtccagtagtcaattatgttccctatagcagaagatttgagtgacaaattttcttttttgagatggagtttcactctttttgcccaggctggagtgcagtggcacaatctcagctcactgcaacctttgcctcccgggttcaagtgattctcctacctcagcctcccaagtagctaggattacaagcacacaccaccaaacccagctaattttgtatttttggtagagatagggtttcaccatgttggccagactggtctcaaactcctgacttcaggtgatctgcctgccttggccttccaaaatgctgggattacaggcatgagttaccacacccaggctgaatgacaaattttcttgattgccacagtccacctctttctctggacagatctgcttctctatgcaaatttagggaacacatcctccatgtttcctatgggcttttcttcctgagggaaaacttagaaggaagttagtgagatgaactggagccccattgctgcagttgggcttgagactgcaacaaggtacttaacttctcccacctctattatccattccaagtcctctcaaccctcagctatcaccttggcaagtaatggtagcttaccttgtggtgtgacccaaaccttcattcctgatgggtctgagctcttggcagtcatacccttttcaagtcagggtcgttgtacatgtcctttcacagctacagtgggccaaaggagtaccagcaggcttccaagtagatgacataggagttgcatacatattcctatccttattgtctataagcagcactaccttctcccaatgatcagggttgattacccctgccaagatgtgaccctattcttgcctgcaggtctctggacatgaggtgtccaaactgccctggcagtatctataacatatagttcaatgagacactcactgtcccctggcaagagtgcactccctctcgggacctccagccctgcagagcccagagttgcacatatggggagcccaaaatcccccattgagagttattgggagtgatggtagatagggctagtcctgattacacccatcgatggccattgtgttcctcctgctgatgacatggtaccatatagaggtctctgagttagctcagatccccatgtcatctaccacagttgcaacagcatccctttcccagttggtacctttggctaaaatggggctagaggaaagggttcccatacgaccagctaaaggaagaagaataatcctgagcttctctctgcaaaggatggcactgcctcctttgagagtgttgcttctgagctgacgtttcagctgtgcctttagatagctgttccagtgttctgtgaagttggctacttctaaatgattttgttgtagaagatatagctagagctcccatggtcatgagttcaatcctgcatctcctttactgtgaaatgggtcacctgttcaaatgttttttgtgtggtattctatacccatagatcagacattctttaagcccctggattatggtgctggctaaggtactacaatcaggaaagacaagcctgtacccagaataggtgaaaacaaccctctagcccttgtagttgacttaccaccaagtggccagttggtctcattaataaatagtgatataacagcattgatctctgttgctgacaggttggacattcagaagcagcagaagctaggtcagctttggtgatgggaggtccatgctcctgggcccatgcatagcctgtctctggcagcatggccacttttttcttatgccaaaatgtcagtttcagggtagccaacaacaaagactggcttatataaactggtctggttattatatctgcttcactgttcacaatctcttccatggtagatgctttctattgggccataatatgtcacactaaactcttcatgtttacctgcatacctctaccccagaactccttctctaaaatctttcaattattttctttccaggccccgaccagacagccaggacattggctatttcccaagtctatatatactgggccacttctcattccacaagaagtcaatgactaggtgcactttttacagatccacgcactgggaagattttccctctccactgtctttcaaggctatccttgaatgtggttgtaatgcagccatggtccattttgagcttgtactcacatacagaacagacccacccaaaaatcaagcttaagctttccttctacttcagttggtcttacggggcccccatatggccataggaacaagctagggaagggtgttatttcagctgttgtgaatgacatgctggtctgagctacctgcgcatgcaatttgccatgtcctttgtccttctcaggctcaatccttgatgtaattttccatattaaagtagactactgctggacctatacagccttgtgatttaacatatccagcagaaccaaacttgtaatgtgcagttctagacccatggtcactttgtgccccatggtgaagcactctgcctctaccagtcccagtaattcaccaagagctttttctcaaaagacatataattctatgctacaaatggcatagccttgccccagaattccagggccctacgttgttattctcccaatgatacttgccgtaagacactgcatgttttcccaccactgtcacctacaccatgagatgtgctggattgtatgccccaagtggcagctctgtttgcagtgcagcctggacctcttcactcaaagctggcaactttctatgtcactcaatctagcagtattcataggtttggaatacgccgcctccagaacccaaagaggcctaccagccacttcatttccttctttgtggtggcacacgcaagatgcagcaattttcttttactttgaaggggatatcttgtcatgtttatgaccattgcattcctaaaacacttcattgaagtttcaaatccctgaatcttcataggatttatttccaaccctctggaacactgtgtcttaccaaggcctttagcatactagtgccttcttgctcattctaaacaatcagcataatgtcatcaatgtaatgtatcagacgaatgttcaggcagtccagatttcttcagagtatattatgacagaaggcaggaacattaacatagctctaagtcaaaagtgtaattgaaaattattatctaacccacaggaatgtgaactgtttctgatcctctcttctaattggaatagaaaagaatgtatttatcatatcagttgccacataccatgtgcctgagacctcattaatctgttctattaatcacacagtgtccggcaaagcaactgcaattggggctactaattgcttgactccgaactcctgaaagtctgcataggtacccagtcttacatacttttctgtctagagcatctaggacctagcaggtattctatatgtattttatgaatggattaataaattcagtatgacattcaagaagatgcctactaacaggttgatttagctgatgaccctagctcatagggttatgaggattaaatgagttactaaatggaaagtgtttacaatagtgtctggcacataaaaagcattcagtaaatcttatcaattgtatttttccaggccgcagagaaccatcagatatgatagagagattgacattaagctaactccttgaccataagtttaaatgaaacatgagagacatgtgttggcctttaaagtgaaagagtctgcaatatttttctgagaatgtgaggtttccaaggaaaactcaaaagaaaactgattgtaaagctggaaagaaagaattacttatagaaacagacactttcatagctagtggagagaaaaaggtggttactatgtgccaattcattactagcattgctatatttaggataattttgagggccaaatgtggtggctcatgcctgtaatcccagctctttaggaggccaaggtgggaggacagcttaagcccagcagtttgagaccagcctgggcaacataatgggaccccatctctacaaaaaaaacaaaacaaaacattgaaaattagctgggggtggtggcgcatgcctgtagtcccagctactctggaggctgagcccaagaggttgaggctgcagtgagctatgatggtgctactgcactccagctgggtgacggaggggtctcaaattaaaaaaaaaaagaaaagaaaagaaagataatttcagaaaaatctcaaagttaaaatttttgacaaatgctttttactaataaagcaaaacatgatcttgaaataaaatgaatgagtgcaattatgcccactagccatttcacaaaaatggtgttttccattacctaaatgactatttccatataaaaattaattaaaagtacactcacagttttcatctctgacataggtcaatgtaacagctaatacaggaaaatgaaaaggtataataacaggacatacacacccctactcttcattagaagaaaaaagaatattttttcttgtataatactgtgatttgagaggccttaaagctgctattctctgacattagctttgtggtcaaatttaaaatgatcttgataactctcaggaaaccccaagtctcataaaactttcccaacaattttcacaatgagagctgtgaaataatttcagggtctctaggaaagaatccacacttgctacttttaagaaagctaggaagtgggttgttggacaagatctaaacatgaattctttcatctacaaaaaaagttgagccactatgaagaatttccagtggccactctgttatcaatatctcacaactaggtctagacgacctcaaaacttgggaaattgctttgctgctttattgccagtatctctgtctttacagagccttccagaatagaatcactagattgaatttattcctccagtaagtcagttgcttattagcacttttaacatccagatggtttgagacaaaggctaaaccagggataattcccaagtataaacagtggaaactctcttttgctgagggactctagtctactgggctatgggccagggcatgggtttcttttgcaacatcccaacactgctgtggccttttctataacccttgcaagtgaagtcacctgaaaagccaagagttaaactggctgtacagtctgaactgtgaagtttggaaataaattcaaatggaccaatagcctggatctgtttcatgaataaacagaggagttcaggcttaggaccctataaagttaagtcaatattagttatagaggaaatcctgtttgttcttcttctgttgtaattgtctttttaaaaagaactcaggtagagctttggggtatgttataatgctcaaaacatcctttaaacatacacatacacatacacacacacacacacgcacacacacacgagtgtttataaccaagaagaaagcaaatcactgttgtccttactgttaggtacacgagaattaaaagtgtttgctcaatatccttaaaaaatacaacttaaaatgccctaacttatgaaatgggaaatacttatctaggttctgatgccatatagtcaccttatcatgattattacaataaagataagtaagtgattgctattaaagccctttagttatgctgatttggcacaaatttttcccagtactcatcacctagaaattacacataacaaggtctgagtaatccagtgtttaaactttgagggtactaagagagtgatttctaacctctttgaaattatgacaccctattttgcccgttagacatcacaactcttgctcctgttatactgtctccacacactcaaggaaaaaaatctattatatgatataaaaaacacttaaatgaatttaaattaatcttaatttcttcaggcttttacttgtttttctttataattacctcttctttgaagctgagtcaccctaggtttaagccagaattaacctctcctcttcgtgtattcttttagctctttatgtggtataaatctatattacagattttttttttgagacaggatctctctctgtcacccaggttggagttcagtggcactatctcaactcactgaagtgtcgatctcctggctcccctacttcagtttaccaagtagctgggaccacaggtgtgcaccaccacactcagctaattttttttatttttgtagaggcaagttttcgccatgttgcccgggctggtcttgaactcctgagctcaagcaatctgcttgcctccgcctcccaaagtgctgggatcacaggcgtgagctgccatgcccagcctatattacagtatttttaaatcatatttttgttgattaattttaagtctttccccctggcttaaatgtaagggccatgtttattcatcttttttccagaatttctagcacagtgcttaatacaaagggagattcaatacatgctagatgaaggaataatgaatgaatgcacaatggctgtggaggcagaaatataccagcatgtcaaaaatatcaacccaagaattattattctagtagcttaaagatatgcctgtataagatcatctgttacagaacttaaatccagtgagaaaatggatgcaaaaatactttataaactgtaaaatcatacacaaatgtgagcaaatgtcactgttacttactgtttagtatccttcagggaatagtttctgaatttgtgaatcaaactttgaaaaacagaatgaacttaactcattggaatagtaggaccatgaaaggaataataaatggaagccagttaacaacaagttgtcatttgtctataatgtaatgcagtaggagttcagttttggaaaaccaggccttggtgacatctttaaaatactaatttttgtgtcctggtttataaatgaccattcctttagatgcttaggatttggataattccatatagtattcccagaaatatgtgttaccaggtacaaaacatacaggcttgattgttcaaggaaacatgtattacatttggataactctactgagaggctaaaataactgattcatttttgaagtgaccattgatagtaaacttcagcagttctagaagaggcaataaacatatcagggcaatttgacaggctactgtggttcaaacagatgttagtggtagccaaagttcacaaattatgtcaatgaagctggattccattaagtcaatcagtaactaaggaaatagttaattgagatacaatcacaagctagaaaagcaggataaattaaagaagtaagaggaataatcacatttctcgataattacatgctatcagacagcagaatctgatgtctggaagataaagcaggcatatttcaaaaatggaaaaggaggccataggctagagcatgagtaattccataaaagcggtcaaatgggaatctttctgaaaagcaaatgatgtcctcacagaaggaaattgcctaaaaactactagaacatagtttctatgctacaaacataatctggccaaagtcatcagctagtaagttgcaaaatagattttcaaaaccaggttgacaccaaagcccatgtcctccacactgtacttctctctcctaggcaaggaataatcaaggtatgtgccaagctcccaggctgtgttgttccttacacctctcctgattccagtttcagtaaagccatgagtcacagcagcggtaacagtaagaagctttcagcttgtccagctcacttgttaaccccatatacacacacacacacacacacacacatatatatatatacgtatatatatgtatatatatatttcaaaaaaaaaggacaataaagaggctgaagatgaactcaaaccaagtagctgattttctgaagcagctaacctatttctgagctaacagtcttagtgtgtattaaattcttacttctgtattctctcagaattagagagaaatgtctattcactctttcatttaacaagcaattattgagtgcttaccctgtgccagtcactggagaaacagagattaatagaaaaagatttctgctgttaagaatcacatggttgaggaaggaagggggaagtagaaacagacaagcaaatgattatagtacaatgtagcattgatattgagaactaaaaaaagaaattaacagtaataaatatagggatgctacattgggggaaatatcccttcccaatttttggtgtttccttccagatggagaagattccactagtgtggtattccctaaactttgtccacccctcaactctttccttcccagagaaggagaaattacttaatctgattgattagtatgaaaaaagaaagtgggcatgcaacacaagccccttattttctccctccacacccactctcagcaggcagcctgaaaagaagataacttctgttcttccatgccctgtgtttttcacagactggcttcatgtaaggaagcctagagaagtccagcactgtctgtgactaggggttcactattaggaatcccttttgttcatagatacaaacgacattctccaccatcagtttaatctgtactaaatgtgttatttctcaagaggcaatataatgtagtggttaggtgcatagactctggagccaaactggttcataccctgggtttgctacttaataatagccatgagactttgggtcagttgcttaacctccctggggcttcaatttctccacctacaaaatagggctaatagtatctactcacaggatgatgtgaggattaagtgatttaacatatctaaagcacatagaacagtgcctgttacaaaataacttctccagaagtttgagctatcattactattattattattttaacctttatctattgtaatcttatttctcaatttgttgaaaactcaagcaggaaaaagtgttattaatatttattgggatctgatcgggcacagtggttcacacctgtagtcttagcactttggaaggccgaggcaggcagatcatttgggtcaggagttcgagaccagcctagccaacatggtgagacctccatccctactaaaagtataaaaattagccgggcatggtagtgcttgcctgtaatcacagctactcagaggctgaggcacaagaatagtttgagcctggtaggtgaaggttgcagtgagccaagatggcaccatgcactccagcctgggtgacagagcaagactctgtctcaaaaaaaaaaaaaaaaaaaactattgggatcctccaactctcacctccaatagttagggaagtttaagaaatcttacacagttcttacagtcgttgcccttttgtttatagttcttggctctttactggatgaaatttggaagattgtatcagtaggtgccagatgccaggccaagcatctcagacttcagcccaaattggtttgaggttgatgcctctgatttccatgggtaaggcaggcaggcagctctttacttgattctcaaagattaatcccatgtccctcaggttatctgcacattctagagatcccctcttgctctggcctctgcgtgtcctactgcggtctttgcaaaaccctcctaggaagagaaggctctttcccacctagtcacaatgattctttccctggattcagatctgcctttcaggagttcaatgagggaaacaaacaggtaggctaaaacaattggaatacaaagtattaagtacagttaaaaagagatctaaatggtaccacagaagtggaccagtcaggacaggaaacagatggcatactgaaaaggagtgattaaagagagtttaataaggaatttatttacaaaggtataggcagttaaggacagtgaagcatcaacagtgaaaattgctcctacacctaggcctgaagaaacaaagggaaagagctattaccaaacttcagaaagcaagctataggagagagctacctcacaggaactctgtttcaggtaatgcagcccctgccaatccaaggcctggaagagagggatgtaggaaaatattacaattgtactcttctgtcctctgagtttctttcagcgtgtcccactgttcaaatctaccagaaagtcagaggacaaggaaacctgttactgtcatccaaagaggtcaacctctgaggacgcagggcaagtagagaatgctggagaggggatctcaagtggccagcaaagaacaacccagcacagaagcgaagggactaacactttcttaagatttcataaaagaccttttaaaggaggttatatttgagataggcactgaaggataagtaggggtttaccaaatagagaagtgaataagacattttaggcaaaaggatagcattgtcaatatctcatagatatacaaaagaacttgcatgggctatatattcagacaagcaatcccatttggcagaagcacatgatgcttttggagagatgggtctgaaaagaaaagttaggatcagattataaaggctcttaagtgccatgctaaaatgactggactcgatcctgtagttaatgaggatccgctcagaaactttcagagaaagagagtgacatgagcatagtttaagttagaaaaagatccctccaatggcagtgtaaaggatggactagagtactgaaagactaaaggcaggaagatcattttggggatctttgccatagtccaggcaagataaaggtgaatggcactaaagcagtggcagtgataaggaagcaaagattctaggcattttctgaagatttaatgaacagaactggatgacctagtaactatgaggaatgcagaaaaaggcaggctctagatgagaatcaaatttctagcttgagaaactagatcgatggtggtactattaattaggagagaaaattcaagcagagtagctttgtgtgagactgcatggatttcatctttctgcgtactgagtttattatgcctatggatcactaacagaaatatctagttggcaatgaacagtagaaggccaggctctgaagagagatctaggagccagatatacagtctgaagaagaacaattcattatttggggttttttttttcagcttatatgaaacatattcaccaaatttttctcaacctctgtaacaaaggaaaaaatgttactcatcatataatgaaataaaccacagagttagaaataaatccactgatgacacttcttaccaggggagagtttttcatctgtttgttaataatagaaactcctaactcagaattgcatggtagtttaggagtattttttaaaaaaacaaacaaccctcagtttttaaaactgagtactgtttgcttgttatatttaacacttggttattttgtaaataatatccaaattttccatgaaagcttcattttattatttaaacccatatcccagtgacatgcaattgttcttcaactgagacatttgataatactgtgacaagcagagttcttttctcatagtaagttcaatataaatatttactggatgaatggataggtagaaggataaatgaaagcagcagagtgtgataaagtaattttgattttgttataaatgtgatattcatatataaatgtatgaaaaactgtaatcaagagaattacaaatggtctacttttgtttcatttgtggaagatgccagaattatttagacaactgcctgtttctcctttgtgtccagaggcctcaaccaccttacttaaaaagaactgaaatactgttcttccagttctttgctgtataaaatgagcacaggtatagggtttcactactttacttcttttgtgtaatttcctacataattattttgaaatctcagaaatatagttctgattatctgaaaccaatggaagtctgtccttaataccacataatgaggcacagtagaaccagttgatttttggctgggcacagtgctcacgcctataatcccagcactttgggaggccgaggtgggcagatcacctgaggtcagaagtttgagatcagactggccaacatggtgaaaccccgtctctactaaaaatacaaaaaatttagctgggcatgttggtgcacacctgtaatcccagctacttgggaatctgagacatgagaatcacttgaacctgggaggcagaggttgcagtgagccgagatggtgccactgcagtccagcctgggcaccatctcggctcatgaactcctctgtggagcaagactccatctcaatttttaaaaaaaaattgatttttaactcctaactttatacatgaccaatatgtgacttaataaacctatttaaaattattgactttattactgtattttacattattaactttattacagactttatttgttaaaatcctctattcaaaataactttagaaaaaatgttctgctttggtggttgtccatccagtgaaatttggaatgagtcattaatacactgcataaccatgttccttccctatctccatcttaatgtagttccttgtcttcaatgggcaccattgacactgcatcttttatcactcatctgcccagcccgcccggcccacaaaataaatggaaagatttcttcctaactcctgccctttctaaggaaggaagtataggcacatggtctaaagaggactggacctcaagttaaattatgaccaggcccagtcacccacagatcatatgatctctgggtaaacatagcctactctaaatgactaagttaaaggtagcaggaagatacagaggatactaaaaatgcttgacaaattttaaatttctgttgaatatttaaaaaatattttatttatatctctttcctagagggtacagtctatgtcctagtcatctatgtatttttcttttcacctagcacaatatcagttgctagtagaatgaattaagaaactgctccatacattttttttctaattttctgctttatctaatgtttctttaatgcagataaactgcttatatgataattaaatgtctctttcctgttttaaatgtatatattttatatagatatattgtacacgataatacatatatgatcatactttcaattgaaggaaagtaaggaaatagtttaaaactgacttatgaatcaatacatactacaatttcaacatcttatgagaattgtgtgttacactacataatatttaaatacaaattatatttttctgctattctaaacaccatggttagcaaaaactgaaatgaatgttttgttttcctatgacacaactgggtgaaaagcagaactacacataagtttcataataaaacttcacaccacatcatacttgtctgttgtcaggttttgttacattcctcctagctcaaccaagactccctggggctggcaaacagggcagagtttgagtcaaaaccatgcacttcctttcagctttagagatgcacttacaattttgggggaaaccaaaaaacagctgttttttcctccagatgtggcaagtctgtcactttcagtgtttattccaactccaaactcagcacaaataaagacaattgcctgggaaaggaaggggatagaggctggagaatccaaaagttctattccactcaaaataaggtatcaatgttacaagactcccttgaaaagagacaaagttgggaagatggcagagcagaaagggagagaaggagagaagagagagagagcatggaagggagggtgggaaggaggaaaggaaggaacaatctagtgaggagtatgtgtcattaccaaagattaggattaacccaattctgtggtcctgggatccaacaaaaaaatgcacacctgacctaattgtattcatttgtcaagaggccggttccatatcggagacaggctgtattcatagatgattttaaggacagtttaaggcatagagttttactctaaaaactgagaaacaaaaaatccttcattgtagaatttgttttgttgccctagctctactatttatacttttccactttagctatgcacagaacatagctaattttcatctcaatttttcaattcttttgctatataattgttaacatttattgaccactaacctcattttaaggactgtgctaagtattttatatactttcctggggaggcacttattcctcacttttgatatttccctccacgtggggaacatccattagagtaactctcctggcctgtatctacttacccccaggagaggagaagagagtttggtgagtttgagatgaggaacaggatgtctgatgaagatctaatataactcatgttccttttaccttctccattgtctttcaggtattccaccctgcaaaaagcatgtattcatggtcagctctcagcaaggccagtagcagagtggtaaaggccttggccctccaaggctgggaaaagacaatgacaagtcaaatccagacctatgttggatgttggtctactaggtgactgtctcctggaaatgttatgcagctcagcaaggtgaaggtgagaatatctttgctttttgataaaacacagaatgcatagatttcacatctcactatgtgagcccccacaaaacaaaacctagaggagcatgtgagaaaaacgcatctctaggctagaaaacaaaaagagaaaaaaagaaaaatgtctgtgtaagaaagcaaaggaaagaagatgctcaaatccagcaaatcataccagccttgtcataggcacaaaaagaaagggattaacctaagttacaaggtgaattatcataaaatcagatgaacctttctgaaaaatagtcatgggacaaaggagggatatataacactagaggcttaaccctttcctgcagagaaaaaaaatgtaactgaaagaaatgccactcaaggcttgtgacattcaaagtgaagacaagataaggtcttatgtagtacatgacataggtgtagacactcactagactgaaaggagtacatgtttccaaagcagctttaattcacgtctctgctgagggtgattacaatagtaggaagcaggaggcaggtcttaggctatagcaagaggtacaggcaatagcctctgtggcacaggattgagatacctgttcataagacatctcggaggctgtgtcactagacacagccccactcttatcagcatggggtgccagaaacatgagactcaatgggaaaataaaattaagaggatttgaatatgttataaaggaaaggcactttgagtaaaacattaattggggctgccatcatgtgaagatttttaaacttttgtagaacccagaggtgttgcaaatgccgctctctgagaaagcagatagtatgcagaagtggctcttcctctgatattggaagtaaaagattaacttcttgatggctgacttctcccaactgagtttaagctcacaatttcctgactcctgaaaattggctgtgactgccaccaaactgtatccagaaacccaaccatttgtcacctcccctgctatcacattggtccaagccacaatcatgtcttctttagattattgcaacagtttcctaaatggtcttcctgctgctgcacttaccctttagagtctcttctcagcaaagcatccaggtgatcgtgttaattcaagtcagtaccttgttctgtaccctgcactggcttcctatctcatcagaatgaacactacatggtctgccctctgtatccccctgatctcatctcatcactcttcaccttgctcactgcactccagccacataggattccttgctgttttgtaaacactccaggaatactcctgcctcctgtttttgcatttgctatttcctccaccctaaaatgatcattcactacataggcacatggcttgctctttaacatcctctaggtttttattcaaaatagtctccctggctctcctagctaaaattctaatcccctctcaacatctcataactccattcttttatttttttctccttatcatgtcactaatatgttaaatatttaattatcttatttaaaaaaggtcttccccaaaagaatgcaattttgctccatgaaggcaagaatctttgtctgttttattagctgctagaatatctcctgatacatagtaggtattcagtaattatttgcagtatgaatgaatgaatgaatcctgatgagacaagcctggattatctccatccacctatcgttatgcagataactttgatatggtctttggactcaccaagtgatgtgatctggaaccataattttcctatagtatcaacattacaatctagggattagcttgctttccaaattgcatagtgactgagctagaactcttataattcagtatgttctaggaattctttggactttattttattaagtggggatcatgaaaacaaattctgagttcttgaaggaactgcatccattctaggaactgcgctactgagggaaacgaacaccacatctgccttctcttgaccaggactgagtagagtaagaaatgaggaaagacaagttttgtactttaatttttttaaactttaactcataaagtcaaaagaatttgatttagggctttaatctctttgggttttaacttatttagacttaacttgcaagggaatctaatattttttactgtaatttctccctggaatttgataatgggaagaagtctatattcagatgtgaagcatcttattattttatatattttatacataatatgtatacttttatattatatataattatatattttaacatatataatcatatatgttttatatgtataaaatacagacaggatcttgctttatattcatataattatatatttttaacatatataatcatattttatatatataaaatttttttttgccttttttaaattttattattattatactttaagttttagggtacatgtgcacaacgttcaggtttgttatatatgtatacatgtgccatgttggtgtgcttcacccattaactcgtcatttagcattaggtatatctcctaatgctaaccctccccgctccccctaccccacaacagtccctggtgtgtgatgttccccttcctgtgtccattttatatatatatatataatagagacagggtctcgctgtatgacccaggcttaagtgcacccaggctcatagctcactgcagcctccaacacctgagctgaagagatcctcctgcctcagtctcccaggcagctggaactacaggcacatgccagcaagcttggccaatttttaaattttttgtagagatgaagtctcaccatgttgcccaagttggtctcaaactcctggcctcggtgatccttccacctcagcctcccaaagtactaggattacaggcatgagccactgtgcctgccttgttatatacactattattggggtatttttatgctgtcattcagtgccattgtagaacttctgatgggctatatacatgttacatccatgaaaatccactgctcacacttcctgctgtgaggatcataatggactgatggcctctggacccatcatcatgttcacactgaggccacacttcctgctagctgcttctaccaatgactgaagatgactagggtactaaaacatgcccattccagtgaaatagaactcttccaacaaggaactttggctgaaggattttccatcagccaggtttaacctttctaagaactgctgcattgcagtctaagattcttcctacccagttgtccttccttccctctcttcttgcacagatgtcagacctacaccatgctttggaggcattccctgccttcacctgctccccctgccaataaatctcttccatttctcatcctttcttggcgtctgcttctcagtggacccaaagttacatactatataataggacaacttggctagacatcatctggggtgggaaattgattttcagccaggggtacaatgttgcctacaagttaatttatctaatgtattactctggcctatttcagagcattctggggtcagaagcaaccctggacagtaccaggaggacccacagagcatcacaattagtgttaggagaacagccttgtgaaagtaagaatagaattatcttgatagtctgctgatctcttctccacaagaggatagctacagcttgatggaatataggctaaatggtcaagcccaatgtattaaaagaattagagtctgggaaatgttcagagctaaaacttttcctctactccagtgtttctttccttgtggaaagagcttcactggcacaatactcctgtcggctctctgccaacctctctcactcctccccagggaaacactggtgactttccttattgataagtttggaagaagaattttacaatgctcatctcagctccttcctccttcattttaacataatatccacagagagtatgcactctattctgttcctctatatcatatattttacaggggcaggctcctgcacagggagaccagcaggtccagctggtctgtatgcctggggctatgtgtcagtaagcctattattcccacacatctaagccacatcctcaattctggcctttagcagcttatcaggtgatattgtgactgctatttattttttcctttttgccttataattgatacagaattccagtggagagaagatactatattccctttttacctagcagaaaacaggtgtatcaacttctacaagattatacagctaataaatgtcagaattaaaaatcaagaaaaagtccttagcctctctgctttttaatgttgccatttctttttatagctctgtttcatgataaaggcttttgatgcacatgaattagaaacatccaattactgaatacatcagtagttttgataaggtttggtcctgtaggcctgcatttatttatcctggatttttaaggtttttaaactattaaattgttacatttgaaatctctccctgagggtcttgacaaatatttcaaaacagattctttttttttttttctttttttctttttcattcagacagggtctcactctgtagcttagactggagtgcagcagtgtgaacacagctcactgcagccttgacctccctgggcccaggtgatcatcctgaaaagaggtgatttcatttcccaacttcagactatactataaagctacagtaaccaaaacagcatggtactggtacagaaacacatagaccaatggaacagaagagagaatccagaaataaagctgcacgcttatagccatctaatcttcaacaaagttgacaaaaataagcaatgaggaaaggactctctattcaataaattgtgctgagatagctggctagccatatgcagggcaatgaaactgagcccctacattttaccatatacagaaattaactcaagatggattaaaaatttaaatgtaagaccagaaactagaagaattctagaagaaaatcaaggaaatgccattctagacattggccttgggaaagaatttatgacgttctaaaaagcaattacagcaaaagcaaacattgacaagtgacacctaattaaactaaagagattctgcatagcaaaagaaactatcaacagagtaaacatacaacctacacgttgggagaaaacgtgaatattttcatatttgcaaagtatgcatccaatagaagtctgatatccagaatctatgtggaacttaaacaattgaacaagcaaaaaacaaataaccctaattaaaaataggcaaaagaagccaggcacagtagctcatgcctataatcccagcactttgggaggctgaggcaggagaattgcttgattccaggagtttgagaccagcctgggcaacatagtgagaccccgtctctataaaaaataaacaaagttagcgccaggcatggtgttgcatgcctgtagtcctagctacttgggaggctgaggtgggaggatcacttgagcctgggcgattgaggctgcagtgagccaagatcacgccgttgtattccaacctgggtgacagagtgagactctgtctcaaaaaaataaaaaaattaatggacaaaaaagacatgaacagaccacttcccaaaagaggacacagaagtggctgggaaacatgaaaagatgctccacatcgctatcctcagagaaatgcaaatcaaaactgcagtgatataccatctcacaccagtcataatggctattattaaaagtcaaaaaacaacagctgttggcaaggcttcagagaaaagggagcacttatacactgttgatgggaatgcgaattagttcagccactgtggaaagcagttggagatttttcaaagaacttaaaacaactattactcaacctagcaatcccattactaggtatatatccaaaagaaaataaattcttctaccaaaaatgcatatgtattctcatgttcatcacagcactattcacaatagcaaagacatggaatcaacctagatgctcatcagtggtggattggataaagaaaatgtggtacatataataacccatggaatactacacagccataaaaggatgaactcatgttctttgcagcaattagaggtcattatcctaagcaaattaacacaagaagagaaaaccaattaccacatgttctcacttataagtaggagctaaacattgggtacttatggacataaagacggcagcagtagactctgggaattaccagaggaaggagggagggaagggggcaagggttgaaaaactattaggtactatactccttacctggatgatgggattattcataccccaaacctcagcatcacataatatattcaggtacaaacctgtacatgtacctctaactcaaaaaagttgaaaataattaatttttaaaaagaggtgatttcaagaaaaatctaacttctaactacctttttttctcatgtgacctctagcatattacaaggaatggactaaaattgcatgtgccccaaatatttttatctttgcattggggccctagaaaggcctgaatatagagatgtcacatatattctacagaatataacagtcaagaaagtagaattaggctgggcacagtggctcacatctgtaatcccaacactttgggaggccgaggtgggtggatcatttgaggtcagtggttcaagaccagcctgggcaacatagtgaaaccctgtctctactaaaaatacaaaaaaattagccgggcgtggtggcatatgcctgtaatcccagctactcaggaggctgaggcaggataatcacttgaacccaggaggtggaggctgcagtgagctaagaatgaatatgaatatttacttcaaactctacctctctcagcttactggaaaggacatttagtagttagaagaaatgtattttaatggtgggaagagtttgctaagaatgattttcagagtattttgtagggatccaacagaagactatatgctaactttctcaaaagagagttaagcatcagtcttttttctcttgtaaaggaatcaagccacaagctgtatccctgtcaccagatctatggaattaaaacttctctttgtatttgaattcctggaatatttcttgatattgatttccaattcataattttatagatctgttttccctgtcactacatttctgcattttgtataaatacttaatttgtttcttgaatttgtaattaaacagtcaaccagcttaagtccaataagaatctactgaagctaaatatttgctgcttttagtaagcctaataatttccatctttgtcttacttgaataattagctaggaatatttgatgtttagtctgtgcatggaatattttgtaaggtattagaacccttgcaaataacaggaaaattcagcacaaaacactgtgacacacacctaagcactttgagtcagtggactcatcgggtgcaataaaaaacaacttttccatctctcctcattgcccattttgaggaggaagtggtcctttgcttgaaagaaatctagagcagatcactcctagataataaagtcatctgattacatctcgtcatatggatagtcctcttttgttaattaaaagttcagtaatttaagtgtgagagtcaaagttccaaatttcatttaaaatttctccccttaacaaagtgcttacagtggaagaggggtgcttagctggcttcatctctctttacctacctggtgaattacttctccttccttactcaccatcaggctgcctctggatcctccagggttaaaacagtgagaggaataagagggagcaggaaatgtcttacctgactggcaccaatgtaattttgcgttggttacctctagctgtggcaaatatttaaagccagctctttctggctgatgttccaagctgatgattcttctcacagttgctttcatgggtacattggaagcccccacatcaaacccccacatctatagtgtgggtgaaacattgaccttcaactggttacttatgtctccccgcacagccatggaaatcaggtgaacccatcctgtattggggtcacttgatctttctgagcggaactcacgtgaaatctgaaatggctccaggtctgctgagcccacacctaatccatgagaaacactcaccatctttgttcctgctttcagtgtaaattcagttagtactcaatgcaggctgggttctgcctttctctatatatttacctgcactttagaccagtatctgcagcctcttgtcttgcacatccaagtttatttatttaaactttatcaccgccaacagccatttttagtaccttccaaaaggctactccaagattatgagcatgactttctactcctcccatcaaaaaaaggtcaaatttcatacactttgtagactgtaaaattacaagaaaaataatatatatacatatacatatatagaaatcagtttctattactatgatttttttttcatacctctggaagtctaaaaggagctggaaagcctggcccagagctctccacccaatgaatgtaccaggtcaaggaagataatataaaacaaagtccactcttttctcccaaacaaatgtcccaaagaggtggtgataaatgagacagttttccttgctactcccaaaaagcttggtgatagctcagccttttcatggccaagacagttttgcccaggtgtctagttctgggaaacggtctctatcacataactgaaattccctctccaattgtaatttagtgttcatgagtttctccatcctgctggatcctcttgctctaatgggagggatctaaaaaatagatgtgccattatagatggttctactgagccggagctaggacccacttatgcatgtgtgctatgctgggtgtgaagtatgaagccatgaatctatagtgaggaaccaatgagggctctatgtaaagaatgagaggattgactaaatttagggtagacgttaaaggtggagaatggtgaagggtgcgggtaaacattgatatccttacctttttctgacagtaagcccttcacaagattttctcatgcatgaggttatttggcatggaccttgacagaattctcatttagcaaaattgttatgtacataggtattgagagttagacaacttggattttaatctcattctttcacttactagatatatggcctcggacaagttacctgagcaagttcatggagttgggagtaagggtgttcacttttgcttcttaaggcatctataaatcttttaaactctgattctgaagcccatgacatcctgattttccccaaagtgagcatgtagacaggattatgtgatcacgaagaaccccttgttctatttacattaagcctccattcacccagagttaccagctcaagagactgagtcggagagagtttacatcttctccaggccatatctagaggctttcaggcaataatgcaggtagctagatttgtgttttgaggtggaagaacggcagcctttggtgggtttcaagtgcaaatttcatcccagacccagggatagttatgtagctgggcatccaggaggctagaacttagtttaggaacaggaaagaatccctaaaatccttgtctgtagtagtttggggatttttactccagtattacaccattgatctgtcagctactcctctcatgtttgtttccaacacaagtcccactccccccagtttaggcagcacccttgagttagcactgacccatttgtgttgcaagaccccgtgcatgttgcttgtgtaaatgatgtttggctccttactcctgaaatagccaactggcagtcacctgaaatagggagtcaaagctgaatttctaaaatggaataatgcatgacataatgctatttactgggaatgagtgatttgtttccctgtctaaactttaatttctttaacagtgcttccaagatatttggttttaaaaaaaacacataagaatactaaacaaaaaattggaactacacaaaagtgggaaagaatgccaatgtgaaagccagaaataaagaaatgttggagcattccaagatggccaaataggaacagctcctgtctgcagctcccagcaggatcgacgcagaagatgggtgatttctgcatttccaactgaggtacctggtgcatctcactgggactggttgaacagtgggtgcagcccacagagggcgagcagaaacagggtggggcataacctcacctgggaagcacaaggggtcaggggatttccctttcctagccaagggaagccatgacagactacctgggaaaatgggacactcccgctcaaatacagtgctgttcccaaggtcttagcaaccagcagacaaggtgattctcttccgtgcctggctcggcggctcccacacccacagagccttgctcactgctagctcagcagtctgagattgatctgcgagacagcagcctggctcggggaggggcatccaccattgctgaggcttgagtaggtaaaaaagcggtgggaaactcgaactgagcggagcccacaacagcttaacaaggcctactgcctctagacttcacctctgtgggcagggcatagctgaacataaggcaacggacaacttctgcagacttaaacgtccctgtctcatagctctgaagagagcagtggttctcccagcatagcgtttgagctctgagaacggacagactgcctcctcaagtggatccctaacctccgtgtaacctaactgggagacacctcccagtagtggccaacagacacctcatataggtggctgcctctctgggacgaagcttccagaggaaggaccagacagcaatgtatgctgttctgcagcctctgctggtgacacccaggcaaatagggtctggagtggaactccagcaaactccaacagacctgcagctgagggacttgactgttaggaggaaaactaacaaacagaaaggaatagtatcaacatcaacaaaaaggtcatctacaccaaaaccccatctgtaggtcaccaacatcaaagaccaaaggtagataaaaccacaaagatggggagaaaccagagcagaaaagctgaaaattctaaaactcacagtgccttttctcctccaaaggaacacagctcctagccagcaacggaacaaagctgggcagagaatgactttgatgagtggacagaagtaggcttcagaaggtcggtaataacagacttctccgaggtaaaggaggatgttcaaacccatctcgaggaagctaaaaaccttgaaaaaagattagacaaatggctaactagaataaacagcagagagaagaccttaaatgacctgatggagctgaaaaccatggtacgagaacttcgtgatgcatgcacaagcttcaatagccaatgtgatcaagtggaagaaagggtatcagttactgaagatcaaattaatgaaataaagtgagaaaacaagattagagaaaaaagagtaaaaagaaatgaacaaagcctccaagaaatatgggactatgtgaaaagaccacatctatgtctgattggtgtacttgaaagtgacggggagaatggagccaagttggaaaacactcttcaggatattatccaggagaacttccccaacctagcaaggcaggccaacattcaaattcaggaaatacagaaaccactataaagatactcctcaagaagagcaactccaaggcacataattgtcagattcaccaaagttgaaatgaaggaaaaaatgttaagtgcagccagagagaaaggttgggttacccacaaagggaagcccatcagactaacagcggatctctcagcagaaactctaaaagccagaagagaatgggggccaatattcaacattcttaaagaaaagaattttcaacccagaatttcatatccagccaaactaagcttcataagtgaaggagaaataagatcctttacagaaaaatgctgagagattttgtcaccactgagcctgccttacaagagctcctgaaggaagcactaaacatggaaaggaacaaccggtaccagccactgcaaaaacatgccaaattgtgaagatcatcaatgctaggaataaactgcatcaaataatgagcaaaataaccagctaacatcataatgacaggatgaaattcacacataacatattaaccttaaatgtaaatgggctaaatgctccaattaaaagacacatactggcaaactagataaagagtcaagacccatcagtgtgctgtattcaggagacccatcttatgtgcagagacatacgtaggctcaaaataaagggaaggaggaagatctaccaagcaaatggaaaaaaaaaagcaggggttgcaatcctagtctctgataaaacagactttaaaccatcaaagatcaaaagagacaaagaaggccattaaataatggtaaagggattaattcaacaagaagagctaactgtcctaaatatatatgcaaccaatacaggagcacccaaattcataaagcaagtccttagagacctacaaagagacttagactcccacacaataataatgggagacaaacaccccactgtcaacattagacagatcaacaaaacagaaagttaacaagcatatccagaaattgaactcagctctgcaccaagcggaccttatagtcatctaccgaactctccaccccaaatcaacagaatatacattcttctcagcatcaatcacacttattccaaaattgaccacatatttggaagtaaagcactcctcagcaaatgtaaaagaacagaaattataacaaactgtctctcagaccacagtgcaatcaaattagaactcaggactaagaaaatgactaaaaaccacacaactacatggaaactgaacaacttgctcctgagtgactactgggtaaataacgaaatgaaggcaaaaataaagatgttttttgaaaccagtgagaacaaagacacaacataccagaatctctgggacacactcaaagcagtgtgtagagggaaatatatagcactaaatgcccacaagagacagcaggagatatctaaaaacaacaccctaacatcacaattaaaagaactagagaagcaagagcaaacacattcaaaagctagcagaaggcaagaaataactaagatcagagcagaactgaaagagatagagacacaaaaaaaccttcaaaaagtcaatgaatctaggggctggttttttgaaaaagatcaacaaaatagataggatagaccgctagcaagactaataaagaagaaaagagaagaatcaaatagatgcaataaaaaatgataaaggggatatcaccaccaatcccacagaaatacaaactaccatcagagaatgctataaacacctctacgcaaataaactagaaaatctagaagaattggataaattcctggacacatacaccctcccaagactaaaccaggaagaagttgaatctctgaatagaccaataacaggctctgaaattgaggcaataattaatagcctaccaaccaaaaaaagtccaggaccagatggattcacaaccgaattctaccagaggtacaaggaagagctggtaccattccttttgaaactattccaatcaatagaaaaagagggaatcctccctaattcattttatgaggccaacatcatcttgataccaaagcgtggcacagacacaacaaaaaaagtaattttagaccaatatccctgatgaacatcaatgcaaaaatcttcaataaaatactggcaaaccgaatccagcagcacatcaaaaggcttatccaccatgatcaagttggcttcatccctgggatgcaaggctggttcaatatacgcaaatcaataaacgtactccatcacataaacagaaccaaggagaaaaaccacgtgattatctcaatagatgcagaaaaggccttcgacaaaattcaacagcccttcatgctaaaaactttcaataaactaggtattgatggaacgtatttcaaaataataagagctatttatgacaaacccataaccaatatcatactgaatgggcaaaaactggaagcattccctttgaaaactggcacaagacagggatgccctctctcaccactcctattcaacatagcgttggaagttctggccagggcaatcagtcaagggaaagaaataaagggtattcaattaggaaatgaggaagtcaaattgtacctgtttgcagatgacatgattgtatatttagaaaaccccatcgtctcagcccaaaatctccttaagctgataagcaacttcagcaaagtctcaggatacaaaatcaatgtgcaaacatcacaagcattcctatacaccattaaaagacaaacagagagccaaatcatgagtgaactcccattcacaattgctacaaagagaataaaatacctagcaatccaacttacaagggacgtgaaggacctcttcaaggagaactacaaaccactgctcaaggaaataaaagaggacacaagcaaatggaagaatattccatgttcatggataggaagactcaatatcatgaaaatggccataatgcccaaagtaatttatagattcaatgccatctccatcaagctaccaatgacgttcttcacagaattggaaaaaattactttaaagttcatatggaaccaaaaaagagctcttattgccaagacaatcctaagccaaaagaacaaagctggaggcatcacactacctgacttcaaactatactacaagccaacagtaaccaaaacagcatggtactggtaccaaaacagagacatagaccaatggaacagaacagaggcttcagaaataataccacacatctacaaccatctgatctttgacaaacctgacaaaaacaagcaatagggaaaggatttctctatttcataaatggtgctgggaaaactggctagccatatatagaaagctgaaactggatccctcccttacaccttatacaaaaattaattcaagatggattaaagacttaactgttagacctaaaaccataaaaaccctagaagaaaacctaggcaataccattcaggacataggcatgggcaaggacttcatgactaaaacaccaaaagcaatggcagcaaaagccaaaattgacaaatgagatctaattaaactcaagagcttctgcacagcaaaagaaactaccatcagagtaacagtcaacctacagaatgggagaaaatttttacaatctacctatctgacaaagggctaatatccagaatctacaaagaactcaaacaaatttacaagaaaaaaacatcaaaaagtgggtaaaggatatgaacagacacttctgcaaagaagacatctatgcagccaacagacacatgaaaaaatgctcatcatcactggtcatcagagaaatgcaaatcaaaaccacaatgagataccatctcatgctagttagtatggcagtcattaaaaagtcaggaaacagcagatgctggagaggatgtggagaaataatgcttttacaccgttggtgggagtgtaaattagttcaaccattgtagaagacagtgtggtgattcctcaaggatctagaactagaattaccatttgacccagcaatcccattactgggtatatacctcaaggattgtaaataatgctactgtaaagacacatgcacacgtatgtttattgtggcactattcacaatagcaaagacttggaaccaacccaaatgtccatcaatgatagactggattaagaaaatgtggcacatatacaccatggaatactatgcagccataaaaaaggatgagttcatgtcctttgcagggacgtgaatgaagctggaaaccattctcagcaaactgtcataaggatagaaaatcaaacagtgcgtgttctcacccataggtgggaattgaacaatgagatcacttggacacagggtggggaacatcacacattggggcctgttgggggttgggggctgggggagggatagcattaggagaattacctaatgtaaatgatgagttgatgagtgcagcaaaccaacatggcacatgtatacctatgtatcaaacctgcacgttgtgaacatgtaccctagaaattaaagtataataaaaaaaagaaacgttatgcattttttcaacccataagtagacccatataagttacctttaactgtaatatgaatgataactagaagctaacattgtgctatggaaaaataattccaagtaagttaaaatgttgtattatggtcaatatatgtggtaaatctcttatttaaaacacaaggaaagacatctacaattttgattaacagaaaatcagatattctcatccccattaaatcaatattgaacacttatttactgaatattgggttaaaggagtacgaaatgtttttttgcatgggaacctacatgtcttggtctagacatgatggaaatgtaaagctgaaccccccccttccctgtgccaacaatttatcaagcttattagtatcttttactgcagagatgtagatctctctatttggacttcccactgttgtagtgctccttccaaatgctcacactctgacctgtgtgaacatatggaggggatatgaggggttctatttcctaactatatcagttgagatgctttggtcaccagtaacagaaaaacttaagaaaattgctttaataataagaaacatttattacttcacataagaagaagtccagatgagaatgtaggttggccaaggaatgtcatcatgaatcaggttctttccattcttcagctctgccattctcattattaacattagctttgtccaacatctcttcctatgtgcctcttttccatgaagaggtaaacctttcctagaagtccccaggcagacttgcctttatgtctcactgaccacaactgcgtaaggcaacctattcattcctacagcatttactggtgaggggagcaattggcttagggaagcacaggctaagggcctgagggtgaattacaaggcaagatacagtgttctgttagaaaagaggaagaaagagaatgaattttgagtaaacaacaccaatgtctactcacccactggagatttacatgccaaaattaactttctgctgccttacccaggaccacatactgaatagtcacagattttgctgaaagaaagccgatctttgtgcctttctcttattaggaccacacattagggctggcgctctctctctctctctctctctctctctctctctctctctctcatttttcctcctctattactttctttgacagtaaccccggaatgtctttgcttttccattcagcagacctctcttccttcttcccaccatggctcttaggcatgttaggtgacatgccttgaattacaatgaagttatgttagacctgtaaagaaagctctaacaacttccaagtcaaaagggctagaaccttatggaagcattttcaaaagtatatccataaaattctaggaacttcccacaaagaagaagcttctgtggtcaggtaaatttgggcagcgttgtagatgctttccttctcttgcagattgtagatatacaaggctctcagaagtcttcagttacgtaaactaactcagaatgagtcctggaatcaaaatgcctgtgttcaaatctgggctctgccactttctagctatgtaagctctttaaagctctgttttctcatttgagataagggaattctatggtactatttaattggggttgctatgagaagtgggtgagataattcatctgaggctttcaacacagtgttttgtacattcactcatttaacaattattgtgtcaagggcccaggtctcaaggagcctacattctaatggaggagggaggaggaagacaataagcaagtaaataaatagaataatttcagataatgacaagtaatatgagaaaagtaaaacataatgatattataaagcacaactaggatgagaagggctgttttagataggaggattaggaaaggcatttctgaggaaggcattttatctgagacctgagatatgaggagactggaattatttatccatttattcagtcattcattcaaaaaatgtttattgagtacttactgtataccacaaattgttttaggcaccagggataaagcaagaaacaaaattctacaagaatatctgccctggccgggcacagtgactcatgcctgtaatcccagcactttgggaggcccaggcgggcggatcacaaggtcaggaggttgagaccatcctggctaacacggtgaaaccccgtctctactaaaaatacaaaaaattagcagggtgtggtggcgggcgcctgtagtcccagctacttgggacgctgaggcaggagaatggcgtgaaaccaggaggtggagcttgcagtgagcagagattgcaccactgcactccagcctggggagcaaagcgagactccatctaaaaaaaaaatatatatatatatatatatatagagagagagagagagagagagactgtgtcagagttgagacggggtcgatgaggctgaccccagcgggtagaagggacgaggaggagcgagcagcggaaggtcctggtgtgtccggaattggtgggttcttggtctcactgacttcaagaatgaagccgcggaccctcgcggtgagtgttacagctgttaaggtggcgcgtctggagtttgttccttctgatgttcagatgatgtgttcagagtttcttccttgtggcgggttcgtggtctcactggctcaggagtgaagctgcagaccttcgcagtgagtgttacagctcttaaggcagcatgtctggagttgttccttcctcccggtgggctcatggtctcgctgggctcaggagtgaagctgcagatcttcgcagtgagtgttacagctcataaaagcagcgtggacctaaagagtgagcagtagcaagatttattgcaaagaccaaaagaacaaaccttccacagtgtggaaggggacccgagcgggttgccactgctggctggggcagcctgcttttattctcttatctggccccacccacatcctgctgattggtagagccaagtggcctgttttaacagggcgctgattggtgcctttacaatccctgagctagatacaaaggttctccacctccccatcagattagttagatacagagtatggacacacaggttctccgaggccccagagcagctagatacagagtgtcgattggtgcactcacaaaccctgagctagacacagggtgctgattggtatgtttacaatccctgagctagatataaagactctccaaggccccgccagactcaggaacccagctggcttcacccagtgaatcccacactggggctgcaggtggaactgcctgccagtcccagtgccgtgcgcccacactcctcagcccttgggtggtcaatgggactgggcgccctggagcagggggcggcactcatcggggaggctccagctgcccaggaacccacggagtgggtgggaggctcaggcatggcgggctgcaggtcctgagccctgcccctcgggaagccagctaaggttgggtgagaaattgagcgtagcgccggtgggctggcactgctgggggacccagagtacaccctctgcagccactggcctgggtgccaagtccctcactgcccagggccggcagggccggccggctgctccgagtgcaggcccaccaagcccatgcccacctggaactccagctggcccgcaagcgctgcacgcagccccggttcccgctcgcgcctctccctccactgcaagctgagggagccggctctggccttgcccagcccagaaaggggctcccacagtgcagtggtgggctgaagggctcctcaagtgccgctaaagtgggagcccaggcagaggaggcgcctagagcgagcgagaactgtgaggactgccagcacactgtcacctctcactggggtgtccgccatataaagtcgtttgaggtaaccattgcctaattgtgagtctgtgagagaagatgtgaagtatggcctcgtcccggtcatctgggcgtgcgggtctcgggttttgatcttgcgtttgtgtagttttaacttctagccatggcaaacgatcccaggggagcacagactggaccccgctacgatctctcttggagtggatcagactgatgatcaccaacaaccaactcattcccagataaggaagaagagagtgttacccatttcaatgtggtttcaaccccacttctacatcttaaagacattgtattttttcagcagtgatgcccctgttcattagtcccactgatgttttcattcctcatctcatctttttcttagcagcattcaatgaatccttcattctagaaacactctgtttttttggttttcatgagaccattctcaccttgttttgtcctgtgactcttttgaaaactaacaaacaaacaaaaaaaaccctgtttttctttttaagttctggtaaaaaacacaaaatgaaaatttgctatcttaaccgtgttgaatgtgcagttagtaaagtacattcacattgtggtgcaagccatcaccaccatccatcactagaactcttttcatcttgcagatctgaaactctacccattaaataacttcccatcttcccatccccacaactcctagcaaccaacattctactttctctatcagtttgactactctaggtacctcatatgagtagaatcatacagcatgtatccttctctgcctggcttatttcatttgtatgatgtcctcaaggttcatccatgttgtagcatgcatcagaacttcctccccttttaaagctggataatatttcatagtatgtttagaccacattctgtttatccattcatccatcagtgaacacttgtgctccttccaactttgggctgttgggtgtcctgctactgttgctcccagtgctcaatcttgtttactccctcctaatcgagtgtacagcgttggacactgtgcaggatgatgccacttcatcttggatgctaatctgccatgttgacttctgattaaccccaggcccaggaatgcctcaagatttctactttatgtactgttgcttgtgtaagccaagacaaccttgatgttatcataaacatgtacttacctaagtgctgtcctttggcaaattatgggctatgagacacagcattcttacctttccctgaggggtcaatttcagtgatcctacacattccttctgaagcacgtatgctctttctatacggtgtgtaagctctgggtctggggagtaacagtacagagatctacctgtcttgttgccacatgtttctaaattttccagtaagtcaccttctactgacaaagaaaaaaatatatatatatataatacacacacacatatatatacacacatatatatacacatatatatatacacacacatatatatacacacacacacacacacacatatatatatatatacacacacacatatatatatatatcttccctaatgcacctcaaattctaccatggaaaaacaaaaaggaaaaggaaaatacatagtatcccaagtggttaagtgctatggggaaaaagaaagtagaaaaggagaaagaatatttaacttcacatttttaaatagggatgcagggattcctcacagaaaagttgacacataagcaaagaaagacctgaaggaggtgaggaaataagccatgcagaaatctaggagaagagaattctaggcagaaacagcaagtgcaatggccctggggcaagagcatgcttgatttattcaagaaagagtaagaagggtgaatgcctaaaggagggtaagtaaaaggaagggtagtaagaagtgaagtgccagaagatgtaaggataagcaaaggtctggaataaaattcctccaggcagatagaacagcagctgcaaaggccttgagtcagaaccagggcgtggttggcctattcaagcaacagaaaaatggcttatagagctggagtagactgagcaaggggaagcatacagatgaagtctgagaactttctgggtcagatcacataaagccttattataggccagtataaagaatgtatattttttctaaatacattaaaaaataattggctataattgcgattattgtgattcatgagacactcgtatgctaaacagatggagaaatgctgtttcaaagccaattttaatgaacactcttgtccatccttcctatcaatctatccccatgtgttgtggattatgtcacagtaggactatagtaagaacttgataatgggtctccaaactctgttttttctttcttaagttacagttggatttctgaggtcactcagaaatcactccccttctcaaaaatttgcattgtttttttacttgtaggatcaagtccatacccagcagctatcaaggatttcaaggtctctccctacatctccctccacctactcctgttagaggtgttgaaattgtgctgtaaatgtacgtgcatggttatagctccaccatttagttcatgccattccctcagcccaaattcttctttccctcattctttgcctgttgaaagttttcttttcattcaaaaccagcagagcgcctattcctttctgaagtttttcctgatattcccaggcagagtcactcactcattccttcaaccatgtacctgttggtgtcacttgtacctcagtttggtgtgtttgtcagattgcatttctgcagacttagttgttgtcacatctcttactttcattagattgtaagcacattaaaggcaagggctgtattttcatcatatcttctagaagtactacctaacacaattgccagtacagagtagatgctcaataagttgctgattaaattaaatttcagaggaagtaatgtgataaacacctttaggtaaagcactgagacacaaaaagaagaaaatggctatgctgtcagggagtatataaatcaataatggtagcttccatttattgagtcctaactatggtattggcactgttcatatagtatgccatttaacactcatagcaacccagtgaagtaggtgttataacccctagtttaagaatgaaattaagtaacttaaacaagttcatagaataaataataggattcaaacttaggtccctccagtttccaagcctgtgctctttcactatacatgatgtcagctgggatctagccaggaaaaaaaaagacaaaaaaaaaaaacaggtctttcagaggaagggaaattgtttcaacagaggattcattatgcagatgaatggagcagtgaagaagtcgaaaagggaatggtgaagtaattcacagattagcaaaattgggaagttattctccttgttgcaagggtgacactgggaggagcagttgtcaccagagcccagaagccttggctgtcagacagaaggagcaaaaaccaccaggagaactgcctgagtagatctgggagaaagaagggagaggctgtccagagggacaccgccagattccaaaggacacagggaacagagtgagaaatggcctggcttctctcttcccgtttccagtcctcctgtggtgcctctcattgctttaacctatcaagaatgaaagaacaagacagcctgtgagaggcagcaacagagaagagcagggaaagggtgggaatggatctgagactagtgtcagcaagctacctttctacctgaaatgaaaagaatataaattaaatagcatttaatttggggctatgatgaatggcaaagatattaagtaaattcaaaagaaagagattgagaggccgaggcaggcggatcacgaggtcaggagatcgagaccatcctggccaacatagtggaaccctgtctctactaaaaatacaaaaaatttgctcagaatggtggcatgcacctgtaatcccagctactaaggaggctgaggcaggagaatggcttgaatctggaaagcagaggtttcagtgagccgagatcgtgccactgcactccagcctggtgacagagcaagactccatctaaaaaaaaaagaaagaaagaaagaaagagagattgatgatggctgcagtagcaagggagagattcttcggtgggggaaagttataccaattcctaaaaaaaggtagactttctatgggtgaaaagaagagggtaggtaggtattccacacagaaaaaactacctaagtattttcccttgggcaaagaatactattcattctttttaaatgtctttttatttggggataaaatagaatacctatcatatatgtgtacagtataaagaataatgaaaaacaaacacccacatgcatactaccctggctcagggagtaacacatcatttatctgcatttcctttttttttttgagacagagtctcacttggtcgcccaggctggagtacaatggcacgatctcggctcactgcagcctctgcctcccgggttcaagtgattctcctgccttagcctcccaagtagctgggattacagacatgcgccaccatgcccagctaatttttgtatttttagtagagatggtgtttcaccatgttggccaggctgctctcgaattcctggcctcaagtagtcctccagcctcggcctcccaaagtgccaggattaccggtgtgagccaccacacctggtccaatttacttttaaatgtatcaaaaaataagtggattagtagacagagggatgttaacagatggatagatatgtggtaataaaatgttactaaatggataggcatgaataataaaatgctaatggtagaatccaggtggcaagattgtaaattttttcaactgtcttgtctgtttgaaaattttctcaataaaatactgagaagagaaatcccatgcctgaaagattctaatttaattggttgtatttgggtctggacaccagattttttttttctgaccactgcaatgaagtcttgcagtggagggaagagattgggctcagcaccccaaaactgttcaagagctctctggatagattccaatgtgcagccaggtttcagggctactgcactgcaatatgccatgggatcacagagctagcatgagcagaacagagaatgggataagtaggaggggcgaataaaagaggggcaaatttctgtctgcctatcagagatgaggcctccaggctagacttttatgtgctttctgtgtcggaatgggtggatcaactgcatgtgaaagaggcaagagaggtttagcaattcagcaggggttactgagaacataggcttagctagggttctctgaagttcttaaaaggggactcaaaagtttatatttaatgtaaacttttaatttggcaatgactcatccttcacaatgtttcctatagctttaaataaggtcatctattcattcagaataatacttttagcatgttatctcccttgagaagtataacatccactttcaacatatatatagagagagatgcatttctatgttttatttttttaattcatttttatggagatgaagaaagagacctgttcagaaagaagggaagcagaaagaaaatgttatacctttggcagccttggactcctgggtcagcagaaaaggaacaagagaaagctaggcctggatagtataggaacaagcaatcgagcctagtgtcaggcttggaaatttgacaattccaaagaagcatgtataacccaattaatcagtaaagagagtaattgatgcttcccagaaaatggatttctatactgcctaatctgcagtaacatgaatatcttctataacccttcccctatctccagttattttaaaatcttactctgagggttactgtagtgtataaggttgtttgtctctacagtaaatgattccagtccctttaaccatgtgaaaggagacaggaacactagcatctgatcctcgtcatgggaccccagcctgtcttactacaattgccagctggagacagaacagggcctaagggcaaaggcagaatggcatatgaggaagagaaccaaaggtcagtcacagaacagctgtgtcacaggtgagatctaaaggaaaactgcgggactaaaagcaggaagcaaacagaagttcaggagccagaggaatgcaagaacatatcaggaagggggatatgagacaggaatagaatcagggctttggccatgaatgaggccagggtacctcaagctcattcttgttgagagcttgccctgtggtgcttgggtaagcaggaaagagttaggcagtgcaggttgggacagtctttaaaaaaaaaaaaaaacaaaacaaaaaacaaaaaaaacactccaaaccatattatcacatagcctattaactgacacttattttgatgcctctgagccatccggaagaggctaaatgtggtatcttccacttaaaaagtaagggaaatatgtgaaatattttagaaaagcctgcgaatagcgtggtttaaaaacaaaaagagaggtccttttacctctgaagggataacttttagctgccaggaaaattcacatatgtataatcccacattgcctccataaatctaggtagctatggcagtgattcagaaaagtgaaggcatcgctttttgactttgaatgtctccatttctcccagctggtatgacagtgattttcctttctcccttattttggagttgtaaggtatattaacattcttacatagctttgatccaatatagaatttttttaaaaaactttcaaagaaggactttatggactggcattagccacgtgcttatttgctgtgtccagggggctgtgacactgtaattggctctgctggggataatcactccctaggagacagatgaggttagggtaggagggtatgagccctgaagccatgtggagtagtaaaggagtcccccaagtgaaaagaggctgccgttttcagaagcaggggtgtgggaaaaatactgagcagatatctaccacaacctaacaggtgcacacaagtaatgagtgaaatagcagggactttaacttatgtttgcctatttttaaacgtctacttttctcctaatgttgtgtctcctttgctggggaaaacttttataattgctgcctaactcctgttgtttcactctgtctgccctctctcctaccctgcttttacccccagcctggagtccacttgggtggaaatgcagcatataatgagcccaaagttaatcatctgcaggtttgccctgataagtcacagtatgtttgctgcactccttccaagagtcaacagcagctttggggatgtgctgagagtggcttatggcattctgagcgctggcccagatgggaggcagtgtgttggggagtctatctgaacgccaccatctggaatgcctctgttgccctgaaggcactcgtctgcatctccagtgtacacggcttagagatgccaaaaattgagccaagttcactggatgtacaaatggcctgacgtcaatggaatttattcataatttaggcctcatgtgtgatgtactgtctgaactcaatgatctgtcaaaacaatcagggaagaagaggagaaggaagaagaaaaggtggaggaaaacaaagaggaagaagagaagtgaaaggtagaagaaacagcagagaagaagaagaggaaattaggacagggccaggagctgtagcagcacaggttcagcttttggctcctggggccaatggtccctgtaagtttgttgaaagcatcagtgccaaataaaacatggccttttaaagcaccgaattacgtgagcgcagagctgttaaaatcagtgtagcaaaaatccagctgggtttggccgtcgccacaaagtacaaaatgatgatcatttgtactgccaagacccagggttctccagatgtggtggactgagcagagttacttggatatacattcagttgcccattctttaaaataaggaatctgctattaagaagtgtatgaggctgggagcagtggctcacgcctgtaatcctaacactttgggaagccgagatgggtggatcacttgaggtcaggagtttgaaaccaacctggccaacatggtgaaaccccatctctactaaaaagtacaaaaaaaaaaaaaaaaattagctgggcctgttggcgtgtgcctgtaatcccagctacttgggaggctgaggcaggagaattgtttgaacctgggaggcagaggttgcagtgagccaagatggcgccactatactccagcgtggtgatagagtgagactccatctcaaaaaaaaagaaaaggaagaaatgtatgaagtggatatttgctaggggttttttggttgttgttgttgttgttttgtttttgcttgccctgtgtccagaggtggattatattgtgaaactaacaaagcttaagcttcagaagccttcagttgcatgggaggtgctgggagttatggagtattctaggtggggagagaaagccaggttacaatcaacaagcatttatatattagcatttctggtaaattgtctaaatcgatctaagaagtaaagaacctaaatctccaagagttcaataatttgttgggatttattttctcattctaaataaaaccaacttttatacctgtttttaaatttgtattttttttaattaaagaagaccccaaaattataaggctttcagttccataaaatctgaatctatccctatctgcctcaattgcctttcttctgcagatcaaggtaaccaaaccttgatttgcctttgtggaaaggttttctgctcactcagcagtagacacatgatccgggttcaggaataagtacgtgatccaatttgggctaataagaatcaggggcaaagtttttgctggaccttctactggggttattaagttgaaagttactaagttgtgtggaaatgcaagtgtggcattgccaacaaccatcttgcttctataagaggaaactgcctgcgaataaaattcgtatagaagaaagcagagctaagggatataaagaagccaagtcttaataatgtgactttgcaaccctgaaacaatactgaagttactacagataatcctgggcttttcagacagacaaatcaataaaaacctctttttttcttaagctattttgagttgggttctggcagttgcaactgagtcttgactaatacaggtccttatatgctggaaaaataattattattatttcaactcagaaggtgatttttttagtgtatttgcctctgaatagttataacatagataacacttactgatcactcttattaagggttttactcatattagcccatctgaatctcaaaagcaacctcatgaagtatgtactggtattatcatatccattttactaaagaggaaatcgaaggcacatagaagttaattaacttgtctaattggtgtacactttggttttagaccttggattcctaactgttacactgtgctgcttgagccaactgattcagatgatactaacatccttttaagaaaagctctcataccaagacttcattagaggttgccagcctatgaattatatgcccttagaacaaatgcaagggtgggcaatgtagttcactttcgtcagaattggctgagaatgacagctaccaagaatatagtagactattcaccagccaatatatgtacaccagccaatgggacccaacatcaaatccctcttttcttatttgggaactttctaaaggttctctcatatgtgtttccctttgtcctctttccctcgattcatcccataactacatagctccctggtgtcagtatgacactttctatctgtagttcatctgtcattcctatcactcctgatgtgttgccactggtattaaggggaatcccaacacgattccacttcagtagtttccatgctgaagatgggagaatgaactgagggctcctaatcttcttaaacaacccccattatgcctccaaactggataatctctcagtttcctacaattccctcttcttgtgcctcttccagacttactcccttgtgttcttctctgcctatggctccagtctgacaggcttaagatctaaagcctggatcccactatcaccaaaccaagtatgtatttcagacttgaagccataatgatctgatcctttcatttttcagcaaatgtttattaagcacttactaggcactggagatttagggatgagtatgacacagttttatctttctagaagctctcaaagtactggactcaggggaagttaagatgggacacaaggccaacagttcctatgaatggagtgacttagaatcacagcagaggcagatgccaacttattgaagagaataaggaggctttttaatgcaggacagaagatggagtggcaggaaaagtggtcttgaggtgtagcaggaattatccagcagagaatagcattccaagcagatggaacagcatgttcaaggctaggaaggcaataaaggataagacgtgtttgagaaatagcaagaattttagtatggcaggagcagacagtctttgagggagagtggtgagagatgattctaaaatagtaggtagaagccagcttgtgaaatccttgtgtgttgtgttctggaatctgaaaatcatccattattcatagacagccaatgagatctcaagcgagagtgacatgattacatttgtattgcagacagatcacatgagcaacagtgtcgctctcttgtagtaatcagatctttctttccagccctgctctttggatttgaggttcttcagatcaacccaatttgtggcctccattatcactgcagacagatttttctctccctttcctcagcacacaatcagtgtaccttgaagttccctcttacccatccatcagcctgggaatggcatttcctcagagaagcaattctcaaacacatgtgggtgtgtagcttgtaggaaggatatatcatgttcacttggagggcattttcaaagtacatgtgcctttgcatcacatgcccctcttgctctgaaattctaataggccaaaggtttgaggggggtttctaggggaactagcattttgtaaaagtttattcttttaaagaatagagatctagacatggaaactctaatcaagacatactcctctcaattccttagttgttattaaaatactacaaaatctgcatttatattataatagtgacacctcttatagttggtcgaaagttggccccaaaaaggatgtgtccatgtcctaatacttggcccctgttaatgttaccttatttgaaaaaaaaaaaaaaaaaaaaaagtctttgcagctgtaattaagttaaggatcttgaaatgagatcatccagatggattttaaatccaattccaagtatccttataacagacagaagagtaaaagacaaagacaaagaggaaaggccatatgaagatgaaggtagagatcgccgttacgtagctagaagccaaagaatgcctggagacatcagaagctggacaaggcaaggaagcattctcttctagaaccttcagaaggatcatggccctgccaataccttgatttcagacttctgtcctctagaatagtaaaaggatagatttatgttgttttaagtcacgaggtttgtagcaatttgttatggcatctctagaatgtcaacataccttctttctaataggttatacctaatagttacttttaagagaggagacagtttccaaagtgttgtataatagcatgatgtaaatgaatttaggccaggtaacttaatccctttgagctggtttcttcacctaatcccatcctcacagaatgttgagatgattcaatgagataaaataaaactacccagcagacaactggcaaaaaccaggctctaaaggaagtatctatttgagaataggactcaacacatgttgcatagacactctggtgaaacaagctctcccaggagaaggccgggataattaacatgcaatgtctgggcctctatcagaatctcttttacatgtaaccacttacacccatctggtatcagctcttgtttgtcaccaactaaccactgccctctcctgcaaccttctctacttcctgtttacgtagatagctgcttcctgactgacgaaactgaatggtttcagccagactgcttttcccctggacccatgccaagaataccttctttactttgcatttctcattctgctttcttcttatagtagaagccatcatattaatgagttgcaaactgctgccctgagctattcccagctaatcagttagtcttcttcctagctattggattaaatcagatgaacacaagtaataacacgtcaggtatcatgtctgtatcaagaaatttgtccatcctttcttgctccagccctgccaagctactgacaatgatgcttttttcatttaactggacaagtcataatgctgacactctcaagcccagccctgtcctgtttatgtgaagcaattctaaccaaggccagcaggacaacaaacaatagggttaaacttgaccagaactccagattgggagactatttttttttaattatactttaagctctggggtacatgtgcagaacatgcaagtttgttacaaaggtatacacttgccatggtggcttgctgcacccatcaacccgtgatctacattaggtatttctcctaatgctatccctcccctagcccccaaccccccaacaggccccggtgtgtgatgttcacctccctgtgcccatgtgttctcattgttcaactcccacttatgagcgacaacatgtggctgtttaaatgatctaatttgtggttctcaatatgagtgaatatgcaaatcatgttagaggctctttcaaacaaacagataaacaaatatttggaacatgagttaggcatggatttttttgttaactcctaagtgggataataacttttccctcaactccaggcttatcatccttaacacaatagttaaggatgtgaacactggagcctgactgtctgggttcaaattctggctttgccacccataagctgtgtggccttgagcatgtcacctaacctcctttgcctcaatttcctcatctgtaaaacagttgtaataatacctacatttgccagggaattgtgaggaataaataagttaacttgtgaagagcacttaggctatataaatgctattattactattacttttattgttgttttataacttctctggagagacaggaagttggtcagagggtgagatgcctgaattagtgatttcaagatgaggcaggttgaggtgatgtgagggttcacagtatgacagtggaagtggatagcagaggtagaatggaggaaagatcatcattggaaggagaaaattagtagtagtattaaagcatgttctttatgagactggagtacctgagttcagatcctgccttcactacttaatggcagcgcaaccatgagcagattacttaattgttttctcatctgtaccactacagaaccatgagcagatttctcctctgtaaaatgaagataataatagtgacctatcttatagggctttcatggaatcaaataagttagtaaataacatactgatttcttagaacagtgactggcatttagcaagtgttagctcaggatacaaaagcaatgtgcaaaatcacaagcattcttatacaccaataacagacaaacagagagccaaatcatgagtgaactgccatttacagttgcttcaaagagaataaaatacctaggaatccaacttacaagggatgtgaaggacctcttcaaggagaactacaaaacactgctcaacgaaataaaagaggacacaaagaaatggaagaacattccatgctcacggataggaagaatcaatatcatgaaaatggccatactgcgcaaggtaatttatagattcaatgccatccccatcaagctaccaatgactttcttcacagaattggaaaaaactactttaaagttcacgtggaaccaaaacagagcctgcattgccaagacaatcctaagccaaaagaacaaagctggaggcatcatgctatctgacttcaaactatactacaaggctacagtaaacaaaacagcatgtcactggaaccaaaacagagatatagatcaatggaacagaacagagccctcagaaataataccacacatctacaaccatctgatctttgacaaacctgacaaaaacaagaaatggggaaaggattccctatttaatacatggtgctgggaaaactggctagccatatgtagaaagctaaaactgaatcccttacttacaccttatacaaaaattaattcaagatggattaaagacttaaatgttagacctaaaaccataaaaaccctagaagaaaacctaggcaataccattcaggacataggcatgtgcaaggacttcatgactaaaacatcaaaagcaatggcaacaaaagccaaaattgacaaatgggatctaattaaactaaagagcttctgcacagcaaaagaaactaccatcagagagaacaggcaacctacagaatgggagaaaatttttacaatctacccatctgacaaagggctaatatccagaatctacaaagaatttaaacaaatttacaagaaaaaaacaaatatacaagaaaaaatcaaacaaccccatcaaaaagtgggcaaaggatatgaacagacacttctcaaaagaagacatttatgcaggcaacagacacatgaaaaaatgctcatcatcactggccatcagagaaatacaaatcaaaaccacaatgagataccatctcacaccagttagaatggtgatcattaaaaagtcaggaaacaacaggtgctggagaggaggtggagaaataggagcacttttacattgctggtgggactgtaaactagttcaaccattgtggaagacagtgtggtgattcctcaaggatctagaactagaaataccatttgacccagcaatcccattactgggtatatacccaaaggattataaatcatgctgctataaagacacatgcacacgtatgtttattgcggcactattcacaatagcaaagacttggaaccaacccaaatgtccaacaatgatagactggatgaagaaaatgtggcacatatacaccatggaatactatgcagccataaaaaaggatgagttcatgtcctttgtagggacatggaggaagctggaaaccatcattctgagcaaattatcccaaggacagaaaaccaaacaccgcatgttctaactcgtaggtgggaattgaagaatgagaacacatggacacagggtggggaacatcacacactgtggcctgaggtggggtgggggtaggggggagggatagcattaggagatatacctaatgtaaatgacgagttaatggatgcagcacaccaacatggcacatgtatacatatgtaacaaacctgcacattgtgcatatgtaccctagaatttaaagtattataattaaactataataaatttttttaaaatttaaaaaaagaaatttattctgctggataccctaaatcatctcccccaggttcaaagttccacagatctctagggcaggggtaaaattccaccagtctctttgctaaagcaaagcaagagttcatctccagttcccaacaagtttctcatctcaatctgagatcaccgcagcctgggacttcattgtccatatcactatcagcattttggtcaaagcccttcaacaggtctctaggaagtgctaaagtttccaacattttcctttcttcttctgagccctccaaactgttccaacctctgcctgttacccagttccaaagtcacttctgcattttttagtatccttatagcagcaccccactatagtggtaccaatttactgtataagtccattctcacattgctgcaaagataatacccaagactcggtaatttataaaggaaagaagtttaattgactcacagttctgcatggctaaggaggcctcaggaaacttataattattgtggaaggggaagcaaacatgtctttcttgacatggtggcaggggaaagaagtgctgaccaaagcaggaaaagccccttataaaaccatcagatctcatgaaaactcacaatcaggagatgggggtaaccacccccatcattcaattacctcccactgggtctctcccacaacacatggggattatgggaactaccattcaagatgagatttgggtgagaacacagccaaaccatatcaccatacgtcttctgaaatctaggcaggggcatccaagcctcaactcttgcactatgtgcacctgcaggcttaacaccgtgtgaaagctaccaaggcttatggcttgcaccttctgaagcagcagcccaagtacctgggtaactttgagccacatctggagctggagtggctgggatgtagggagcagtgtgccctgggcctgacccacaaaatcatttttccctcctaggcctctggacctgtgataagagaggctgttgtgaaggtctgtaaaatatcttcagggtctttttcccattgtcttggctactagtacttccctctctttgagatatgcaaatttctgcagcctcctttaattccttccctgaaaatgggtgtttcttttctaccacatggccaggctgtgaattttccaaacttttatactctgcttctcttttaaatataagttccagtttcaggttatttctttgttcatgcatatgaacatagaattttagaggcagccagggcaattcttgaatgttttgctgcttagaaatttcttctgcccgatactctaaatcatatatctcaaattcaaagttccacagatgtctagagcaggggcacactaccgccaggctctttgctaatgcataacaaaagtgacctttgctccagttcccaataagttccagactttgctgaagttgcttatcagcttaaggagattttgggctgacacgatggggttttctggatatacaatcatgtcatctgcaaacaagtacaatttgacttcctcttttcctaattgaataccctttatttctttctcctgcctgattgccctggccagaacttccaatagtatattgaataggagtggtgagagaggccatccctgtcttgtgccagttttcaaagggaatgcttccagtttttgcccattcaatatgatattggctgtgggtttgtcataaatagctcttattattttgagatatgtcccatcaatacctaatttattgagagtttttagcatgaaggcctgttgaattttgtcaaaggccttttctgcatctattgagataatcatgtggtttttgtctttggttctgtttatatgctggattatgtttattgatttgcatacattgagccagccttacatcccagggacgaagcccccttgatcatggtggataagctttttgatgtgctgctggattcggtttgccagtattttattgaggatatttgcatcgatgtccatcagggatattgatctaaaattctctttttttgttgtgtctctgccaggcttggtatcaggatgatgctggcctcataaaatgagttagggaggattctctttttctgttgattggaatagtttcagaaggaatggtaccagctcctccttgtacctctggtagaattcggctgtgaatccatctggtcctggactttttttggttggtaggctattaattattgcctcagtttcggctcctgttattggtctattcagagattcaacttcttcctggtttagtcttcagagggtgtatgtgtccaggattttatccatttcttctagattttctagtttatttgcgtagaggtgtttatagtattctctgatggtagtttgtatttccatgggattggtggtaatatcccctttatcattttttattgtgtctgtttgattcttctctcttttcttctttattagtcttgctatcagtctatcagttttgttgatcttttcaaaaaaccagctcctggattcattgattttttgaagggttttttgtgtctctatctccttcagttctgctctgatcttagttatttcttgccttctgctagcttttgaatgtgtttgctcttgcttctctagttcttttaattgtgatgttagggtgtcaattttagatctttcttgctttctcttgcaggcatttagtgctatatatttccctctacacactgctttaaatgtgtcccagagtttctggtatgttgtgtctctgttctcactgttttcaaagaacatctttatttctgccttcatttcgttatgtactcagtagtcgttcaggagcaggttgttcagtttccatgtagttgagcagttttcagtgaatttcttaatcctgagttcttgtttgattgcactgtggtctgagagacagtttcttaaaatttctgtttttttacatttgctgaggagtgctttacttccaaatatgtggtcaattttgaaataagtgcgatgtggtgccgagaagaatatatcttctgttaatttggtgtggagagttctgtagatgtctattaggtccacttgctgtggagctgagttcaattcctggatatccttgttaactttctgtttcgttgatctgtctaatattgacagtggggtgttaaattctcccattattattgtatgggagtctaagtctctttgtaggtctctaaggacttgctttctgaatctgggtgctcctgtattgggtgcatatatatttaggatagttagctcttcttgttgaattaatccctttaccattatgtaatggccttctttgtctcttttgatctttgttggcttaaagtctattttatcagagactagacttgcaaccctgctttttttttgttttccatttgcttggtagatcttcctccatccctttattttgagcctatgtgtgtctctgcatgtgagataggtctcctgaatacagcacactgatgggtcttgactctttatccaatttgccagtatgtgtcttttaattggagcatttaactcatttacatttaaggttaatattgttatgtgtgaatttgatcctgtcattatgatgttagctggttattttgctcgttagttgatgcagtttcttcctagcatcgatggtcttcacagtttggcatgtttttgcagtggctggtactgattgttcctttccatgtttaatgcttccttcaggaactcttataaggcaggcctggtgacgacaaaatctctctgcattgtctgtaaaggattttacttctccttcacttgtgaagcttagtttggctggatatgaaattctgggttgaaaattcttttgtttaagaatgttgaggcctggcacgatggctcatgcctgtaatcccagcactttgggaggccaaggcgggcagatcacggggtcaggagatcaagaccatcctggctaacatggtgaaacgccatctctactaaaaaatacaaaaaattagccgggcgtggtggtgggttcctgtagtcccagctacttggaaggctgaggcaggagaatggcgagaacctgggaggtggagcttgccatgatccgcgatctcgccagtacactcctgcctgggtgagagagcgagactccatctcaaaacaaaacaaaacaaaaaagaatgttgactattggcccccactctcttctggcttgtacagtttcttctgagagatctgctgttggagtatgatgggcttccctttgtgggtaacccgacctttctctcttgctgcccttaacattttttccttcatttcaactttggtgactctgataattatgtgtcttggagttgctcttctcaaggagtatctttgtggtggtctctgtatttcctgaatttgaatgttggcctgccttgctaggttggggaagttctcctggataatattctgaagagtgttttccaacttggttccattctccccgtcattttcaggtacaccaatcagatgtagatttggtcttttcacatagtcccatatttcttggaggctttgtttgtttctttttagtcttttttctataaacttgtcttcttgcttcatttcatttgatcttcaatcactcctttcctccacttgatcaaatcggctactgaagcttctgcatgcatcatgttctcctgccatagctttcagctccatcaggtcatttacggtcttctctatgctgtttattctagttggccatttgtctaatttttttcaaggtttttagcttctttgcaatgggtttgaacatcctcctttagcttggagaaggttgttattactgatcgtctgaagctttcttctctcaactcgtctaagtcattctccatccagctttgttccattgctggtgaggagctgtgttcctttggaggagaagaggtgctctgatttttagaattttcatcttttctgctctggtttctccccatctttgtggttttatctacctttggtctttaatgatggtgacatacagatggggttttggtacggatgtcctttctgtttgttagttttccttctaacagtcaggaccctcagctgcaggtctgttggagtttgctggaggtccactccaaatcctctttgtctgggtatcaccagtggaggcggcagaacagcaaatattgcagaacagcaaatgttgctgtctgatccttcctctggaagctttgtctcagagggctacctgcctgtatgaggtgtcagttggcccctactgggagttgtctccaagttaggctacttgggggtcagggacccacttgaggaggcagtctgtctgttctcagatctcaaactccatgctgggagaaccactactctcttcaaagctgtcagacagggatgtttaagtctgcagaagtttctgctgccttttgttcagctatgccccgcctccagagatggagtctacagaggctggcaggccttcttgagctgtggtgggctccacccagttcaagcttcctggctgctttgtttgcctactcaagcctcagcaatggcagacgcacctcctccagccttgctgccgccttgccgtttgatctcagactgctgtgctagcagtgagtgaggctccgtgggtgtgggaccccctgagccaggcgtgggatataatctctggtgtgccatttgctaagactgatggaaaagtgcagtgttatggtgggagtgccccgattttccaggtaccgtctgtcatggcttcccttggctaggaaagggaattccccaatcccttgcacttcccaggtgaggtaatgccccaccctgcttcacctcatgctctgtgggctgcactcactgtccgacaagccccagtggatgaacctggtacctcagttggaaatacggaaatcacccgtcttctgcgtcgctcatgctgggagctgcagactggagctgttcctatttggccatctttgaacctccccccagcagaagaaatttctaagcagcaaagcattcaataggaagcagagcataaaatttcagaaaatttgcagcctgatgacaatgtggtagaaaagaaaaaccaattttctgggaagaaactcaatctggctgcagaaatttgcacaagtaacaagaagccaaatgttaatcgcccagataatggggaaaatgtctccagggcatgtcagagacctttgcagcagcccctctcatcacaggcctggagtcctaggagggaaaaatggtgtcatgggccaggcctagggcccccctactctgtgcagcctcacaacatggtgccctgtgtctcagctgcttcagctccagttgtggcacacaggtgagattcagagatgaacaagaaagatgtccccgctacagtgaatcttgcagaagcaaagtcttatacaaaggactccagaaagcctttccaaagcagagtcagccaagacactaagagctatcactagccaagacactaagagctccctaagaggatataggctttgaaacagacaaataaatttgcttaaactctaaagttctttaagcctggcaactcagatcctccaggagtatgcttgattttgtaaggacacttttgcaaggaagataaagatttcatcttagatgccaactctgagtgactggtagttgtggtttagagtcctgagttaaggactgtgaaattccatctgagttcagcaggaaaagaagctatgatagattagcaatgtcagccacatgtatttaagggatgaatgagggcaaatgtggcacacattactatcccagccctaatgtagcctatcttatatttttcacagttgtttcacatacctgttgattttccaactgggcaacaagctccagggaaggcagcattatgcagtggaaggagcagtggaagctgagcaaaggagcttttctttctcttctgaaaggtagcatggtgggatggaatgagcacaaggtgcccagagttagaaaggtatggctttggagttgggcacttcactcttccacagattgcctgatcctagacatgttacagtcaattctcattctcttttatggtagttaatattctataaaatctgaagcattgacctagcatttgctatgagctgttgcaggggaaatacaaggttaggttcctgcaagcctctggtcacattttcatcaaccaatcaatacataacctagttttatgtgtgtttctgtttaaagacaccttatttaatatatattgttgatttattaacactgaactcacagcctacagggctataattcctacccgaaggaagcttatctaacacacgtttgttttctgtataaggcacatcacagccttcttgctctcaggaacaccagacagcactgcaacgctattattaggaatcattgtaaagagcaaaatcaccaaaaaacacaaaaatgagaaaaacgtggcactaaatagactgcaaaaagattcttgtttacagtataagagatgaaacaagaaggcaaggcattgctttgttcaatctcagctgggaatattcatgttagacaactcacatttgtcacggatctgcgcatatctgtaaatgaccacaaaagttccatgagcactgatttgggctacaaataaattttggcaagtaggcaaatccattcatgaataatgaggatgaactgtactaagtttctgtgagccttagtaatgatacctccctcacactacagagtaaatgaaagaaggcatgtaaaatgccttgcatggttacagttagttcttctttataccagatatttacattttcacttcctgtaccttatctgccatgctcaaatctgagagataagtagatatcaagaaacttccagccaaatgtctcatctttatcctgggagcatagaccaaaaactactcacactagctaaaatagaaaagaaggtgttttgaacagacacaagaggcaatctcttgaggcaccaaagtgcagggttcagcatagctaggccaccctgcgttgggactgaaacaggaagatcagaagaagtcccaactctcaggtggatgcatcctctgccatctgtgcctctctgagcatctgctagctacacttttctgattctctcagcagacaggtttcctctgctttctctggctttcttgcaccctcataattttgactctcatgtggttctgacttccatggcactgattccagcctgactctacatgtctggtgcacacctgtcgtttttgcctgtctagcaccattctcccagttctggtaacagaggaactgactggctccaggattggcctgtgagcgagacccagccattgactctctcctgagggtttgatttgtcttggttatcttctatcatttatgttgttattctttgtatcttttcactgccttgtggcttctgtttgctcagcgctcctgtttattcatggtttctgcttactcatgaagtctgatactggcttcactctgcacctttgagctttcattcactgaagaatttttccctgtgtctctccagttctgattattgaaataaaatatcttattgacatagttaattgccatgtgtttgggcagaattttcctgccaggacacccaacaggccaatgtccagcctattgatcagctgcccctaggtaagggcctatcatagcctaacaagcagtaagcagagttgtaggggttggaggtgtgcatatggtatcacatgtggccacttatgttgaaggatttacatcaagctagttatccagacccttctctttttctaatacctcatgtccaactgtgaagaaatcctattagctctaccctcagaatatatttagaatataatcacttctcattgctcccactgctacccctctgctccaagccactctgcctttcacttgcattactccagtagcttaagaagtcacctgcttctacccatagtctattcccaatatagcagctagagtgattattttaaagccttagtcatatcatgtcattcctttgtttcacatatactcctggctccccatttcactcaaagtaaaagccaaagccctagccccattacctccaactccatctttaccactttcccttgctcacttcactccggccacactggccttgctttttgtcagatatccaggtatgctcccaccatggggcctttgttccagctgccctatctgtctgaaaaaaatcttctttcagataatggcttgagtaactcccctaattcctttagatccttattcaaatttcaacttctccagaaggcttgcctgactaatttattttattctacaactgtggtggataaatgccgtacagtaaatactgtggaaataaacactatagttccccacagatccatgccttcttgccgctgctttaccttttgttcttgcacttaccattttctaacatattatatacattttgcttactacttattgcttatctctccctgctagaatataagctccacaaagatagagatctttgtctgctttgctccatgatataccaaggatttagaacagtgcctggcccaagtgctccataaatatttgttgaattgaattccttggtaggtagctataaacatagcagatacactaaggctttctctatgcaatataaaatgtctctcagagaaattcatggcactaaaagcatatataagaaaagaagaaaattatcggatcaataatctaagctcacattcaagaacctagaaaaagcgaataaaataaacacaaagcaaatgaaggaaatataacaaagggcagaaatcaatgaaagtgaaaaacaaagaatagagaaaattaacaaaactaagagctggttctttgaaaagatcggtaaaactgataaacctctagcaggactgagaaagaaaaaagataaaagacacaactttctaatatcaggaatgaaataggagataccattacagaccctgcagacatctaaaggataataaaggcatactaaaaacaactctatacacataaatttgacaacttagtttaaatagagcaattccttgaaaaatgcaaccacaagtcacccaatatgaaatagatcatttgaagagccctataggctgggtgctgtggctcatgcctgtaatctcagcactttgggaggctgaggcaggaggattacttgagcccaggagttcacggccagcctggacaaaaagtaagaccccatctctacaaaaaaatttttttaattagccaagcgtggtgatgtgtacctgtagtcccagctacttggtaggctgaggtgggaggaaggcctgagcctaggaggttgaactgcagtgagctgtgattgcaccaccacattccagcctgggcaacagagtgggacccttctcaaaaaaaaaaaaagaaagaaagaaagaaaagaaaagtactataactattaaagaaattcacttacttgtaagaacggctgaaataaaaaatagcccccaaatgctgctaaggatgaagaaaagacaaatcactcatacattgctggtggaaagtaaaatgggacagccactctgacagtttggcaatttctttaaaagctaaacatgtgactaccatacaacccagcaattgcacccctgggcatttatctcagacaaatgaagacttacattcacacaaaaatctgtacatgaatatttatagcagctttatttgtaataccaaaaactggaagcaatccagatatacttcaatgagtgaatagtttaaaaattgagtacatctatattgtggaatattactcaacaataaaaaagaacacattatcaatgcatgcaaaacctggatgaatcgccagagaattatgctgaatgaaaaaaaaggccaaaaatttacacattgtgtgattccatttttgaaacgttcttcagatgacaaaattatagaaacaaagaacatatgtggctaccagggtaacagagtaggtggggtgggggggtaggaggatggtgggtatgattataaaagggcagcatgggatatcctatgatgttagaaatgttctgtatcaatatcagtatgctggttgtggttctgtattataagtttgtaagatgtttaccattaggggtaattgggtaaaggatataaggtatctttttgtattacttcttacaactatgtataaatttaaaattatctaaaaattaaaagtttaattaaaaatctttctcccaacagactttatttaattatggttgtttcatgggagaagagaaacactttattaaatttaatcattgattataaaattgcacctaaatttcaaaaatgtgaaaaatgagaaagtacaacttagaaactaggaaatatattaagtatgcatatttatttgtataattatttgcatcagaaatagggaaccatttaggagaggaaaagacaacaaagtcttcctaacagtgattatctctaaatggtagaattatgggcatttttttttagcttatctgcattttcttattttctacagtaaacacatattactgacataattttaaagaaacatgatattttaaagatgttatttagaccaacccttaatccattgcttgaaaacctgcaatgaatcctcaaataattagtcacttcagtctttaataccatagaaaccaatagctcccaaagcagcccaggcagctctaattatttgaaatgagagctgttgaaagcaaaggtctgcactgcctgtgccattagggggtttaaggatatgggtttgatcccagcacaggtcaattaactctgcttattcgtagaggaaaatggtaaaggtacactgcctgcatggctcacaagggacagtcactactcaaacactgtccacaagagacacaaacacgtgaaagtaaacaggcatctcaaatccatttctgctaagcacctcttctcatactggacaatttctcatttcctcaagtggtcagcaggaaacaaacagattgtaaaatagttgttacaatcaatagccaggaataaaagcgtaaaaagcaatcccatctccaaatgaaattctaaatccccattaaatactttaatgtcaacctaacaagaactaaaaagaaaactctaaaaccataatgacacaataaaggtaatcagactggatgcatagccatctttgcttgtaactggaaagattacataaatgacataataacactttccatattaattcatagatttaatgcaatgataattaatggggcattaagagttttataaaccagaacttgacataataattgtaaaatgctcatgaatacagccaggcccggtggctcacacctgtaatcccagcactttgggaggccagtatgtgggcagatacttgagtccaggagtttgagaccagtctctaaaactacaaaaattagccgggctactcgggaggctgggatgggaggatcgcttgagcccaggaggcagaggcttcagtgagccctgatcatgcccctgcactccagcctgggtggcagagtgagaccctgtctcaaaaaaaaaaaaaatgctcatgaatagaagcatatttattcacgaaggaaaaaagataatgttgtagaactctttcatggatttaaaaatattgtactgttataaagcagcaataatcaaaactctttggcagttccattgaaattgaaggagctgttctgagccagtatggtaaaggaaaatgttaggaaagatgtctgggctaaagaccattgaggtctgggctaaagaccattgaggcaccattgggtgccttggaaaggttttttggtttgcaagacacagagacctccttcaaagtagctcatgtacaagggggaaaaaaagctataacaagctttctcaattcatctaatgacagtaacagagaacagctggacctcactgctctgaaactatgaaccatggcaactctcttcatatctcaagaattcttcatggtcctgctccctgagatctaagcactagctgggggacacctcatcccacctcccacagtctcaggccctgaagcagtggtagctctggaggatgttcatagcattggctcacttttgttctcccagtcttaaaggtagaagcggcttcctgaaatatgaatctttggttttcctagcttcctctttttgcttttccagctttccaacacctgtgtaagaaattccatgaattaaatcccttctgtttaaggtatctagagtgatttctaatttcctgattagaccctgattgatacattgttagcttcaacactgccctttatttcgtttagtttatagtttagtttagtttagtttagtttagtttagtttagtttagtttaatttagtttagtttagtttaggactagagtgcacaaatcataagctgttgtccttttgtgcaggtatccacctctgtgcccccaaaaacagcgcagggcatggctacattgagcagatagtctatcatcccacactttctgatgcagctgagactaggacagtccaggtggagttgggaatgggtgggtaggtaacatgagagtgaggagggttgacaattgaggaaggactacaaagagatttgagaagaattatacaaacacacaaaggagaaaatctgttaccagaaatccagaaagaaatcagtgacactagtcactgtggtaaccagctgactgcaaaagccaaaggcagatgcagttgtagttacaggaaatagattccaggaacaggaccaatacagactgggataggagagttaggcatttcaggcacattagcaggcaactatgtggagatgtatagatagtggactggacagtctcaggtaatgttataaagcagcaatgatcaaagctcagttcaacggatattgaaggagctgttttgagtcagcatggtgaaggaaaatgccacataaagagagcaaatgcaatctatctgagttttcccataatgtgacatattcccaaccttcctcttctttttattttctaaataattgtgatttatttagcagttaatatttttatgttcattttatttagtttctccttttctaagcaacgaagtgatatgtgttcattgtgatacatattaaaatattcatatacatgaaaagaaaaatattatgttcatctgtaatccaatcatccaaggttaactgctgttaaaattttcctttcatatattttatgcttgcatatcgtatgtatgtacctatgattatatgcctatattttaaaaccaaaattattccactgttcctgtttcataccatacagcttctgtgtacagaagctgtcagcttgacagagtaatgaaatcgccttctgcaggtgcaactgaggtgctactttataggtgataccctgcaaagatagagtgatatcttccaggatgcagcatacactctaaatctaccatcattatatgggcatgtgttctcaataggtacaacacataagtctgggaaccaaaagtaagaagtaggagtggccctgggccctgcttaccatcgctcacagtgatccacttgtgttatttgtgcttcttatccctgcaaccctgggatttgtgggtttggaggtcctggtgattgactggtacatctcttggtatcactttgcccaattttgatggtaaatggaggcaggagcagcagccatggcccaagaaggacatagtaaccagaaacccaccaggtaaaccacctggatggcagagctgagggtgagtgaagctaaaatgggttgtagaacaggaacacaatgagtatcagtggcaactttcagaccagaggtcagtaacaaggttctagtttaccccactaactttctgcttgtaagtttacccagaaaaaagagtctaaccaggatactggaggaactgttcctggaacttgtgcaaaattagtagatccaacacaaagcgttggctgtaatgaatgctgtggtttgccactcagatcccctggttggattaaggcagtcattcccacaactactaggaatattggccactgatagctctcatataatttatctcctgataattgttttcagctaaagagagtcaccttgcccaagttcataggtagcccatatctaataactagtccatgcccaggtattaaggcccagccttctttgcttcaaagcaggacaactccagagctccctgtaggattggccaagagacctttgttgtgaccctactgcagtttaacttcttctagccaatcctacttccttcactctttccctgatattgaatccctaggcactctccaataaactccctgcctgcaaatatccatctcagagtctatttctagggaactcaggatacaacagttatattcattttttgtgtttatattttaacagaagacactaacacttaaagctctaagcatttgactgtataaagatattaagaatccctgggtcatctttgtctgtaaagttcatttacctcaccagcagcatggacaccttgtttccttgcaacccagccctccttgcatgtgctaaataccaaaagcagccagcctttcagttctgcttccgtctagtggtcattttctatccccttctgctctctggttgtgttaagtcctgagcttttccatcccatccttccagaaagccactagtcccactagctgtcacttatctgcccgcacccattgtgaactaagttccggatgctgagggttgtgggaatctctccagtgttgccaggaggaagggaactaaaattcctctggctagcagtcaccatcttgtttctctatttctttcctttgcccttttctctcatgattagaaagttccttccttaacccactacatcttcaacttctgcttcccattgggatttcaacaccttttcacagcaaatccttgtattcgtgatttacaccttccaatttctgaattataaagctgtaaatggaaagtaagttctttgcttcctttcttttttgtttccttctctccttccttcagcaaatttcttgctcactaactctgagtcatctcttaagtaaaggtaggctatacctatgcttatttaaggttattaaatgtgatattaaggacacaactattccctctcaaaacttccccaggggccaaggttggcagcaaattggtggtctggctgagtcttgcagcacatcccacttgaccaacaacccagagctcatgcccttggatggagagtttattaacagcattctctttgtgtaggaacgcctccaagttttgtaaaggcccactatatttcgtgtagtaatgtggaatgttcctaaccagtagatttctatcaaccagccagtcttcaaagaccaactggacagggaggatggaaaccacaacctagccccctcccagtggctcctttaagacaccaggccctcctgtgcacttctaaatcaaaaaccacataaaattggatcttctctgtcctcacattgttgttgaccttagtcctaaagcctggacacacatctcaacttttccccaacctccaggtttctgatcttgcaattcgttctcccatttatagccttgcttctccctcagggaatagcttgggtcagtagagggaactacagctcctctttagcacattatctcaaagcagagtcttttcaaacagggaaatgtagagagaaggtagacaaagattgtgacttttatttattattgttttttaatttttttagagacaggagcttactctgttgcccagactggattgcagtggcacaatcatagctcactgcagccttgatctcctaggctcaagtgatcctgtctcagcctttctagcagctgggactacagatgtgtgccaccatgcacagtatttttttttttttttttttttttgtgcagatgggctctcactaccttgctcaggccagtctcgagctcctgtccttaagcagtccccccaccgtggcctccctgagtgctgggattacagccgtgagccaccatgccaaggtagattgtgacttttaatatgattatccttccacttgcagaaactttcttgtttttgctcatcgtttgtatttgactatcggcaccatttctctggctttgacttcaaacttttgttttgctcctgaatcaggattcagattcactcatactgggacaaatcagagaaagctgaaagaaggacgataaatagcaccatggaaccctggacaattctgcaattggaggcaccagatgtctctgaagatggaattgtggggtgtaggtagaaagaaaagattatttgaaagctttataatgactgtttagatccccagatcttcttcccaacatactattgtcaaatgactgctcttctgttacccaggaaaaagcctgaaggtttattctcatgaaaggctgggtcaaacgctctgggcagtatatgctagacacaactgaaaacaagggatttaaatggaagtctacagactgaatgatgaattccctcacccctctaggagtgaggggaaaacagagaactagaaatagcttttagaaataaaaatgtgatagcagaaattttaaaattgagtagaaaaattaaaagatggccaggcacgttggctcacgcctgtaatcccagcactttggggggccgaggtgggcggatcacgaagtcaagagatcgagaccatcctggccaacatggtgaaaccccgtttctactaaaaatacaaaaattagctgggtgtggtggtgcgcttgtgcacctgtagtcccagctactctggaggctaaggcaggagaatcacttgaacctgggaggcggaggttgcagtgagccgagatcacactactgcactccagcctggtgacagagtgagactccgtctcaaaaaaaagaaaaattaaaagataaagttaaaaaaatctcccagaagaaaaaggaaagataagaaacctagaaagtcagttcaggtgatccaacaactgaatcaggagttctagaaagaatgagcagggtgcagtcgcttatgcctggattcccagaactttgggaggccaaggcaagaggatcacttgaggccaggagtttgagactggtctgggcaacacagtgatacccccatctctacaaaaaatagaaataaaaaaagtagctgggtatgcacctgtagttcccactgcttggaaggctgatgtggaaggattgcttgagcccaggagttggaggcgacagtgagccatgattgctccactgtaccctagcctgggcaacagagcaagtcccccagttctatagatttaaaagtaaaatgtcaaaaacattctatggagaaaagatagtcttccaacaaatagtgctagagcaactggatgtctataggcaaaataatgaacttcaacctaaacttcacaccctatagaaaaactaactcaaaatggataacagatttaaaagtaaaatgtcaaaaaaattttttctcaagagtaagcagagaaagtggaggggagggaattactaaaataagatgcctgaagctgatatggccttttaaaaaagaatacacatggtagtttctcaaagctgaaggaaatgtgttttcagatttaaaaggcctattgtgttgacgttcattcctcatacagaatgaaaaaggacactattctaaggtgtatcatcatgaaacattaaaaaaagaagattccaaaactttccagagaggaggggaaaaaaccctttcatgtcccgtaggaaatattattaatgtaaaacatatcaacagcaacatggaaagttagaagacaaagaagtaatgcctttagaattctgagagaaaatttttccaacctagaagtctatactcagactttcactcaagtgcaatgctaaatttaaaacattttcagtcatgctaggtctcaaagaaatacacattccataaactttttctcaggaagctattgcaggataagctccaccaaacccagtgagtaaaccaaaaggaatataggagatctaaggaaacaggagatccaacaaaagggggatgtggaggaattcccaaaatgatgaaaagggggcatctcaaacagctggagagctgccctggacagcaacaacccagaccagagccggacaaggaaggtccccagggtgacatccagaagagaagtcagtgagaaaacaaaactgatagaaggagagatttataattctgttagagggctagggagaaattagtgattaattcatgaacattgatgttttaaaaagacaattattaactaaagggaaaacaaaatgattgtatcagatatgaagtgaacatcaagcagttcatctgtgaacaatattttcttaggcctaataatttaaacactgaaattgtgatgtaatgggaggatggggataggtgaagggtttatgttggagagggtggtagaagaaaactagatcctaaccaccatagtaggaaatcaagagatgatatctaaaactgaaaagtcaagagagaaaaagtacaagcaccagaagaaatggctaaagatgtgactacagttagctgtgtggagcaaaacacagaggtggggaagagtgagcaaaatactgtttctttttgttgttaaaagccttggatttgactttttatgctatgtgcttatatattttttcttttatttttattcctctagatatgatgcctgaagaattcttgtatgtttctattttttaaaagactaaagcaaaaaaaattttaaagaggaaataagagagaagggaaaattagggtagaaaaaaataagatgaagtcagaagtaatgcacatcatccagtacacatcattgctaaagataggctgaaaatttggttctgagctttttagcagcaagcataaagtgggaaatgtaattgtttacatggtttcacaatgtccaagagataaaaacaaaccacttactcaggagaaatatagctattcctggtactgcgatctgagagacagttctcccatctgttctcctaaagaggacacatgtgacgtagtgaaccacatcctccttaacttgccaacagtaaatgcaacaataagtttcatagagctgtttcttgtcatgtctctcaacataggtgaatggcaaaatgccaatgcagtgctcagtaaaagcaactctatgaagaaataaaaatctgtttagagaggcaataaagcatagtagtaagagtgttggcctgggttccaaatctatctgtcaaacaagttacttaactactttgtactcagtcttctcatcgataaaactggtctaataataccatctcatagaattttgtgagttatgcatgtgaagtacttagaacaatgcctggcatatataagcactaaaaaaatccgtttaaaaaatccacttttaaaaaaagtgaatcttacatgttaaggctactgtaaagaaaacagtgtgatattgatggagagatagacacatagatcagtgaaatataatagagaaatatatcacacaagtatagccaaccgattttcaacaatgttgcaaaaaaaaattcaatggagaaaagatagtcttccaataaatagtgctagagcaactggatgtcaataggcaaaataatgaacttcaacctaaacttcacaccctatagaaaaactaactcaaaatggataacagatttaaaagtaaaatgtcacactataaaatgttttcacaaaaacaaaggagaaaaccttcaggacttagggcaatgtgaagagttcctcaacatgatacccagaaatgatccttaagagaaaaattgataaattagacttcatcaaacttaaaacttttgctctgtaaaatatcacattaagagaatgaagacagacacaggctgaaagaaggtgtctgcaaaccaaaaaccactgcagaaaatatagtaaaccaaacatctgacaaaggaccataaagaacactcaaaaatcaacatcaaggaaacaatctaattagaaaataggtaaaagacatgaaaatatatttctgcaaagaggatatacaaatggcaaataagcaaataaaatatgttcaatgtcattagccattaggaagatgcaaattaaaaccatgatgagatatcattatatacctattaggatggctaaaataatgacaatactaaatgcctgtggagaaaactgactctctcatatatcgctggtggtagtgtaaaatggtatagccactctgcaaaatagtttggcaatttcttaaaaatctaaacttatacttaccacatgatctagcaatcacattcctaggcatttacccagagaaatgaaaatttatgttcacacaaaaacctatacaagaatacccattgtaagtttatttgtagtagcctaaattggaaacaacccaaatgtccttcaatgggtgaatggctaaacaaactgtggtgcatctatatcatggaatactactcagtaataaaaagaaacaatctattagtacatgcaacaatttgtatgagtctcaagaaaattatgctgagtgaaaaaaaaaagccaatctcaaaggttggatattgtatgatttcatttatctaacattcctaaaatgataaaattacagagatgaagaacagattagtggcactagggatgggttgggggcagtacaggtgtgaccatagagaggtagcatttgggatatttgtagtaataaaacagttctgtatcttgacttttactgttgttacatcaatttactacatgtgatgaaattgcatagaactacacacacacacgagtataggtaaaaactggtgaaatttgaataaattcaatggattgtaccaatataaatttcctgaatttaatattgtactatagttatgtaagatgttaccattgggggaaacaggataaagggtacacagaacgtccctgtactatgaatttcctatgaatctataataattttaaaataaaaagtttccaaaaaaatgtatcttataaaaaatgttataggctgggtgtaatggctcacacctgtaatcccagcactttgggaagccaaggcaggaagatcgcttgagcccaggaattcgagatcagcctgggcaacattggaagaactcatctctacaaaaagtaaaaagttagctgggtgtcgtgatgcatgccttagtcccagctaatagggaggctgaggtgtagggattgctcgagcccaggaaattgtggctgcagtgagctatgataatagcactactacactccagcctgggtgataaagccagaccctgtctcaaaaaaaaaaaaaaaaaaaaagttatataagctctataataaaacttcattaattagggattaaagtttacctttatttaacaaactgtgtattgtataaaattagaattaaacatttgggatgttggtagaaattatagaaattcatcaagttttgctcttgcaaaacttggtgaaggcaaaggggcccagggggactctaatgcagatgctcactgcttcaagaaggcaagtagcatattttcaagagttgttaaagaatagcacttattaccatagagtaattgtcttgcccttatcttttcaggttcaaaattttgatttcctagcatgaattcatattaactgagctcacaggactgatgtactatgtgtgacaatctcagccgcaatttcagatgtgcaagaaaaaaacaagtttctctctcttctttaaatcaacttattttgaactccacatccccatcatatgagctggagagaaattcagcctaagtaattccttgccaaggcactgttggtctggttactgtccagacacccactgttgtagtctgaagggcactctcaggagtagagactgtggcttttgtgatgcttcggactcgggaacttttcgtgctgaggatccagcctccatgggcactccaattgctctctgaggtcttgctatctttctgtgctctgacatctcaccctctccagcctcagggaaactcctagagaagcctctttcctctctaagatcatttctgtctcaaccctccaagaaatccagcaacatctagtcaatcagcttagcttttccagagctgaggaaaaccactaacttgaagctgcttctaatttttgtcctgccaacattcttattataagaaattataaagcctcactaccttgtgaaatgcagagaagaggaaaatatagagaggataaaataaaattaatattttaacaaattaccctaccaaactacaaaagccactttattaatttgcaataaatgtcacagcaatgggttacatccatatggctagcccactgtcccctctttaaagtagactttcatgatcctccttagactgttgcttggtgaacatgaagcagagccagaggctttagaatagttcaacatttaaagggatcaggttatcagagtctgatgtattaatcccacaatagggacattcacatcatggtaggggagctgggaacactggaagttcattggctatgatctcccaaatccatgtttactttgaaaatgtccttgtctgtggagctgcaatcgtcagaggcatttggctggctgggactctcttccccctgacagcacttggatgaacactgtcaacatttgtcctggaggccgtcttttttctatgcctcaacagctcaccaccccttccatcaaataacaggccaattctgctgaccaaatatccatgtctcttcaggatgattttgcatagatctgttccagtaaattacgtagggactctaaatttgaactctgaaagccatataatttctttgcttttgggttagccttcctgtacccatcacatcctgataatggcatatataaaacaaattatattagatcttcaatctaggattcaaaacaccagaagcatccaagcaaagaaactgtcttaagaaacttaaaaataattatacatcaaaaattacatcattatagtatttgaagactagttaattgcggcatgtatgataatagtgaaatctgctagatgcaaatgacacaacagtaatgtcactgaagtcagatttttaagtgttgagttcatgcactgtgctgtgtgctatatttagatacctaaactttagatatatcaataacctagttaggtcaagcaagtccatgacatttccccactctttgcatagaaataatggacgttctaatgaaagtatgatactccaaatttgcaaaaggcttaaatgcaatcttgatggtaattcctcacatatatatgtgtatatatacacacatgaagaattatcctattttcttccttacaggagaataagaaaatataattaataataataaattataaggttattttcccgtaaaaaaattaagaagtttcatcactcacgtcagcaaaaataacactccaactgatcccccaccctcaaactctaattagttatctggtattctctagaatccttttgcttgccttacctctcttttcaatgttttttttcttctctagttttcttaaaatgacaccttcacggtacccatcattactaataaggtcttcccaaactttgtcaattgattatgtccagtaaagccaagaaaaaataccaggcaactggctttatgagtgattttgtaataactttatctatcaagataaatagatttgctgtaacatgttagggcttctgaagtaattccactacaattttaggattccaaaggcagtatatgataaactgaagttttttaaagatcacttcaactgggttggggataaaacttagcataatatttctatcaagctgtgttttattttgatttgatttccttcagtatttttgaaacgtattaatgtttatgaaatacatgaatatatttactttgagctttgcttgcctctaactcatgcacaaggacgctttttcacgtaaacttgaaataataataataagctagttgtgttcagctctgtcctttgagatgaagagatgcagtcataaccccagagggcagtcatatggtctccattgcatctcagcatgattacaaataatgactgtgcccagaatttgttcagatgattgttttacccatgatatgttttgttaaatacagaataccagacattaggagaagatgaggctgagaagagttaacatctttcgttttgctgagataacaaagatcccatccaacatattacctactgaccccatcctcttgccattggagcagcagggcaaaatctgttcacattctcatggccccagacagagtgctggccttgagcacactgtgtgacactcatttgaccaagagaatccagtaggcacagggagagctgcctactattgccacgttgtatgaggtgacaagaatgtctcttttttttttttttttttgagatggagtctcactctgtcactcaggctggagtgcagtggcacgatctcggctcactgcaaactctgcctcccaggttcgcaccattctcctgcctcagcctcctaagtagctgggactacaggggcccgccaccatgcccggctaattttttgtatttttagtagagacagggtttcaacgtgttagccaggatggtctcgatctcctgaccttgtgatcctcctgccttggcctcccaaagtgctgggattacaggcatgagccaccacgcccggccaagaatgtctctttaggtttgatttccatttcaggaaatcacaaaatcagattgcatataatggggctcactccaagagagtagagtgagatttagaagcctttcaacctacttacaaaatgtgtacagttcccatttcactgcagatgaaacaataacaaatattgagcaaaggaggttaatccatatccagaagattttattaagttaaacaaaaaagtcatgcaggtcccaggcaataagttttatttaaaattaacagcaacctataagcacatttcatcaaaaaccataaatagatattgtaatgtatctttttcactactgactctatcatgagtctacctgaaaagaaaaaaaaaacagtaatagcaaccatcagggctttttaaaaaaatcagtatttttcataaaacaacatagcagatttcagactgatagagacctgtcataaggtgttgtctacagagcagtagcaaggcattattttctatactgaaatttagtttaacatttataacaagtatcttataaggaaatctctttattggatcttttaatcagtatagactgggtgtgagggaaagtaggtcaaaataaaatatttattacacagtcaagaaaagacaatatatttttaatttgtggcttaagatgcgaattaatttatttatgttcttggttacctatgttacatatgtctatccacatgatgtatgtgtctgtgtgatatgtatatccagtggggtgctgataaatcaactcttaaaaaaattaaatcctgatctattgcctttgctcatttccatactgtaaatatttccactatggccagtttcaagctgccaatatgatgtccctgaatatggagttgggaagagatatgcacacttgatacttgtacaccagtatctatacatatagacactactgtatctatacatgtgtatatatacatacatatgtatgtaaaagtatgtgtatacatgcacacacacacacacctgtgtgtacaggtgtgtatacaccacatacatataccaagaagtctgaagtagtgacagagactgaagccagtgtctaccttgaaatccacctctaccacctaccagtcatatgagcttgggcaaatcacttaacatttttgtgaacataataatagtacataataatagaacataataatagtaccacttactgcaatagtcctgtcccagttaaaaaataaataaatagaaaaaaagtagcacttagtaggtatgttataaatattaaattaatatctataaagtgctaacaacagtaacacataagagctatataaacatcagctattatttttgctatcattattattatctgtatatacaactctgtgtggtgtgtgtgtgtgtgtgtgtgttgtatatagtgatctctcaggatcttgcccaccagaagcagctgatgctcatctccatctcctcctctactctgggacctctgctccatctccctcctcctcccatttgcaggttcaagttagccaagtagggattaagttctgttccaatcagaatcacagtaaatctttagacctgaggcaggagctgtttttaagcaagcatcgtgtctgctctcttgcctgttttgcctccctccatcgatccctggagagctccagttaaggagtatggccctggatgtttggctacctatcctggtcccccacagagcctctgagctcctctggttgtctcttgtctattggtttctgactgatgatccctgttcagagtgtgtgtccaaatctctggaccttgaccccatgaccttgctttggcttggaatcctgaatgatgattttgctctggaccctccccagttcctatccattttttactgcactcccagttcccttcatctgtgatactttccctgaaatctataactataatgaccatttaacctggattttccagagagagtcaactttaaatattttgtccttttgactctaatgttttggcatgcaaagtatactgcccagaaaattgttaatgacgaaaagaaatacaaaattccctgaatttttaaattcacaaaatacagtcatttaaaaagatttctctaaccttctaatttccagtactgaagtgatgaccaattctaaaccagtgcccaggccctactactctaacaagctgcaccatattacatgatagaggtgatttggaaagaaggcaaagttcagaggaggacccagaaatctccttgccccagttttcaaattaatggcagatttctgccacacatccacacattccattcttatttttaaatattattttactgtatttgtgtatgcatattgtaatcatctgatatttgttgtcatttcattatgatggaaactaacaacttgagccactgttttccttcattccatctcttagtcaccatgtgtatattagcacctgtctatttaaagctttatcataaggcatgttctggtaagcacccctctaaattgaagagtgactaaatttttgcaaaatccaaaatgagtggtttgagctaggttactcccactctatatccaactgactcaatctctgctggcagcttttctgcttctccaggcattcaaaagcaaattctagaaagtagtccctctgaaaaaactttaaaatccccatttcctgggctggatgtggtggctgacacctctaattccagctctttgggaggtcaaggtgggcagattgtgaggtcaggagttcgagaccagcctggccaacatggtgaaaccctgtctctactaaaaatacgaaaattagccgggcatggtgacacacgcctgtaatcctagctacttgggaggctgaggcaggagaattgcttgaacccgagaggcagaggttgcagtgagccgagatcgtgccattgtactccagcctgggcaacagagcgagactctgtctggggggaaaaaaagccacatttccatgagagctctaaacaacaattatttctctaaagtaatgtcttctgctgaaagggaaaagcattctaacatcatttgctgtatatggttgtatgggtgctggtgttgttggggggcagggtggagaaaaaaggggagggtcacaatcaaaatcctcttttctttggaaactcctacataagcaaccctcttgcccctctctttttagaactgactcagtctagcggtttaaataaaaactctatctcttccacctaatcccctttactaaaaaaaaaaaaaagagagagagagagagagaaaggtagaattaggtaacaagagacttagagacaggaggcctgaattttaaaccagctcattcactaactctctttacaaaggtttttaacttgagcttgatggacccccccaaaggagtctagagacagaattcagggtgtgcatgaacttggaaggaaagtaaaattacattattttcactgacctctaatttaaatttagcatttccttcaggatctcccccaatctctgccctatctttcacctcttcctatgtgtaggcttagattggcacatggttcttcaattattaatgtagacaagaaatcataaagtattagcagtccttatgactttcaccagtggaaatcacagacttttttttattgctttcacatttgttgcagatatctaaaacatcacatatactaattacacttcaaaattatggtagttaatagatctactgctataccttataatttaatgtgttaattaaaaaaggaacaacatcatgtcctttgcagggacatagatggagctggaagccattatcctcagcaaactaacacaggaaaagaaaaccaaacaccgcatgttctcacttctaagtgggaactgaacaatgagaacacatggacacaggaaggggaacaacacatgctggggcctgtacgaggggaaaggaagggagagcatcaggataaatagctaatgcaagcaaggcttagtacctaggtgatgggttgataggtgcagccaaccaccatggcacacatttacctatgtaacaaacttgcacgtcctgcacgtgtatcctggtacttaaattaaattaaattttaaaaataaaataattaaacaatcacatgtatcactatatcccaaatttgtttttaatattttgataactgcatttcaatagaattggtttgctttggattcttatgtgttttattttttaaaacatctttattgagatacaagtcataaaattctccacttaaagtatacaatccactggctctaatcacagaattatgcaatcttcactataatctaagtttacagcattttttatcaccacagaaagaaacccattagctgttactctctactccactccatcttctggacttcaggacttcagttctttttaatgccaaataatattccattgtttggatttaccatattttgtttatcaatgttgatgcacgtttaggttgtttccccttcttagctattatgaataatgctgctatgaacattcatgtacaagtttttgggtggatatatgttttcaattctcttgggttattacctagaaatagaattgctgagtcatatggtaactctacattcaaacttttgaagaactgcgtgactgttttcctaagtgattacaccattttatgttactactggcagtggtttgagggtttcaatttctcaatatcctctccaacccctgtgattacgtatcttttttattgtagccatcttagtaagtataaagtggtatttcattgtagttttggtttatatttccctaatgattaatgatgttgaacatcttctatgggcttattggccatttgtatatctccttttagagaaatatctatttaataaataaaaccttagcccattctttaattgggttgtctttttattattgaactgtgagagttcttaatatattctggatataattccttaacagatgtatgatttgcaatttttttttccattctgtgggctgcctttccactttcctgatgatattatttgcaacacaaaagttattaatttaccggccgggcacggtagctcacgcctgtaatcccagcactttgagaggccaaggcgggcgggttgcttgagctcaggggtttgtgaccagcctgggcagcaaacatggcaaaaccttgtctccgcaaaaaatacgaaaattagccgggcttggtgttgtgcgcctgtggtcccagctactcaggagactgagttgggaggatcgcttgagcccaggaggtcgaggcagtgattgtgccactgcactccagcttggatgacagagcaagatcgtgtctcaaaaaagaaaaagttttattttgaggtagtacaagttattatattttcttttgttgcttgagcttttgatgtcatatttaagaagttactgcctatgtgagggttgtacaactctgtgaatatgccgaaaacttttggcataagaacactttaaatgagtgaactgtatagtacaataagtcctcaatgttgtcagtaggttcttggaaactatgactttaagcaaaaggacatataacagaaccaatatttttttctcatcattataataaaatgaagttgaactaaacagtcttattcaaggacctgatgtacattgtttcacttaaagttgcagtttccaaatacctggtaaggactttaagtgaggacttactgtatgtaaattaatttcaataaagctgttttttataaaagccaaaatggcagaaggacagagaaaaatgcagaccttggtgttattatattatttgactttctctgtacacaagccaataaatcctccttattgtttaaaaaaaaaaaagaaaccaaatcaagttttaaaattagatcatggtgatagttgcacaattctgtaaatatactaaaaccaccgaatcatgtatgctttacatgaatgaattttatggttatatgagttatatttcaataaagctatctttcaaaagacaaaagaagccactgccaaatccacagtcttaagatttactcctgttttcttaagaaactgtgtcttgctatgtagtccagactggatttgaactcctgggctcaaaggatcttctcccttcagcctccagagtagctggaactacaggcacataccactgcacctggctccattttgagttaatttttgaaatttggtgcaaggaaaggtccagcctcatgtactttattttatgctcttaaaaaccttattctggcagggcacagtggctcacgcttgtaatcccagcactttgggaggccaaggtgggtggattgcctaaactcaggagttcaaaaccagcctgggtaacagggtgaaaattagctgggtgtggtggcgggcacctataatcccagctactcgggaggctgaagcaggagaatcactcgaacctgggaggcggaggttacagtgagccgagatcttgccgcggcactccagcctgggagacagagctagactccgtctcaagaaagaaagaaaaaaatcattctgagaaggaatccattagcttcgccaacctgcaaagatggtttctggcacagaaaaagtgaagaactcttgctctagaattggaactatatatccttacttctctggaactcaggttcctgccctgtaaaatttaataggtaggattgaattgggaagtcccttccagccctgtggtgccatttattgtgcagacattgtaggtggagggcaatgactctttaataaaacacctcaggtttatgacaccagctgcttctgttatttttcttccaaaggaagccattgtctggcaatcatgggagggctcagccagagctttgtgaaatgttttagggggtagaggtgacacaataggggaaggaaacattttctattgaaaagcagtcaattgccttcaacaagttgccaacaaactggaaagttgttgggtttttttttccctgcttacagctgaatgccagcctttgaaaggtaaatagagtggtttagatgaatgggttacagatgcccccaaatgagggagaagattgtttgtacaaaattagcaggaggaaggatgccaagcatgtaactgagccatcatcattaacatcatgaaaggggaacaaaaatcaggaaaatacaatcaaatctttgcttttacaattgtaaaggtacttccacaattttataatttttattctgtaatatttacttttttaaaagttttaaccatggtatagagaatttttaatatagaattgttgggtctttttcaaaattaagtaattatagtttgcattttaaaaagctttagctattagctgtaatagctaaagctatatacaatagctgtagctataaactatttgatcattgtatgcgttataattttgcctggaatctaatcttacacagtggaaatactgataatgctcattataaaaaagcggcaatatatttgcaaaagctccattaaatatggactttcaaaaagactataggatatctgcagaaaggctagcatattcttccaaggtttataaactatccgccctgatgcatagaccatgctaaattctccatgtgtttgcaaattttccatgccatgtgttggtatcctttgaaattaacagtcctactcccttatcaagaaggaggggaactcctaagaggctcagacttgcacttttctctccctagtgcctctttctccagcttttctgccttccaaaaggtatcaagaatgtgggggaaaagagtgtgggcagtggggaagcagagtcaaggctccagagccctgccaattagttaaaggtcagcacggaagggactgtctgtgagaggacaagaaagctgaacttctcttgagccaactcaactggatggcagccaatctctatctctttcctgggccagagcagagctcccccagttctgtgtgcgcctgcacaaagacgaatatgttctgtacaaatagggtctagttttaccttaggtgaatagactgagcctgggggtcaagggacagaggacagagaggaccaaactggtgtttgctgcgtcagaagcatacaggcttatttggaaagactgaaactaaataaagacttcttattagcataggactagagttgtgaaatctggtcaaagggttttatgcaaggatgccttttatatattctcatgttaatgtggaaaagtagaaaaatacaacattttaattaggggagaaaactattgttatatataactttagaacatttttctttttttaaaaattatgctttaagttctagggtacatgttcacaacgtgcaggtttgttacatatgtatacatgtgctatgttggtgtactgcacccattaactcgtcatttacattagatatatctccgaatgctatccctccctcctccccccaccccacaacaggccctggtgtgtgatgttccccttcctgtgtccaagtgttaactttataacatttttcataccaggaacttttttttcttttacactagaacatgggagtgatactcccaagtttttgtcccccatcccaaaatgacaggggaagtaaaattcttttcacaaaaagtgtaccttttttaaaaagaacagtaagccagcattagatgacttattctaaaacaatcttcttctttaactgggcttttctgcagattttctaagaggaaaagttgatgtttaactccacatgttccttttttacgttcacaattttttttcacatttcctttctgataggagtagtattttattgttgtgtgaaaacccaattgcaatccatcaggtatcagcttttagtaaggtagtatgtgtagaactgaaaaacagacatttacctccagaaatgaagggcttttttgatctttctgcatttaggcgatctcagtttattttctggaagtgtgcgctgaaccataagcaatatcgtatctctcctgaggacgtaatgtttcctaaaagcctgtctagttcactgtgtttttcagagggaaaaatcctgaggactggatccaactgggaggagtgtcacccagggtggcctgagacaacgtagctggatggagagttccagttttcatcatcttagttgcaaaaagacaaggtcacccacagaaggcaactttgtgcatttgtgggccaggcaaatgcagagagcaagtagggaagctgaaaacaagggagtgaagatctgaacagagctgggtgggtagagagggtcaagggaaacatttcagttctgaagccacaaatggaaaccctgtgccagagtgccccttttatgttagtggtggagagaggttcctgctgcttagagtagtcacgcagcactacaggctaaatgctgcaaatctatagtgatatcaggtctatttttattctctcatttatatgtttcctttttatcttagccatataggatttttttatcctttatcttcctcctgtgggtcctgttgttgttttttttttctttgtttgtttgtttgagacggagtctcgctctgtcacccaggctggagtgcagtggcgcaatctcggctcactgcaagctccacctcccaggttcacgccattctcctgcctcagcctcctgagtagctgggactataggcgcctgccaccacgcccggctaattctgtttttgtatttttagtagagacggggtttcaccatgttagccaggatggtctccatctcctgacttcgtgatccgcccgtctcgccctcccaaagtgctgggattacaggcgtgagccaccgcacccggcccgtgggtcctgttcttaagctccactctttataactctagtttgttttggtttttaaaattatttttttcttcctttttttcctttaagagctttctaaaagctggcactttggtagatttcttttttttctttgttcacgtagtctgatctggaagccaggactttatgttggcctggatttgtcaggtctctaatcaactctgtgtaaagtggaatagcttggcaacaggcataataataataattaaaaataacagtgactgcagaactaagacatgagattcaaaaataagggggaaagtgacacagagtcataggctttcatctgaaaatatctcattccggccaactgagaagcacccttgcaaatcagttagaatatctctctgtgtagaaaaggaaagccagagagaaatgttgccttcaagtgtagtttgcctgtgtattaccttctgttgaaattcccacagacaaataagcctttgagaacccataagaaaacaatggctgccactagtaagatttccaaaggtacttttaaaacatggagtagatttgtttttctgtcccaacgacttcagagaagttcccacttaaatccatgcatggtcattttatatctgccattacatattcttgtttgctaaatgtaagtcttgtcaatgagttattttaaaaagtactttttgaaattacgcacaccccaaacaacagaactgctgtgtgtatacaaatgctctggaaaggcagaagtcaggtactgggtgtaggcacaggacagaccgcatggtctgccttggcagccctgtcctcacctgcaagctgcccacacacactcccttccaaacggtgctccctctgatgccacttggctgactgagctactgtgggaggaagcctgtgaaggggttggtggtagtgatgtgaataaatattttataaactaaacttcaagtataaaacttgatttaccctttcaaccaaattcacatgggaagtcccacttcttcttaaaaatcttggacattcaagagttaagggatatggaagctggcgtagcatggggctgtcatccaagaccagctgaaaaggcagcaggaagggtttggttctggctaggctacagacaggccatctggatgcagggaaggcctagaatgccagaagcagcttttctttttgattttagacttcatcgagtccagcctgggaaaagtctttagtttaagacccaaaccgagagtcttctttaaacagggattcaatatttgaattttatataaaacaaacatccactacacgtattctttttggcaaagaaggttggagacagcaatgtacacacaattaaacatacttagaaaaaaatgtagaccagattcactagacttataaatacataggaactatgtgtagtttttaagtaattttgctaggaataaatattgaaagattgcctgaaaaaaaatttttttatattataccccctcagttacttttatgaataattatttcgttgtttttcccatagttcacattaaaaagcaattttaggccaggcgcggtggctcacacttgtaatcccagcactttgggagtccgaggcaggcggatcacttgaggccaggagttcgagaccagcctggccaacatggcaaaaccccatctctactaaaaatacaaaagttagccaggtgtggcagtgcacatctgtaatttcagctactggggaggctgaggcatgagaatcacttgaacctgggagatggaagttgcagggagctgagatcatggcactgcactccagcctgggtgacaaagtgatactctgtctaaaaaaaaaaaaaaaagggtaattttaccacattaaaattgcctttaggtctttaaaataattttccttctctatttttattttatatttaataatgttatatttataattaatcacattaggcatgatgttagcatgggccaggaaatttttctttagtgaaactgaaaaaaaaaaaaaaccctgcagggaagttatagcaacttcctactctgtatcattcatgaacatacactcagtttggaaaccaccctctttaaaagatatgatctattcttccttagttattgcagtatgcgtttgatttgtatgtgttattcttaacaattaaaggaaaaggtgaatgtaaattcacttggacaaaacaggaataaaagaatattatccttaagggaagtcttaccttaaagaagagaaaatgcacgtatttttctgggcgagggtggtggggtcagggaggaagaattgttttttctaaataaggcattaatcgccacctagcagtagaggaaggaactgcgcacttagtttgccactgaaattctagaaaacattagttttaaaggacatattacttttattgtaaacaatatcttaggaattattggtctattggcagactaaggattgaattttttctctcttgtcttgaggaaagataaagaaataaaacaaatgaaaatatttggcctatttgtaagcatactccttccatcataaaatgtctgttctcttgttgccgttgccactccagcaacaagctaaaggaaaagaaattctgaagccatcatgacacgaaaaaatgttgcctttggcagggcgcggtggctcacgcctgtaatcccagcacttcgggaggccgaggcgggcggatcacgaggtcaggagattgagaccatcctggctaacacagtgaaaccccatctctactaaaaatagaaaaacaaaattagcctggcgtggtggcgggcgcctgtagtcccagctactcgggaggctgaggcaggagaatggcatgaactcaggaggcggagcttgcgataagccgagatcgtgccactgcactccagcctgggcgacagagcgagactccgtctcaaaaataaaaataaaaaaaaatttttttaaatgctgcctttgtcctattagaggaagaaatatctgagtttttttgtttgtttttctgtttgtttgttttttggagtcggagtctcgctctttcgcccaggctggagtgcagtggcaagatctctgctcactgcaacctccacctcccgggttcaagcgattctcttgcctcagcctcctgagtagttgggattacaggcgctcaccaccaagcccggctaatgtttgtatttttagtaaagacggggtttcgccatgttggtcaggctggtttcgaattcttgaccgcaggtgatccgcccccctcggcctcccaaagtgctgggattacaggcgtgagccacctcgcgcggcctaagagaggtttattttgaaaatgagaagacattggccgggattagtaataacagttattattgttagtaataatgcttagtatatagtaaggtgatcaacaaatattttttgaaggaatgagaaatgtctggctccaaaacctgtgcttttcactattaccttctatgcatatatattggtggctgaaagtgcttggctggacacttcagagtggctcttatataaaagccctacttgtggaccaacaaaagagatatttggtttcttggggttttaatggctttcaactcctcgaagcatgatttggggatttggatcaggatacaccctgattcttaaccagtatttgcaaaattgatcaatagaggtatcttgcaggaagaatggaacagaaaaacaacactaattctccaatttaaagaccattattagttatttcaggattttttagaataaaaaaaatccaaataaaagccaaactgaaattttcccatgaatggccgggtggggtggctcatgcctgtaatcccagcactttgggaggccgaggtgggcgcatcacctgagatcgggagttcgagaccagcctgaccaaaatggagaaacccccgtctctactaaaaatacaaaaattagccgggtgtggtggcgcatgcttgtaatcccagctactcgggaagctgaggcaggagaacctcttgaaccctggaggcggaggttgcagtgagccgagatcgtgccattgcactctagcctaggcaacaagagcaaaactccgtctcaaaaaaaaaaaaaaaagaaagaaagaaaaagaaattttcccatgaacatgtaagattcattgttactcaactatctagatgacagtctgtaataattgcttaatttctggaaaaaaatatttctaaacaactcaagtgtgccatggcttttgtacaggcctctcttttagtcacacactgagggaggaaaattatattatacagtttagatataactctaaattgttattcttcccaattatgtctattaattccagattgctctattccaagtgttagctgttgccagaaaaaaaaaaaaaccttagcttctgaataaccagttaaaaataaaaagcttctaaaataccaggggtttttttgtttgttttttgtttttgtttttcctgagatggagtctcgttctgtcgcccaagctggattgcagtggtgcaatctcggcccactgcaacctctgcctcctgggttcaagcaattctcctgcctcagcctcccgagtagctgggattacaggcgtctgccaccatgcccgctaattttgtatttttagtagagacggggttttgccatgttggccaggctggtcttgaattcctgatctcaggagatctgcctgcctcccaaagtgctgggattacaggcgtgagccaccgcacctggcctcccataagcaggtttgtttgtttttttaatttttttaaatatgcatatgtacacacgatgtatatacatgttacacatattggaaaatatattctcaggatattctcccttctccagatggatagtattgaaagggaaaaaacacagtaattaaaaaaaaaatggtcagcacagtggctcactcctgtagacccagctactctagaggctgaggcaggagagttgcttgagcccaggagtgaactttgatcacaccactgcactccagcctgggcaacagagcaaaagcctgtcctaaaaataaacaaataaattaaaattaaaattttaaaaaggtgggagtgggtgcagataaggctagtttaaagcaagctgtttaaaggctatcaaatattagtcaaataaattatgaaacatttatatgatgtaataccttatagctatacagacatttaaagcatgtgacatgaagaaatgttcgtggtttaatgtttacatagaaaagcaggtttaaaaagaatcatatataatttgatacaaattttttgtggcagtttattttgagatattaatttttattttattttatttatgtatgtatgtatgtatgtatttttgaggcagagttttgctcttgttgcccagtctggagtgcagtggcacaatttcggctcactgcaacctccacctcctgggttcaagtgattctcctgcctcagcttcccaagtagctggggttacagacatgcacctccatgcccggctaattttgtatttttagtagagatggggatttcactattttggtcaggctggtctcaaactcctgacctcaggtgatccaccctcctcagcctcccaaagtgctgggattacaggcatgagccactgcgcccagccttgagatattaattttatgtgttctcctatcctactacccctttctcccattcaagcaagtatctagacttcagatttttgtaaggcaaaaagcaaacactgctcagaaataccataggctctgtcttgtgaaatgagaagagggaggtgaaagagggattcctcaaaagttagaagtctgggccaagctcagtggctcatgcctgtaatcccagcactttgggaggctgagctgggtagatggctcgagcccaggagttcaagacctgcctgggcaacatagtgagaccccgtttctattaaaaaaaaaaagaaaagaaaagaaaaaagaaaaaaacttagaagtctgaagcctatagtttgagtgaatagctaagattcccatcttgttctgtaacaaagcccagatagtggcaaaacctcaaagaggaaagccacatggggtaccttaggaagctgtacttgggtgcaggggctgccacattcacttacttgattccagattcttgagtaccaacagtggtaaagaaatatgagagtcaccagtctgaagtgaagatggcacaaaagggaatcccagcaccaaatcaatgtggagagatgaccaagtaatttgagataattccaggtacttctataataattcaagccctagaaactttgtacaaccctggatggagaggaaatgctcaatgataactaaggtagaatttctcaccagcatggcaggatgggagctcaggcttagattcaagtggacctaaagaaatgcagtatttatttctatgaaataagaatcatatacacaatatgcatatgtacacacgatgtatatacatgttacacatattggaaaatatattctcaggatattctcccttctctagatggatagtattgaaggggaaaaaacacagtaagtttcactacctagtacaatatagtaatttatcatattgtctttttttagcagctatttttagattttttttaaatttttttttttgagacagagtcttgctctgtcacccaggctggagtacagtggcagatgtcggctcacctgcaacctccacctccttggttcaagcaattcttatgcctcagcctcccaagaagctggggtttcgccatgttggtcaaggtggtctccaactcctgacctcaagtggtctgcccgccttggcctcccagagtgctgggattacaggcatgagccacctagcctggccaatcatattgtctttattgaaaaaaaatcttcaatgtatatccccctttttttttttttttgagatggagtctcgctctgtcacccaggctggagtgcagtggcacaatctcggctcactgcaacctctgcctcccaggttcaagcaattcttctgcctcagcctcccgagtagctgggactacaggcatgtgccactacgccgggctaagttttgtatttttagtagaggtggggtttcaccattttggccaggctgatctcgaactcctgatctcaggagatctgcccgccttggcctcccaaagtgctgggattacaggcgtgagccaccgcacctggcctcccttttttaattagaaaaaatgtatattataaaaccagctgtaagctgtttttcctatatatttgaacaggtcgaaaatagggaagggcatagataataaacttaggttctattttccagctgttttagacctattgatattaacatttccagaagtataatacaaacttaatgtcaaaaaaagatgaggatttttttttttcacagaaaaaagtattggataactcctgtaccctgaaaaaaattaaaatggtattatattagtcagagtctcagcaagaatcagatgcactctccaaaggggtaactgaagagagtataatcagaatgtgggcaggggaacagcaagtggtaatgcagtaccactgccaacctgtggccaacatggagcgggagaaggtaatacataatctgatatctctttcctattgctttctgatctactagtgtcttccattagctgagcccaaccaggagctagagaggaagggatcttactgatgcaatctataaaagattaaagtaccatagaatactatacagccataaaaaatacaggaggctgggcttggtggctcattcctgtaatcccagcactttgggaggtgaagacaggcggatcacttgagctcaggagttcaagaccagcttgggcaacatggcaaagccccatctctacaaaaaatacaaaaattaggtgggtgtggtggcacagaactgtgatcccagctactcaggctgaggtagagggatcacttgaacccaggaggtcgaggctacggtgagctaagttcgcgccattgcactctagcctgggagacagaatgagaccctatctctaaaaccaaaaggaaaacacaaaatcatgtcctttgcagtaacatggatggagctggaggccattatcctaagtgaactaacacaggaacagaaaaccaaataccacatgttctcacttataaatgcgagctgaacattgagtacatatggacacaaagatgggaacaatagaccccagggtcgatttgagtggagggagtggaagaagggcctattgggtactatgctcactatgtgcatgatgaaatcatttgtacaccaaagttcaacaacacgcaatctacccatgtaataaacatgcacatgtaccctctgaatctaaaataaaagttgaaaaaaggaaaaaaaagggtgaagtatatctatagggttatcagagaatatctagcacaatgacaaagtataagcaattccacaattttcctataaatatttccagataaaactatctactagaagagtactagaaacatagagttttagacttcaacttttggtactatgtaaattatttgaaattattgctactactactagagaacttttattcattcactaatttttttttttttttttttttgagacggagtcttgacctgtcgcccaagctagagtgcagtggagtgatctcggctcactgcaacctccacctcccaggttcaagcaattctcctgcctcagcctcctaagtagctaggattacaggcgtgcaccaccgcacctggccaatttttgtatttttagtagcgacagggtttcaccatgttggtcaggctggtctcgaactcctgacctcgtgatctgcccgtcttggcctcccaaagtgctgggattacgggcatgagccactgcatccagcccactaactcttaactaaattttattgagcatcgagtcagtgtgacacattaaacatatgtacaaagataaatatgaaacattatcctccagcggctcctgatttaatgtgaggacaacatatgaacaaataagtgcaattaagctttatatgtgtagttgcattttaaaagggactctttctgtctcagtttggctgaggctccaagaaagtaaaatgccaatattctcgtattttataataaagtggaaaaccataaaaagtagaaattgcccaaaaaaggtggcaggagtggaaagggaactgtttttgcaactcttagctgtccatctacttctaattcagagactggagtttagaagattttgagagtttttggtgtgctgtgagtggacattgctttttcctcacctcacacctagggaaagaggctttaatgaaactttgatatatgatccctacacctagcaggggggtagggcaggggttgaggtcacagtggactagtgtctgactcatatctgaggaattcattcattcaatacttaatgtagcacttattaagtacaggcactgtattcgcctattctaggtataggcaaatgcagtggtgagcaaaatagataaaaattccccgcttcatggagctaacattctagtggatgagagcaagaaattttggctaattgcaaaaatgagtttgggatatggtcaaagtctgcactctcagaggcaaagccactctgtaggtatttggattagaccagggctacgagaaaggttcacaaagaaggatgagacttccacagaaaaaaagctgggagtgtagctatacatgctagctattaatattgagctgatagccagatgaaatatatttacccaagggtaagcacaagattaccagtattttctcattgggctaaggtgagagttaaggtgttaccaaagaacgcacgcataaagttacaagtgtcaactgtaaacatctgccaagctcaaagagtaccagcccttaatcacagaactgtagtagccaagttaagaatgttcttgcctgttcctctgtttgaacttgaaagaaggaaggaaacctggagttggtggtgatgatgggagttggggtgggggcagatgtggtggcgattaggagagaaattttagacagggacatagaagggaagtcaaacattttttacttgaacaaccagaaaactcatgagatttgtatcttattttattcaatgagcatgggaggattaactccaccaggtgtgttttaacatgtggagtgaaaataagttacttacaaattgcaccctatacatctatttgttcaatgtaccagttataggtgctaaacataataacacggtaagatttacacatccatgaaaaaaattttcaacttggctcttatttagaatttacttttatttgattcttttaaaagcctaacataacttaccaattacctttaattttttttttttttttttttgagacagggtctttgtcacccaggctgatcatagttcattgcaaacttgaactcctgggtgtctcatgtgtccgtgtgaagagaacaccaaacaggctttgtgtgagcaacatggctgtttatttcacctgggtgcaggcgggctgagtccgaaaagagagtcagcaacgggtggtggattatcattaattagttcttaaagattttgggataggcagtggagttaagagcaatgttttaggggcagggggtggatctcacaaagtacattctcaagggtggggagaattacaaagaaccttcttaagggtgggggagattacaaagtacattgatcagttaggttggggcagaaataaatcaatggtggaacttcgtcagttaaggctattttcacttcttttgtggatcttcagttgcttcaggccatctggatgtatacgtgcaggtcactggggatatgatggcttagcttgggctcagaggcctgaccttcctgtcttcttatattaataagaaaaataaaacaaaatagtggtaaagagttggggcagcgaaaatttttgggggtggtatggagagataatgggcgatgtttcttagggctgattcaagcgggattggggcagcgtgggaacctacagtgggagagattcaactgaagaaagattttggggtaaggggtgatattgtggggttgttagaagaagcatttgtcatatagtattggtgatggcctggatgtggttttatatgaattgagaaactaaacaaaagacacaaggtccgaataaaagaaggagaaaaataggtattaaaggactaagaattgggagtactcaggatgtccaattagagagtgtccaagggggttcaacgttattgtttgcttggctggcgagtttttgggctctatccttgagtttttttatgttgtcatataccaggccagattgatttaggtaaaaatagcactcttcatttaaaaatatacagagtttccctccccctttttttttttagtagtaagtcgaggcctcagcgattttggaggaaagagaaatgcaaagccagcaattgtttgttaaagaaggattagaaacagctaggagggagtgactgagattgatagtgtggtggagatagctgggagaggtagagggtggcataagattgggaacaagaataagagtaagtataaaagtaaagaataggacttcatcagggtgaaagtattgaagtgtactttgtcactgaagatcttctatccacttaaagagagacttaagggtggcagtttgaggtaaaaccaggtgccactgaataccaagagcctgagaaactgaggtgggaaggccaaactgaggaattatgtctgacagaagggatgaaatgaccgcggtggccttctcagaccctgtgggaaaggcctctacccagccagtgaaagtgtctacgcagaccaagaggtattttagtttcctgactcgaggcatgtgagtaaagtcaatttgccagtcctgggcgggggcaaatccccgagcttgatgtgtagggaagggaaggggcctgaacaatccctgaggagtagtagaatagcagatggaacactgaaaagtgatttccctaaggatagatttccatgttggaaaggaaatgagaggttctaagaggcaggctagcagcttgcaacctacatggaagaggttatgaaatgatgatagaatagaatgggcctgtgaggctggaaggaggtattttccttggcccaagaaccatttgccttgtttgggaagagattgataggtggaagtttcagtggggcagtaggtgggagtgactgatgagaaggagaaaaactggccatgagggacagaagttggaattctagctgcttctttagctaccttatcagcataagcgttgccctgagtgatggaatctgatgccttttggtggcccttgcagtgtatgactccagcttcctttggaagtaaagcggccttgagaagagtttttattaaagaggcattaatgatggaggaccttgtgtagtgaggaaacctctttcagcccatataacagcgtggtgatgcaagatatggaaggcatattaagagtcagtataaatattgacgcgtagtccctttgcaaaggtgagggctcgagttaaggcaatgagttaggcttgctgagagatagtggaggggggcagagtggtagcctcaatgatagatgtggaagatactatagcatagcctgcctttgctggtgagtggcgattaggcctggtggaactgccatcaataagccaagtgtgatcagggtgaggaacaggaaagaaggaaacatgggaaaatggagtgaatgtcaggtgcatcagagagatacagtcatgggggtcaggtgtggtatccagaataatgtgggaggccagattgaagtccaggccaggaacaatggtaattgtgggagactcaacaaagagtgagtacagctgaaggatctggggagcagaaagtatatgcgtcaggtgtgaggaagaaaatagattttggaaattatgagagctgtagagagtgagttgagcatagtttgtgattttgagggcctctaaaagtattagggcagcggcagccactgcacggagacatgatggccagcctaaaacagtaaggtcaagttgtttggacaaaaaggctatagggtgcggtcccggtccttgtgtaagaattctgactgcacagccctgcactttggctgtgtgtaatgaaaagggttgggatgagtcagggagagctagtgtgggggcagtcactaaagctgtcttcgaggaacagaaagaggactggggaaaggatttaggatctatgggatcagctaggtttccttttgtgagtttatataatggttttgttaggatggcaaaaccaggtatccaaaggcgaaagtatccaaccatgcctggaaggaaaggagttgtcgttttgtaggtgttggggtttgagagatcagttggacacagttggcagggagagcacgtgtgtttttatgaagagttatgctgaggtaggtaacggatggagaagaaatttgagctttggagggggatacccgatatcctttggagaataaatgttgaaggagcaggagggtgtcttgttgagaagattcaaaggaggggctacaaagtagaaggtcatcaatatattgaataaggtgagaagcagaagggtggaaagaaagtaaatcaagggaaagagcttggctgaagtaatgagggctgtccctgaagccttgcggcagcacagcccaggtaagctgctgggactgatgggtgtcagggtcagtccaggtaaaagcaaagagaggctgggacaaggggtccaggggaatagtgaaaaaagcatctttaagatcaagaaccgaatagtgagttgtggaggaaggtattgaggacaaaagagtgtacgggttgcgcactacagggtggataggcaaaacaatttggttgataaggcacagatcctgaactaacctgtaagacttgtctggtttttggacaagtaaaatgggggaattgtaaggagagtttataggttttagaagcccatgctgtaacaggcaactgataacaggctttaatcctttaaaagcgtgctgtgggatgggatattggcgttgagcggggtaagggtgattagatttttatgggatggtaaggggtgcatgatcggtcgccaaggagggagtagaggtgtcctatacttgtgaattaaggtagggagatacaaggagaggatgtgaaggaggctttgaactggggcaaaaggtggcaataaggtgtggctgtagtccaggaataatcagggaagcagataatttggttaaaatgtcttggcttaataaggaaagtgggcagttggggataactaaaaagagtgcataaaggaatgttgtccaagttggcaccagagtgggggagttttaaggggtttagaagcctggccgtcaatacccacaacagttatggaggcaagggaaacaggcccttgaaaagaaggtaatgaggggtgggtagcctccctattgattaagaaggagacggacttaccctccactgtaagtgtgatggtccaggaggcttccgagaagattgggcagtgtcagtcttcagccgctaagccgagatctgggaaggagtcagtcagagccttggaccagagttccaggggctctgggagtggctgccaggcaagttggatagtctgatttccagtgggctcccgatttaaaatcggtgagatgttccttgggctggttggtctgaggacccgaggtcataggtggatctcttcacagagtgagggtgaggacagcggactggtctcccaaaggagtccgctgacccgggtcttcggcaccaaatgtcttacgtgtccgtgtgaagagactaccaaacaggctttgtgtgagcaacatggctgtttatttcacctgggtgcagacgggctgagtccaaaaagagagtcagcaacgggtggtggattatcattattagttcttagaggttttgggataggcagtggagttaagagcaatgttttgggggcagggggtggatctcacaaagtacattctcaagggtggggagaattacaaagaaccttcttaagggtgggggagattacaaagtacattgatcagttaggttggggcagaaataaatcaatggtggaacttcgtcagttaaggctattttcacttcttttgtgaatcttcagttgcttcaggccatctggatgtatacgtgcaggtcactggggatatgatggcttagcttgagctcagaggcctgacactgggctcatgtgatcctgtcacctcagcctctcgagtagctgggactacaggtgcatacaactacacctggctaattttctttccttcctttcttcctccctctctctctccctcccttcattttttttttttttttttttttttttgagacagggtcttgctatgttgctcaggctggtaactcctggccctaagcaattctcctgcattagcaggagaaaaaaaagtgtcgggattacaggtgtgagccactttgcctggcttccaatgacctttaaagaagtagtactatgttcgctgacctagtcttcctacaaaatatctttattgatcagtttttcagcttctgattaatgctcaagatgtatcttgaggccgggcatggtagctcatgcctataatcccagcactttgggaggcccaggcaggaggatagcttgagtccaggagtttgagaccaacctgggcaacaaagtaagaccttgtctctacaaaaaaaataaaattatctgggcatgggggtacttgcctgtagtcccagctacttgggaggctgaggtaggaggatcacttgggcccaggaggtccaggctgaagtgattgtgccattgcactccagcctgggcaacagagaaataccctgtcttaaaaaaaaaaaaaaaaaatgtatcctgagagctgaggagctgagtatggtggctcactcctgtaatttcagcactttgggaggccaaggagggaggatcactttaaggccaggcattcatgaccagcctgggcaacatagtaggaccctgtctctacaaaaaattttaaaattagccaggtatggtggtgtgcacctgtagccctagctacttgggaggctgaggcaataggatggcttgagcccaggagttcaaggttacagtgagctatgatcatgccactgtactctagcctgggctacacagctagactctgtctctaaaaaaaaagttgttgttgttgttgtttttaacgatgtatcttgagccaaatccccaaaacacacaaagaggagctgaaaatcatataaacctttaataagcccttgggactttcattcttaacaaaaaggtcaaccaaatgccccttcttttggtctacaagtagagctttgataacagccattctgaagagtacagacaattgctgtgaataaaggatgtatcgcaaagccccagatatttgcttaggaaataattatcagaaggacaggtttggagtgatagatctatcactcattcattcaacaaatgtttagtgagtgcctactatatgccaggctttgtttcaggtactaggaatatctcagtaaatttttaaaaagtcaaaaaattatgtttggatatttatgtgattccctgttgcatatttacaatgtgtgcttcaacttttatttaaactagattcagtgggtttcttttatttgtatccaaaaggccctttctataaaagtgacacagtaataagaggttaccatccctaattacaggaagctcctacaagtcagtaagaaaatgattaacacaataatatgaggaaaggaatgaagtggcaatccactaaagtaacataaacagccaagaaatacaacaaaagatttttttactagtaataaaaaactataaataaaattaaaaattaaagaaacaggttttcttttttggcctatcaaattgataaaagtaaaaagtacttataatatccagtgttggtaagaatacagagaaaactgactctcaggcagcgtagaatattaaatggatataactttttttgcaactcagccatatttatcataactgtaaatgtaagttccctttgaccccacaattctacttctatgaattcttcatcaggtaaggtaattatgcacacaataggtgtgtatgtacaagaatattcattatagtatttttatgataccaataacttggaaacaattgaattgcacactaataattaagcaaattattatatttccatacaataaaatactatgcgactattgaaaataatatagaccattacttatggacatatgatagctataactttttaagtgtattaataaaaacagtatcatcttatttttaaaaattgtatatttattacacatctgtgtgaggcatgtgactagagagatatatatggaaagaattttcaaaatgtttatgtagtatatgacaatttttaaatgagcatttatttaatcagttagcactatttataaacacttaatatgtgctacgcattgtgctaggtcctggagaaacgaaagagaacaatctattaatttaatctgttaatttagtccaccaaatcaacagtgtttttcagaaatacgacaataaccagtgttgatgaattagagaaggtaacctcatatactactgttgagagtatatgttggtaaaacatttctggagaacaatttagtactttgttttttttttttttttttttgagatggagtcgcactctgtcgcccaggctggagtgcagtggcacgatctcagctcactgcaacctccgcctcccgggttcaagcgattctcctgcctcagcctcctgaggcacgccaccacgcccggctaatttttgtatttttagtagagacggggttttaccatgttggccaggatggtccgatctcctgacctcgtgatccacccgcctctgccttccaaagtgttgggattacaagcgtgagccaccgcgcccggctttttttttttttgaaacagaatctctattgcccaggcgggctggagtgcaacggcgcgaccatggctcactgcaacctcgatctccctggctcaagagatcctcccacatcagcttcccgagtggctgggaccacaggcccatgccaacatgcccagcctttttttttttttttattcttattcttattcttattcttattattattgtagcgacgaggtcccactgtattaaaataatatagtgatctcaaactcctgggttcaagcgatcctccgccctcggcctccaatagcgctgggattacaggcgtgagccaccacacccagtctcttttttacaaagaatataaatagccggtggatgtcagattggcagctgtttgcagagatgtcagactatttcgttatggaaagatgctctcaaaagacgaaatagataaatcgaaagaaagtgtccattttttctcagtggcctaatctgtcaggtaccatgcttggttctgggggcatagaaagacattagcgccctcatggagttcaaagtctggtggaagaaatcaatcataataacaatgaggggttaacgacaacagacccttgaaagataacatctccagggaataaggaagagcattccaaagtattttgccaaatggcaaaaaccgcagttacttttgcaccaaccttaatgcaaataaaagcatgtacacaaacaagatactcgaggaagaatacagctgacacacagaaacggatcgttatcttgtggctttcctgcagcctcgttcctttcagtcacataacaccccaaatctgtggacggttaatgagagctagtatcacccagagtcacggctgttgactcggacgactttagatgcagcccgccagcgggagaaactggagggaatccgccatacacaggaacctagaagggctacgtgacaggggctgccccgcagctctcagccgccggcactcccagccaggttttcccgccagtctcagttcctagatcttccgaggctccgcccgccgccgagcggtcggaaagttttaaggagggggaagtgttgcaagcctatcgatatctctggaatagactgcgctaccctgcgccgccgccgtcaaactcccgcagacttctctgtagatcgctgagcgatactttcggcagcacctccttgattctcagttttgctggaggccgcaaccaggcccgcgccgccaccatggtacgttgaatcccgatctctggaaggtttagggcagagctctggtgactgggggatgacgagccacctctcctgtcatccttagcgtcgcccggtgccacgaggtatgagagcctcggcagacggccgggctccggcagtgattcagcatctccggcctggccgggctaggggttatcggtagccagtgcggcctttccaccgctttcgcttcccggggagcctccgacacttcctcctcggtcagctagatgagttcgcccctcaggttccttcagtggagtagattctgagcggtccagaatagctcctagtgctgtgtatgggagaggagaagacagagacttgacttggaggcctacctgtaccaccagtgcggacttgacccccaggtttgtgttcctggacagcgtccgttttcctggtgggtccgtctatttatctctcgcctagacttcgattagaagaggcccttttcaatcattttgtccagtcacctagttgcggatgagtaagccgaggctgagaggggaagtgatggaatcagggttacaatatagggttctgggtttccagttctgtctgccattctagcactcaatctcactcccatgactattattataatagtcgtaatagccgtaatggttctatcgctgcagctatttgtgtccacctctaactttgtgaggacatttttgttcattcaatgtgaatatacagacagcacttgtacaggcataactacagtgaacattaaaaaataagtcatacatgtccctaatcataaaaacagaaagggacgtttagataaagagctgtgggagtatatgttagggggatttgggaagaaaaggagaagacttcaagaaatcgacatttaagctaccttaaagaaaaggaagacttttaaccatttattagggcccaataaaagggagcagcataagcaaaaataggcaagaaagttgattgtgaactttagtaattgagcctaaaggggttgatatggagggtgttagaataagagtttggaaaaataggacccatttagatctgcttctccctctcccacgagtttatggtaaatgtagaattggcttacatctgagtacagtagtaatcttccagtaagactgcatgaacagagtgccttaacattgaatggaaacacaagcatatttcttaatgaatgttaagagttgggatttgaaatgttcttctattaacaggtatttttttcttttacttttagtttcgaaatcagtatgacaatgatgtcactgtttggagcccccaggtaaaataatgtttttaaaccttttctgtgaagtggctttttgtggctgcaatatatttagaaacttgtgagagcgtaggcttggggaaaatggaatataattattttagacgttcttggaagttgcatttataattaaaataggtttcctgatggacctagaggacattatgttaagtgaaataagccagaaacagaaagaaaaatgtttcatgctctcacttatatgtggaatcttttgtttaaaagggcaaatatatatatagagagagtaaaacagtggttaccagggtagggggtggcagtggggaggaaaaaagaggagatacaaagtagcaaatatgtaggttgagcaagtggaaagatctaatgtacaacatgaagactacagttaataatgcaggtagtgttttgtattcaagatttttgttaaatgagtagtttatagcccttgccacagcagaggaaaatgggtaactatgtgagacaacggatgtgttcattctgcgatagtgaccctactatatatgtgtatcttataacatcatgttgcatacgttaaatatacacaagaaaatttattttaaaagaagctttcagccgggtgcagtggctcatgcctgtaatcccagcactttgggaggccaaggaaggtagattgcttgagtcttggagttcaagaccaccctgaacaacatgaaacccggactctacaagaaatacaaaaattagctgggcgtggtggtgcttgcctatagtcccagctactgtggacagtgaggtgagaggactgcttgagcctaggaggcagaggttgtactgagctgaagattgtgccactgcactccagcctgggtgacagagtgagaacctgtctcaaaaaaaaaaaaaggtctcttgatttaaaaaaaaatcagttgagatttaactgtgctcacctgatatttgaaaaccctaatttttaatttataaaagatcttctaagatgtgtgttttttgttttttttttctttagggcaggattcatcaaattgaatatgcaatggaagctgttaaacaaggttcagccacagttggtctgaaatcaaaaactcatgcagttttggttgcattgaaagtaagtacagtaataaatatgtcttcctctgtagaaaacaatgtaaatttcaccatagaaaataaggttgtaaacttatttttacatttgtctctttttttttttttttacatcttataatgtctctatttagagggcgcaatcagagcttgcagctcatcagaaaaaaattctccatgttgacaaccatattggtatctcaattgcggggcttactgctgatgctagactgttatggtaagtataatcatgaaaaataaacatcctttttgtttcataattgattagttttctcaaaaagatccagataaggtattttaggaagttgtctgccaaagttcttgtaaattaagattatgaataccttggtggttttgagtttgttattaaattttccattttttgatccctgtaggagtaactaataagattaaacattagcacttttcagaagtcactgagtaatgtgatgtttgttaatacaatgtatatcgtttgagaccctgttatgtctaagaagaacgtgatacttttgtctggtttctaaggacaagctgaaccacacttgttttctttgtgcttgttttcttcaatacatcagtatttattagacatttattttttgcaatgctcaatactggatactgcagggtatacataagtgactcagacatggatcttgtcttaagggaacttgaaggcaagtttatctataaactcaaatgtagtttatctataatataacagaaaaatttctgtgagagtctagaagagacagattatttatggttaaaaggcaatacataaatgaagagatagggctttgaaattgcacatattgagttctcaccttcaccacttagtatctgagatttggctaaatacctaaacactgaattttttccagtgttttctttatcaaggctatttttaaatgttatttatttatttttttgagatggagtctcactctcacccaggctggagtgcagtggtgtgatctcagctcactgcaacctctacctcccaggttcaagcgattctcctgcctcagcctcccgagtagctgggattacaggcacccgccaccacgcctggctaatttttgtatttttagtagagacggggtttcgccatgttggccaggctagtcttgaactcctgacctcaggtaatctgcccacctcagcctcccaaagtgctgggattataggtgtgagccactgcacccagcctatttttaaatattttaaattgcctactgtaaaccactaacacagagcctttcaggtattatgtgagtatgtgtgttgtggatggcaggtagttagctaaaactaatcttgtaaatttgtgatttgattaggaaagaaagaatataaattataagggtgggcctggcacagtggctcctacctataattctagctctttgagaagcttaaggtcaagaatttgagaccagggcaacatagtgaatccccatctctacaaaaaattttaaaacttagctgggtgtggtggcacacacctgttgtcctagctactcaaaaggctgaggtgggaggattgcttgagcctaggatttcaaggttgcagtgagctatgatagtgccactgtactctagcgtaggcaacagagtgagaccctattcttttttttttttttgagacggagtctcgcgctgtcgcccaggctagagtgcagtggtatgatctcggctcactgcaacctccgcctccagagttcaaggaattcttctgcctcagcctcccgagtagctgggactacaagcatgtgccaccacacccggctaatttttgcatttttagtagagacgaggtttcaccatattggccaggctggtctagagctcctgacctcgtgatccacctgcctcggcctcccaaagtgctgggattacaggcgtgagccacagcacctagccgagtgagaccctattcttaaaacaacagcagcagcaaaaacagtgtaaatagtaatgctatggtttaagaatttcaggctgagcatggtgtctcatgcctgtaatcccagcactctgggaggctgaagcgggtggatcacctgaggtccggagttcaagaccagcctggccaacatggtgaaaccctgtctctactaaaaataaaaaaattagctgagcgtggtggcaggcacctgtaatcccagctacttgggaggctgaggcaagagaatcgcttgaacccaggaggcagaggttgcagtgagctgagatcatgccattgcactccagcctgggcaacaagagcgaaactcagtattaaaaaaaaaaaaaaagaatttcaatttactcagccagtcccttgctctaagtcagcaatataatgacagccttaagggtttccacctactcttcaaaatggaaaatgtattatattatcaaacattttatttaacccaatctataaaatattgccatgccaacacataatcaatataaaaactttattaatgagttattgcacgtttttaggtactaagtctttgaaatttggtatgttattttgtacttggtgtacatctcaattcagtctagctacttttcaagagctccatagccacatgtgattattgcctgccatattgggcagtatacttttaggcagcattgggaaatggacttaaatataagtactgaacaaatagcttggttcctgtagtcaaccatgtgatgatcagatgtgacatacgcatatactggacaaagcaacattgagaaaaaggagcatatccatttcttgtttatcttatttataggcataaattctcttctccccaatgttaaccttgcttgaatttcatcagatttaacagtgagactcagcggctagtgtccagtatctcctctagagtgcttcttatgaatagaagtaacagtggcagaaacacgtaaagatcccccctgctgtgttttccatttcttatatttgctcttttggagaaatgttagtctgctttcaagaaaaaaggacagagtagataatctttttgctggttcgagatctagaattacgacaagcttgctgacagtgggaaggataagagaagagaggttgctgtttttcttttgttcagccttctcttctctgttccataagtgctctgatacaaagattttctagagctaaaaaatgtttcagtcttttttaaaaaccttatgtggctccagagtttagcacaaaaacgcacccttgcaggcatgtctttcttaccttctgtttttcttatatggatgttatccatgtaaacgcttggaagaatttgaagtgaaatcaaacaatttagattggaatagttgtctataatttgaaattactaaactttttttgtttcttttttagtaattttatgcgtcaggagtgtttggattccagatttgtattcgatagaccactgcctgtgtctcgtcttgtatctctaattggaagcagtatcctttttatgttagcatttatggatatgaactttgaagggttttgatacttgtgttaattattaggaatataataataatatgacataggtaagattgtgaaaactttaaaacaacaaattggattgctctttcattagcctttataagcaatttatatttgctagacacaaataagcccaacttcaggaaaatcatctaagcatctttttagaggggatttaaagtttcttaatggttctagatgtcccaagaaatcctagaccccttgtatccaaaacaaatcaggttttagatgggaagaaattattttgctggcactctttcttaggttcggtagaaagtcaaacattttatattaggccaaagaaatagtgtcctattgcattatttctctggtggattatgcaacaattaaagaataagccagagacctttgttaataatgtataatttgaaaataaagacagtacttcattccttgttaaaacaagctcgttaaccagtctaagagacccagataccaacacaacgatatggccggagaccatatggtgttggtctccttattgctggttatgatgtaagttcattgaatattgttatatgttaatgattttttttaattaactagaaatttttataatttttagttcaaccaaagtaaataattatgtggtgtatttatttctatttgtaggatatgggccctcacattttccaaacctgtccatctgctaactattttgactgcagagccatgtccattggagcccgttcccaatcagctcgtacttacttggagagacatatgtctgaatttatggagtgtaagtgacagccttgctttttttttttttttttttgccttttccagtctatatagtaaataaacatagtatcctaaatgcataaaactgtaagtcttatagaaagaatttttttaaaaaaaattatgcccatgaagagtttattgtttctgtcacatatactaatcttaacttctggttaccacagtagtttcaagcacgagtagaactttttcaaaatataaatgtgttcccaaccttgaaaattcttgattcatttggtcagaagtgtgccctgtggagtggagagcggagaaccactgtactacctgccagttgtaagctctgttcacttttagttttctgtgagtcttttgttattttaagccacacagacatttctgcattagtagtccataaacaagaaataaaaaggcagtgtagttgagggagaagaaggtaaaagaggtaagatgttatgacaggacaggttttcaagtgctttgctttgcattggaaggagggtatcgggttttacatttctctttgtcatcttatctgttttctggtgacaaagcattctttggaggaaatatttggggtttagtgaatgcagagaaaaatagtttaattgacattactcaaagcaaacttgtgggatgacaataggtttaactttgggaaaagaggattccttggacaaataagcttggtaaatgctggcttaaagtttaacattgtaaattatggtaaatggattggggtccccaaggttacccctaaatttggagatatgctaggacttaaagcgcacagcatatagttgtactcccaggtaagacttttaacaataaaataacagtacataggtggatcattaaggaaaaatacagtccagaggaatctatgtgcaggcttccttatgctctttccttcccataaggagtcacagagtacacttgcagcaatatgtatgtgatgtttctgcccagagaagctcattagaaactcagtgtccaaagtttggttcagaactgctcatatcagcaccctctgcctagcacatttcaacctggataggaaattcctaaagattgcaataaatctatagataattttggggagtactgctactttgatgatacaaagcatctgatccatgaacatggaatgtcttcatttatttaggtatttaattctttttttttttttcctgagatggggtttcactgtttttgcccaggctggagtgcaatggcgcgatctcggcttattgcaacctctgcctcccaggttcaagcaattctcctgcctcagcctcctgagtagctgggattgcaggcatgcgccaccacgcctggctaattttgtatttttagtagagacggggtttctccatgttggtcaggctggtctcaaactcccgacctcaggcgatccgcccaactgggcctcccaaagtgctgggattacaggcgtgagccaccacacccaaccaggtatttaattctttcactgatgttttgtagttttcagtgtacaaatcatatttgtcttaaagtattttattatttttggtgctgttgtgaacagaattgttttcttaatttcattgcatattattcattgcaactatatagaaatacagttgatttttatatatcaatcttatatcctgcaatcttgctgaacttgtttattagttctagtcatttttttatagattcctaagatcatgttgtctgggaatagagatagttttactttttcctttctaactgccgtggctggaacctctggtacaatgatgaatataagttgcatgaacaaaccttcttttttttgttcctaaacttaagggaaaaggttttagtcattcactgctaagattgatgttacctgtcagctttttgtagatgccctctatcagactgaagaggttcctttcaattactagtttgttttgtgtttttattatgcaaacattttaggttttatcacgtgctttttatgcatctcttggggtggttatgcaggttttctcccttccttcagtgtaactgaaaattacactgactttcagttgttaaactaacttattcttgggataaatctcacttgtatatggtatataatttttttaatgtgttgccaggttccgtttgtagtttttgttgagggttttgttttgttttgttttgtttttgcatctatattgggtctgtagttttattttcttgtgatgtttttatccttgttatcggtaatactggccacatagaataagttggagattcctttttacaatgagcaaatataaggactaggattctacagaacacattctacaaaacttggagttgtataatttatagtcgggattttgatttgacctagcaaaagagaagatcaaaatcgtaacaaaaatcatgagtcctctcattaaataaaataagaatcagcaatgtcatagaatgctattaaaagattatatgactagcattaaacttggctgtttttactgtgataaatttagtgtgtaactaaaaaccacaatttgagactgtagatttgataaataacagaagcctagcataacaatgaaattaagaaataattgttaatttattacatataggtaatttaaatgaactagttaaacatggtctgcgtgccttaagagagacgcttcctgcagaacaggacctgactacaaaggtaagtattgtcttttccaattgtagatattaacgttacagtttaaacctttattgcataaatgtaatggagtatatatacaacattctgtaatttgggatatgattgtcttggcagattcttttcctttaagctatttgctaagtaatccaattttattttttaaacatttctttttggtacaaagcagtaaaaccagtaaatttcatgcaaaatgtccttcattattttcagcagattggcatatcttggtattatttagttaacaaaaatatatatatattgagcacctaccatgtgcaggcactttctaagcattgaaaatacagtaaacacaacaaataactttttcttcatggaacgtacatcctagtagggaaagatagacagtatatacataagtacattatatagtatattagaagaagataaatgctatgtaaaaaataaaaaagcgttaaaaggagaaagaatgaccaattggatgtaggtaggtgtaatttaaaataggtggttgaggatattctcaccaagaaaatgaaatttgaggaaaagatataaaggaggtaagtgagtatgagctatgcagatctagagcaaaattattctaggaaatacaaatgcaaaggccctagtatttaaggcaaggaggccagtagtgttgaggtcaatcatcgagaggaagaggaaaagggaagaaatcagagaggtaatggaggtcccataagccattgtggttactctgcattttactctgggtgggctgttaagagtttgagcagaggaataccatgatttggtttaggttttaaaacagtcactctgtttggcattttaacgacagattgaggctgggcgcggtggctcacgcctgtaatcccagcactttgggagaccaaggcaggtggatcacgaggtcaggagatcaagactatcctggctaacacggtgaaaccccgtctctactaaaaatacaaaaaattagccgggcttggtggcaggcgcctgtagtcccagctactcgggaggctgaggcaggagaatggcgtgaacctgggaggtggagcttgcagtgagctgagattgcgccactgcactccagcctgtccagcctgggcgacagagcgagactccgtctcaaaaaaaaaaaaaaaaaaaacaaccggtttgtgggccagccgcggtggctcacgcctgtaatcccaacactttgggaggctgaggtgagtggatcacttgagatcaggagttcgagaccagcctggccaacacgatgaaaccctgtctctattaaaaatacaaaaatcagccgggcgtggcggtgcatgcactccagcctgggtgacaaagcaaaactccatctcaaaaaaaaaaaaaacagattgtaggggtagatagatagtggggctatgggtagaaatagttttaaggctattcaggtaattatgtgagagatgatagtgattgcagcagagtgacagagttaaagatgaagagtagtggttcaattttggatatcttttgaaattacagccaaaaaagtttgctaatacatttgttatagggtgtgaggggggaatgtctccaaggttttgggcctaattaattggaatgaaagatttatgatttactgaggtgaagaagatagtgggaggaacaggttttagagtaggcgttggggaggaaggtcaggcagtcagttgcggacatgtaaaatttgaaatgcctttttgtctaattgacggtacagagtaagcagttataagcaacacgtggagttccatggagagtggtccaacctacatttcaaatttttgaagtctttatatagaaatggcatttagagtctggactggaagagattcctaaaggaattgaatagttagacaagcattgtgaggactggaccaagaacactaacctttagcaactgggagatgagtaggtgttggcaaaaaagactgagagaggtggtcaaagaagtaggaggaaaacttggaaaatgaggcatctttggaggcaaacgaataaactttcaaggaggaggggcaatgaagttgtcactgaggacctgacaaaacaggcttaatggaataataaggcaaaaacctgatagtggaatcaggagagaatgggagacgaggaattgcagatagctttttggaggatatttctgttgacggtcactctgtcactctgctccaatcgctatcatctctcacatgaattacctgaatagccttaaaactatttctacccatagccccactatctatttacccctacaatctgggtttttttttttttttttttttttttttgagatggagtggtgactggaagaggagagaaataaattgttttgttttttaagatggaagaaattacatcacatttgctgcatgattgtgagagtaatccaagtaaatttagggaagcatttatgaggaaaaataatgagaaaattgttagaacaatgtcctttaatagtacataggtggaagggttggccttaggaagttttaatgggaaaggagagaatctagggacatagctacaggaaagagtggatacagtgggaacttgtgaaagttctcttctaattgcttctgttttcgcagtaatataggaacaaggttttcagcttcaaagagcttggagaatgttagaagtgtctaaaagaaggggagcatgaatgatgtagaaatgggtatagtgggatccaggaaccactaaggcctacttgaagttaatgatcattaataaagtgagattagtcagttttataaagccattttgttatggtgattggataattattgtttaatatcaatgtgaagactttatagcctgcattatctttttaaaaaaatgtttctagataacatagatctttggagtcactcatgataatcaaaagttagtattaatattaaatctgcaaatgacaagggtccactagtttccttcttttttctcctacacataagtggtttttaaggttttattcaaatgctatataaattcttattctgcttttttcacccaatattttatcgtatgtattttttcatccaaattctcttattttacttttaccatattttacccttcagaatgtttccattggaattgttggtaaagacttggagtttacaatctatgatgatgatgatgtgtctccattcctggaaggtcttgaagaaagaccacagagaaaggcacaggtatataatcataacacaagaggctttagttctattgtaagctgctgttcttaccacaactgtgtctgtaaattttccattttgtcttaaatattgaaatgggcccataattcaaatggcaacaggaaaattaagaactgagtaaagttaaatattgaaagggcagtgatctccataaacacaaaaagggggccgggtgcggtggctcatgcctgtaatcccagcactttgggaggccgaggcgggtgaatcacgaggtcaacagatggagaccatcctggccaacatggtgaaaccccgtctctactaaaaatacaaaaattagctgggcgtcatggcatgcacctgtagtcccagctactcaggaggtgaggcaggagaatcgcttgaacccgggaggcggaggttgcagtgagctgagatcctaccactgccctccagcctgggcgacagagagagactctgtctcaaaaaaaaaaaacaaacacaaaaagggagaagtgttgattatttggttatctattgctaggtaataagctaccccaaaacttaggggctagaacaacaaacactacttctcacaattttgcggctgactggggctcacctacatggttctttgctggtctcacctgggatctctcaaacattgcagtcatttgtggggtgcaactggaacacccaagataacttcagtcacatgtcttctttactcacaccttttaggtgtcttagaggagcatctagaaggcagagacctctgctaggatgactgagcctctgtccacgtagtttcagggccgcttcttcagcagggtctctctagcatattggcaactcagggcttgcaaaagtcagaagtgaaagccgccaggcattcttaaggctgagatgcaggactggcacaacatcacttgtacacattctgttggttaaagtgagtcactggcctggcccagattctgtttgagcagagactgggagaaatgctcattgggggccagctttggacactaagatggctcttcataaagagaaaagcatcaagaagtgaatctcaggtgaaatatgggtctttttgctagatgtttagaatatacatttgctatttatagatgcttatttgatagcagtgtaattgaaagtaaaaaagaatctagtatggaaatttctacagcatgagtttttttaacttggaaaggatattgttggtactatttgggggatcaagatttgcaatatttaaactgtttttggtaaaaactagcactgttgggaagaatgctgtggaataccacaaactagtttggcaaaggggaaaagaatgtctaaaaagtgctgattgtattttaaacatagtagtgataatacaaggaaagcttttattcctgagcaatgcaaagtacgataaaatggtggaattgttcaatgatatttaggttttcagaaatgtgaaattatatatacagttatcctcgaacagtgtggggtttagtggtgccaaaccccagcatggttgaaaatccacatataacttttgactcctaaaaatcttctgatagcctgctgttgactggaagccttactgataacataaactgacaattaacacataaatagactagtttcttttttgttgttttttgagacaaggtcttgccctcttgtccaggctggcgtgcagtggtgccatcatagctcactgcaaggttgaactcctgggctcaagcgattctcctaccttcccccgcgccaccaagtagctgaaactacaggtgtgtgccaccatgcccagcacattttttttctttttagtagagatgggatctcactgtgttgcccaggccagtttcaaactcctgggcttaagcaatcctcatgcctcagcctcccagagtgttgggattacaggtgtgaactgctgcacccgaccaaatagactattttctacatatattttatgcattcggcatacctaactttttcttactctttttttttatatttctaggctacacagttggtctgctagtttatatttattggaaaacaaacaaacaaaaaaaaagcttcaccctaaacaatgttagagtaaaagcaaacaaaaaagaaaaagaaaaagaaaaaaaaatctgcatataagtggaccctcactgtttaaacctttgttgttcgagccaactgtattttttttaaataaaaaatctttattccctcaaatcatgagcactcaaggagaaaaaaaatactgctcagaaatgttaacaggacagtgaactaaaactgagtattcagaatatctctttacccctttttctcaatttttaataacgtaatatttgtgattagatgtgtatattgatcaagtgttcattttacatattttctttttttctttccctgttaagcctgctcaacctgctgatgaacctgcagaaaaggctgatgaaccaatggaacattaagtgataagccagtctatatatgtattatcaaatatgtaagaatacaggcaccacatactgatgacaataatctatactttgaaccaaaagttgcagagtggtggaatgctatgttttaggaatcagtccagatgtgagttttttccaagcaacctcactgaaacctatataatggaatacatttttctttgaaagggtctgtataatcattttctagaaagtatgggtatctatactaatgtttttatatgaagaacataggtgtctttgtggttttaaagacaactgtgaaataaaattgtttcaccgcctggtatattgggtttttgtttttttaagtagcttcaactctatatagtagtctgggattacaactggtcatttgcctaattaaattgccttatttttagtgatggagaaaaataatacctcttatctgtcatagccttataacagttctccagtgtatgaactggctgcatgagaatccatggagatttggtttagaatacaaatttcagggttcaactgtggtgattttaattaaaacttaagaaaccaccacttcctgatataagcatcagttatcatatgaatggttttctttccaaccagcaaatggcagtagttgtagctctggtctttgaagggaacttctgtaaaaacaacacatgggaaattgtaatcccaaaccttttatcctctccagccccactccagcatgatctttaggctgccttctgttattcccatgagtggcatactcaggtattgcagaaccatttttatcttagaccatgtaaactgaaattagaggaaatctgatttaaaaaaaaaaaccataatcctggctgggcgtggtggctcatgcctgtaatcccagcactttgggaggctgaggtgggcggatcacttgaggtcgggagttccagaccagcctgaccaacatggagaaacctcatctctactaaaaatacaaaacaattagctgggtgtggtggcacatgcatgtaatcctagctactcaggaggctggggcaggagaatcgcttgaacccaggaggcagaggttgcagtgagccaagatcgtgccattgcactctagcctgggcaacaagagtgaaactccatctcaaaaaaaattttaatttaatttaatttttaaaaacccataatccggccaggcgcggtggctcacgcttgtaatcccagcactttgggaggccgaggcaggcggatcacgagatcgggagatcgagaccacggtgaaaccccgtctctactgaaaatacaaaaaattagccgggcatggtggagggtgcctgtagtcccagctactcggagaggctgaggcaggagaatggcgtgaacgcgggaggcggagcttgcagtgagccaagatcgcgccactgcactccagcctggagcgagactctgtctcaaaaaaaaaaaaaaaaaaaaaaagacaaaaaccataatccaaaatttggctgctgacatctagaggagttattttattttctgagataatacatctttctgaagaaaaattcatttatagatagtaacccattttagacctaattctaattagctgctattggctttgggcaagttacttagctcttttttaaggaaaccctttggagaattatagtgagggttaaaagggagaatttatgtgataacaccttttaaactctaaaattcatagtttattttttccccccaactttcccaaatcttcaaaagccttagtaggtttaaatccccctgatttcttagagaatggtaaaagtagctctgggagccttattaagggaaagatgtctaagtactggaatgtgagagatgtcagtttctccagcagtagcctcaggaatctaccatgcaagcttgggagttagacgcaagtaccatgtggctatttgacctacagtggagttgcatcaagcacatgtaactttccacacacatacacacacacacacacacacacacacacacaaaatagtgaactcaggaactcccacctgcctctacactcaatgggtatttagtctggggagggagcataagtgggaaatataataatctgccctttgcttaggcagatctctcttccacatgcattccattgggtgagcctctgtctttgctgaatgattctgctgtttaaagatattgtggctcatacctgtaatcccagcactttgggaggccgaggcgggtggatcacctgaggtcaagagttcgagaccagcctgggcaacatggcaaaatcccgtctctactaaaaatacaaaaattaaatgggcatggtagcacgcgcctgtagtcccagctactcgggaggctgaggcaggagaatcgcttgaacctgggaggcagaggttgcagtgagctgagatcatgccactgcactccagcctggccaggtgacagagcgagactctgtctcaaaaaataaaaccaaagatattgttatgtttatcattgtggaacatgcacctgttccacaaatacaaaccactagttggcttgtattcagctaaaaaaataaatattctgtattatactttgggagcaatttaagtaattttttcaatgtgatttttagtcttatatactgactttagaacttaaagtcctccccactccagtaatactcaaccccactgtatatacagttcattgtgatgccctttcatgtttagtctgttgtactcacatattccatttagtctgttgaataattacaaacagtaaaatcctaatgatgttttataaagcctgtcactttgatacaaagatactcaattcacctggaatttattgagcatgtatgtgtgcagctctgaagaactggcatggaataaaaggcagtggctgggtgtgttggctcacgcctgtaatctcaacactttgagaggccgaggtgggaggattgcttgagttcagttcaagaccagcctgggcaatatagtgagaccccatctctacaaaaatttttaaaacttagcctggtgtggtggcacacacctgtggtcccagctactcaggaggctgaggtgggagaatcacttgagtccagagtctgaggctgcagtgagctatgatcatgccgctgtactccggcctgggtgacagagtgagactcttgtctcaaaaaaataaaaataataacgtagatgacaggattcaggtcctagttctaactcagtgtttggccattacatgatttggggcaagtccctattctctaggccttgactttttagataccacaatttctatggtccttgataaaatgacaaggtctttgctctgcatttataatttaaaggcattcaaaattatataattacatcttagagtaaaacagcccaaacaaagtgtattttacaacagatcaggaagagttaatgaggttaatattaaggtccttatacccattcaaaaagctttgtacttaagaatatggaaaaatatatgcactgccaatgacaattgtaggttcagatctaactaaagtaatatgtaaaacattacattttcttgccttttcatatttagaacttaatgacttggggtcatgagaaacctcaaagttattctgtaacagaatgaacctctggggcaaatgaagtctgtacggtttaagtcctacaccatgatggccctaaactgagctttcttactgtaaatctagtttttataccttttttggcctcatttcttgctgacagattgtcactttttggtaagttaagtgggcttggaaaccagataactgcatttgtaaaacttccatgttaaaaacgaatacacagaaaaggaacaaactgttgtacacacacccgggattgatctcaggggaattatgctcagtaaaaaaatccaatctcaaaagattacattgtataattccatttatataacattgagatgataaaaatcatagagaattattagtggttgccacaggttagtgtgggaggtggctatggctatcaaaggacagcatgagaatccttgtgatagaactgttctgtctcgactgtgttggtgattacacacatataagcatgataaaattgtctacaagtgaatataaaaacgagtacatgtaaaactagtgaagtctgaacaaggctgggtgaattatgtctgtcaatttcctgaaattgatattgtactataactatgcaagatgttaccattgggagaaactaggtaaagagtatatgggatctctgtattcatgtcactctaccattaagattaaatattaaaaaaaatgaatgcacagaatcagagaggcactcttaaagtgctgtcaacacatggcctttgaatacaattttgggtgctcaaagaatttgtagattgcttgatggttctaaaaagagaaagctcaaaagagctagatcctacataaatgaggtactattggtgttccatcttcctgagatgaacctgttaactagggcagttgccgtcagatctgtttttattcgcagtattttgcttaagctttaagatattttgttattaataattggccataaaacccttttgtgggcagagggaggtgtaggggcggggcgtgctatggaacttcaaatgggcaaaaccgaaagtactatggctgattgcagctgtaacaggtctttggagatacgtaaaatcctttaaaacagtgactgtctccctttatgcataaaaattttttctaatctactgggtgctcagaaaggatcacggaaagaggccattattaaataaaaagcagaaattataccaatgtgactttggattttcaaataactccagccctacctgcagagaggcagattcaaactactagcgatgttaagaactgaaatggattttaatctagtgataattaataaaataactgaattaccttcccaatagtattagttactttcccagtttattagggtgtggacaagaaaaaggattactgggtttccactttctagtccagagctctttttcacgggaacagagccctgtaaaagtttccctctctccaagcactttctccccttgactgttcctgaagaaggaacgatttccagttagcgtttaaattagcatagtgcttaactcagagcttggcttgcagggaaaactagaaaatacgtggtttcattgctctgcggcctaatcaaaccctggacaagagaagaggaagaaaataggatatacttgcagcgcgcaagcgctgcacaaagaaagcatgtcctctctgagtcgccgtaggtgctaggtggctgtggcttcggtcgttaccccacccccttccacgtcagccaaggactctggagccgccgccgccgctgctgcggttcatatccggagtagacggagccgcagtagacggatccgcggctgcaccaaaccactgcccctcggagcctggtagtgggccacaagcccccagtcccagaggcgtggtgggtcgggcagagtcggaagaactggctttctagctggaagatgcggaaggggagcgactaggccgcttgcgtctgggcctggcagaagggaccgggtgggggtacgggtgggggtgcgggtgggggtgggggcggagggctaggaagctccgggtcggacgctccatcccgtcctttgtattggccgggggtcttttccctcccaagacccctaggcgtaccctttcaggcctagggctgctttgctggaggaaggggaggaggaagcgggtggggcgaggtgggggtgcagcgcgttgattaagggacccgcggacatagagtcggaacccaccaaggaccgcgataaagcgctttagggttttggcagagtattcaggcacaaggtctcttaacttgagcatgcagattgtgtgttgtgtaaaaaccatacggtccataacattgtggggtgtggctggggggactgtcactgttctgtgggccttcattcggctatacagcattctcaaacactggaccgggatgcgatgagggagtgatagataatataccttatgccagagctgataatgtggtttttactagaatttatttttatgggaacacgatatagattgacctgccctttctaatactttaaaaggtcactataggtacttgtttgtgggtttttttttttttaatttgtaatgatatgtctgtgtttatttttctagattttctggcatccttaaatcttgtgtcaaggattggttataatataaccagaaaccatgacggcggctgagaacgtatgctacacgttaattaacgtgccaatggattcagaaccaccatctgaaattagcttaaaaaatgatctaggtaaacttcgatattattttgagaatgaaatgaaaaaagaaaaaacaaaaataaaaaactcatatttcatattcctttataattagaaatgcttaatttttgtctaaagtttttctaggatctcttcgatagaccttttattaaaaatgcgaacttctttaaatattggttgtttgaaatagaacatctcagtttatcttagtaaacctaaagaaattgtaatagtttagatattcctcaaaatgtcataatttttgtagacttcaatatattaatgtggctgattattttctctaggcaacaggttgaggatgtgtattggaatatcttaattccatcgtgcacttaacttcatgttacttagcttgtaaaaccaaaagaactttgttctttggattacccacccaaacaattaggtgaacactggaataaacatgtattttccagaaaagtttaccttttcattttttatgcatttttgcaaataagaaaacaactatatttctgaactttttgtaatgtttaatttttgtgggtacacagtagatgtatatatttatggggtacatgaaatgctttgatacaggcatgcaatacataattatcacatggaaaaatggagtatccatcccttcaagcatttgtcttctgtgtgacaatccagttacactttcagttatttttaaatgtccaattaaattattattgactgtagttaccctgtgtgctatcaaatatcgggtctaactcattttttctgtacccattaaccatctccacttccctaccactacccttcccacctctgataaccatccttttactctgtctccgtgagtttgttttgatttttagcttccacaaataagtgagaacatgtgaagtttgtctttctatgcctgacttatttcatgtaacataatgacctccagttccatccatatttttgcaaatgacaagatctcattctttttttatggctgaatagtactccattgtgtatatgtaccacattttctttatacatttatctgttggtggacacttaggttgctttcaagttttgactgttgtaaacagtgctgcaacaaacataggagtccagatatctctttgatgtactcatttcctttcttttggatatatacccagtagtcggattgctgaatcgtatggtacccctgtttttagttttttgaggaccctccaaactgttctccatagtgggtatactagtttacattcccaccaacagtgtacgagggttcccttttctccacatcctctccagcatttgtttttgcttgtcttttggataaaagccattttaactggggtgagatgatatctcattgtagttttgatatgcatttctctgatgatcagtgatgttgagcaccttttcatatgcctgtttgccaattgtatgtctttgtgaaatgtctgttcaaatcttttgcccatttttaaatcagattatgagttttttttttttcctgtagagttgtttgagctccttacatatctggttattaatcccttgtgagataggtagttagcacatattttctcccattctgtgggttgtctcatcacgtatgtcgattgtttcctttgctgtgcggaagctttttaacttgatgtgatcccatttgtccgtttttgctttggttgcctgtgcctgtggggtattattcaagaaatttttggccagaccagcgtcctggagatttttcccaatattttcttgtagtagtttcatagtttaaagtcttagatttaagcctttaatccattttgattttatttttgtgtaagttgagagatgggggacaagtttcattcttctgcacatagttttccaagcaccatttattgaagggactgtcttttctccaatgtatgttcttggcacctttgtcaaaatgagttcactgtaggtgtatggatttgtttcttggttctgttattttccatgggtctttatgtctgtttttatgccagtaccatgctgttttggttactgtagctatgtaggataatttgatgtcaagtaatgtgattccttcagttttgttctttttgcttaggatagctttggctattctgggtcttttgtggttccatataaattttaggatttttttttttttctgtgaagaatgtcattggtattttgatgggaattgcattgactctagattgctttgggtggtatggacattttaacaatactgattcttctaatccatgatcatggaatatctttccatttgttgatgttctcttcaatttctttcatcagtatttatagttttcattgtagaaatctttcatttatttggttaaattaattcctaggtatctaattttatctgtgggtattgtaaatgggattagattacttcttcaatttctttttcagattgttcactgttggcatatagaaatgctactgatttttgtatgttgattttgtgtcctggaactttactaaatttatcatatttctgaattttaaaaatgtataccgtgtctcctttttgtgagtgattctgtcaagaaaaaaaaaatttataattaatatgctttccaaagtaatgattcttgtttaattgaactgctaaaaataaatacaacttaaactgataaatattgtttaaacagagcagagtgaaaattatgcttcaaatatagaaaggatcttttagaagatagtttgcagtttgaaaagaaacttaatattttacttgcctattcccacttcttaatcagcagtaatggaatacctcctgattctaggttacttaatactaggtttctattgaggtctatttttagagaagggaaaagaaacccagttttatgatatttaaaatgataccattatatacataagccacatatatttcccttttttcatgttcatgtaggatagttgaatgcaaaatagtgaatacattcattagtgtttttcctcataatttaaaaattttcattgttagatcctcaggatacctaaggttatagctaggaaggtaaagaataaaatctgcccttagttggaacaatgccctagtcttaattgaagctgccttagctaccttcctccaaccaataaataaatacatactctccagtttaatgtatatttttgccattaagaagagttgagactgggcatggtggctcatgcctgtaatcccagcactttgggaagctgaggcaggtggatcacttgacttcaggagttcgagaccagcgtggccaacatggcgaaaccccatctctagtaaaaatacaaaaattttaagtggctattaaatgaagagttctgtgggccagatgaaccaccgcatctgaccctcagaactctgtttcatagccgcttagctctaatcattagaaatgtatttctcatatttaggcccaaatctggttcccggtaactactacccattagttgtagttcttttcttcataatggccctaaggttattgaagacttgtaatcattctttgttctccccttcccaagataattcatttattttgatgatctaaacagttgtagtacagtgtgctactacatacttctctgcctttgagttttggatccagaagatttttagtactataaattcttcagtatgcaatgataatggtgtgaaattttagatagttttgcgtaaaatactttatgttgcagagtttttaggctaaataacagtaaactagcattttatctttaatgtgtcatccttaattctaaataatgactactaatctagaacatttgaattacctcccagttttccagatgatatcttaagaaagattctaaagttttacagcctgcctgcagaactatgatgagattttagaaataatccactactttagttttcagcctttttgagtatgacgtttctctttctaatgttaaaaaagttacatatttatcctcccataatagtagttttaactttgttaaaatgcacacaaatagctaaaagctgttttgaattcaaaatcaattaatagtatgtatttacattttgaaaaatagctatatgtgttttgaaacacgtttacttggtatgactgtagattcatggagcctgcattaactcaattggttaggaaccagaaatctaatccagcgccttcatattatatataaagagtctgatttccagagataaatgact

SEQ ID NO: 972 - DNA, 2479 bp, Homo sapiens
tttcggcagcacctccttgattctcagttttgctggaggccgcaaccaggcccgcgccgccaccatggtacgttgaatcccgatctctggaaggtttagggcagagctctggtgactgggggatgacgagccacctctcctgtcatccttagcgtcgcccggtgccacgaggtatgagagcctcggcagacggccgggctccggcagtgattcagcatctccggcctggccgggctaggggttatcggtagccagtgcggcctttccaccgctttcgcttcccggggagcctccgacacttcctcctcggtcagctagatgagttcgcccctcaggttccttcagtggagtagattctgagcggtccagaatagctcctagtgctgtgtatgggagaggagaagacagagacttgacttggaggcctacctgtaccaccagtgcggacttgacccccaggtttgtgttcctggacagcgtccgttttcctgtttcgaaatcagtatgacaatgatgtcactgtttggagcccccagggcaggattcatcaaattgaatatgcaatggaagctgttaaacaaggttcagccacagttggtctgaaatcaaaaactcatgcagttttggttgcattgaaaagggcgcaatcagagcttgcagctcatcagaaaaaaattctccatgttgacaaccatattggtatctcaattgcggggcttactgctgatgctagactgttatgtaattttatgcgtcaggagtgtttggattccagatttgtattcgatagaccactgcctgtgtctcgtcttgtatctctaattggaagcagtatcctttttatgttagcatttatggatatgaactttgaagggttttgatacttgtgttaattattaggaatataataataatatgacataggtaagattgtgaaaactttaaaacaacaaattggattgctctttcattagcctttataagcaatttatatttgctagacacaaataagcccaacttcaggaaaatcatctaagcatctttttagaggggatttaaagtttcttaatggttctagatgtcccaagaaatcctagaccccttgtatccaaaacaaatcaggttttagatgggaagaaattattttgctggcactctttcttaggttcggtagaaagtcaaacattttatattaggccaaagaaatagtgtcctattgcattatttctctggtggattatgcaacaattaaagaataagccagagacctttgttaataatgtataatttgaaaataaagacagtacttcattccttgttaaaacaagctcgttaaccagtctaagagacccagataccaacacaacgatatggccggagaccatatggtgttggtctccttattgctggttatgatgtaagttcattgaatattgttatatgttaatgattttttttaattaactagaaatttttataatttttagttcaaccaaagtaaataattatgtggtgtatttatttctatttgtaggatatgggccctcacattttccaaacctgtccatctgctaactattttgactgcagagccatgtccattggagcccgttcccaatcagctcgtacttacttggagagacatatgtctgaatttatggagtgtaatttaaatgaactagttaaacatggtctgcgtgccttaagagagacgcttcctgcagaacaggacctgactacaaagaatgtttccattggaattgttggtaaagacttggagtttacaatctatgatgatgatgatgtgtctccattcctggaaggtcttgaagaaagaccacagagaaaggcacagcctgctcaacctgctgatgaacctgcagaaaaggctgatgaaccaatggaacattaagtgataagccagtctatatatgtattatcaaatatgtaagaatacaggcaccacatactgatgacaataatctatactttgaaccaaaagttgcagagtggtggaatgctatgttttaggaatcagtccagatgtgagttttttccaagcaacctcactgaaacctatataatggaatacatttttctttgaaagggtctgtataatcattttctagaaagtatgggtatctatactaatgtttttatatgaagaacataggtgtctttgtggttttaaagacaactgtgaaataaaattgtttcaccgcctggtatattgggtttttgtttttttaagtagcttcaactctatatagtagtctgggattacaactggtcatttgcctaattaaattgccttatttttagtgatggagaaaaataatacctcttatctgtcatagccttataacagttctccagtgtatgaactggctgcatgagaatccatggagatttggtttagaatacaaatttcagggttcaactgtggtgattttaattaaaacttaagaaaccaccactt

SEQ ID NO: 973 - protein, 124 aa, Homo sapiens
MGPHIFQTCPSANYFDCRAMSIGARSQSARTYLERHMSEFMECNLNELVKHGLRALRETLPAEQDLTTKNVSIGIVGKDLEFTIYDDDDVSPFLEGLEERPQRKAQPAQPADEPAEKADEPMEH

SEQ ID NO: 974 - DNA, 1724 bp, Homo sapiens
gccggccgcccaacagggacgcgagccgggaccacgccgacccagcgtgcccaggccgaggaaagcgcggcggcggcagtccgaagacccaccgggactgaaagagaaggacgaggtcatcttcggacgggaggggcaagccagccatcctgggaccccaggcgtgcaggttctctttgagggtattccaccctgcaaaaagcatgtattcatggtcagctctcagcaaggccagtagcagagtggtaaaggccttggccctccaaggctgggaaaagacaatgacaagtcaaatccagacctatgttggatgttggtctactaggtgactgtctcctggaaatgttatgcagctcagcaaggtgaagtttcgaaatcagtatgacaatgatgtcactgtttggagcccccagggcaggattcatcaaattgaatatgcaatggaagctgttaaacaaggttcagccacagttggtctgaaatcaaaaactcatgcagttttggttgcattgaaaagggcgcaatcagagcttgcagctcatcagaaaaaaattctccatgttgacaaccatattggtatctcaattgcggggcttactgctgatgctagactgttatgtaattttatgcgtcaggagtgtttggattccagatttgtattcgatagaccactgcctgtgtctcgtcttgtatctctaattggaagcaagacccagataccaacacaacgatatggccggagaccatatggtgttggtctccttattgctggttatgatgatatgggccctcacattttccaaacctgtccatctgctaactattttgactgcagagccatgtccattggagcccgttcccaatcagctcgtacttacttggagagacatatgtctgaatttatggagtgtaatttaaatgaactagttaaacatggtctgcgtgccttaagagagacgcttcctgcagaacaggacctgactacaaagaatgtttccattggaattgttggtaaagacttggagtttacaatctatgatgatgatgatgtgtctccattcctggaaggtcttgaagaaagaccacagagaaaggcacagcctgctcaacctgctgatgaacctgcagaaaaggctgatgaaccaatggaacattaagtgataagccagtctatatatgtattatcaaatatgtaagaatacaggcaccacatactgatgacaataatctatactttgaaccaaaagttgcagagtggtggaatgctatgttttaggaatcagtccagatgtgagttttttccaagcaacctcactgaaacctatataatggaatacatttttctttgaaagggtctgtataatcattttctagaaagtatgggtatctatactaatgtttttatatgaagaacataggtgtctttgtggttttaaagacaactgtgaaataaaattgtttcaccgcctggtatattgggtttttgtttttttaagtagcttcaactctatatagtagtctgggattacaactggtcatttgcctaattaaattgccttatttttagtgatggagaaaaataatacctcttatctgtcatagccttataacagttctccagtgtatgaactggctgcatgagaatccatggagatttggtttagaatacaaatttcagggttcaactgtggtgattttaattaaaacttaagaaaccaccactt

SEQ ID NO: 975 - protein, 267 aa, Homo sapiens
MQLSKVKFRNQYDNDVTVWSPQGRIHQIEYAMEAVKQGSATVGLKSKTHAVLVKRAQSELAAHQKKILHVDNHIGISIAGLTADARLLCNFMRQECLDSRFVFDRPLPVSRLVSLIGSKTQIPTQRYGRRPYGVGLLIAGYDDMGPHIFQTCPSANYFDCRAMSIGARSQSARTYLERHMSEFMECNLNELVKHGLRALRETLPAEQDLTTKNVSIGIVGKDLEFTIYDDDDVSPFLEGLEERPQRKAQPAQPADEPAEKADEPMEH

SEQ ID NO: 976 - DNA, 1835 bp, Homo sapiens
gccggccgcccaacagggacgcgagccgggaccacgccgacccagcgtgcccaggccgaggaaagcgcggcggcggcagtccgaagacccaccgggactgaaagagaaggacgaggtcatcttcggacgggaggggcaagccagccatcctgggaccccaggcgtgcaggttctctttgagggtattccaccctgcaaaaagcatgtattcatggtcagctctcagcaaggccagtagcagagtggtaaaggccttggccctccaaggctgggaaaagacaatgacaagtcaaatccagacctatgttggatgttggtctactaggtgactgtctcctggaaatgttatgcagctcagcaaggtgaagatgggctctcactaccttgctcaggccagtctcgagctcctgtccttaagcagtccccccaccgtggcctccctgagtgctgggattacagccgtgagccaccatgccaagtttcgaaatcagtatgacaatgatgtcactgtttggagcccccagggcaggattcatcaaattgaatatgcaatggaagctgttaaacaaggttcagccacagttggtctgaaatcaaaaactcatgcagttttggttgcattgaaaagggcgcaatcagagcttgcagctcatcagaaaaaaattctccatgttgacaaccatattggtatctcaattgcggggcttactgctgatgctagactgttatgtaattttatgcgtcaggagtgtttggattccagatttgtattcgatagaccactgcctgtgtctcgtcttgtatctctaattggaagcaagacccagataccaacacaacgatatggccggagaccatatggtgttggtctccttattgctggttatgatgatatgggccctcacattttccaaacctgtccatctgctaactattttgactgcagagccatgtccattggagcccgttcccaatcagctcgtacttacttggagagacatatgtctgaatttatggagtgtaatttaaatgaactagttaaacatggtctgcgtgccttaagagagacgcttcctgcagaacaggacctgactacaaagaatgtttccattggaattgttggtaaagacttggagtttacaatctatgatgatgatgatgtgtctccattcctggaaggtcttgaagaaagaccacagagaaaggcacagcctgctcaacctgctgatgaacctgcagaaaaggctgatgaaccaatggaacattaagtgataagccagtctatatatgtattatcaaatatgtaagaatacaggcaccacatactgatgacaataatctatactttgaaccaaaagttgcagagtggtggaatgctatgttttaggaatcagtccagatgtgagttttttccaagcaacctcactgaaacctatataatggaatacatttttctttgaaagggtctgtataatcattttctagaaagtatgggtatctatactaatgtttttatatgaagaacataggtgtctttgtggttttaaagacaactgtgaaataaaattgtttcaccgcctggtatattgggtttttgtttttttaagtagcttcaactctatatagtagtctgggattacaactggtcatttgcctaattaaattgccttatttttagtgatggagaaaaataatacctcttatctgtcatagccttataacagttctccagtgtatgaactggctgcatgagaatccatggagatttggtttagaatacaaatttcagggttcaactgtggtgattttaattaaaacttaagaaaccaccactt

SEQ ID NO: 977 - protein, 304 aa, Homo sapiens
MQLSKVKMGSHYLAQASLELLSLSSPPTVASLSAGITAVSHHAKFRNQYDNDVTVWSPQGRIHQIEYAMEAVKQGSATVGLKSKTHAVLVKRAQSELAAHQKKILHVDNHIGISIAGLTADARLLCNFMRQECLDSRFVFDRPLPVSRLVSLIGSKTQIPTQRYGRRPYGVGLLIAGYDDMGPHIFQTCPSANYFDCRAMSIGARSQSARTYLERHMSEFMECNLNELVKHGLRALRETLPAEQDLTTKNVSIGIVGKDLEFTIYDDDDVSPFLEGLEERPQRKAQPAQPADEPAEKADEPMEH

SEQ ID NO: 978 - DNA, 1493 bp, Homo sapiens
atagactgcgctaccctgcgccgccgccgtcaaactcccgcagacttctctgtagatcgctgagcgatactttcggcagcacctccttgattctcagttttgctggaggccgcaaccaggcccgcgccgccaccatgtttcgaaatcagtatgacaatgatgtcactgtttggagcccccagggcaggattcatcaaattgaatatgcaatggaagctgttaaacaaggttcagccacagttggtctgaaatcaaaaactcatgcagttttggttgcattgaaaagggcgcaatcagagcttgcagctcatcagaaaaaaattctccatgttgacaaccatattggtatctcaattgcggggcttactgctgatgctagactgttatgtaattttatgcgtcaggagtgtttggattccagatttgtattcgatagaccactgcctgtgtctcgtcttgtatctctaattggaagcaagacccagataccaacacaacgatatggccggagaccatatggtgttggtctccttattgctggttatgatgatatgggccctcacattttccaaacctgtccatctgctaactattttgactgcagagccatgtccattggagcccgttcccaatcagctcgtacttacttggagagacatatgtctgaatttatggagtgtaatttaaatgaactagttaaacatggtctgcgtgccttaagagagacgcttcctgcagaacaggacctgactacaaagaatgtttccattggaattgttggtaaagacttggagtttacaatctatgatgatgatgatgtgtctccattcctggaaggtcttgaagaaagaccacagagaaaggcacagcctgctcaacctgctgatgaacctgcagaaaaggctgatgaaccaatggaacattaagtgataagccagtctatatatgtattatcaaatatgtaagaatacaggcaccacatactgatgacaataatctatactttgaaccaaaagttgcagagtggtggaatgctatgttttaggaatcagtccagatgtgagttttttccaagcaacctcactgaaacctatataatggaatacatttttctttgaaagggtctgtataatcattttctagaaagtatgggtatctatactaatgtttttatatgaagaacataggtgtctttgtggttttaaagacaactgtgaaataaaattgtttcaccgcctggtatattgggtttttgtttttttaagtagcttcaactctatatagtagtctgggattacaactggtcatttgcctaattaaattgccttatttttagtgatggagaaaaataatacctcttatctgtcatagccttataacagttctccagtgtatgaactggctgcatgagaatccatggagatttggtttagaatacaaatttcagggttcaactgtggtgattttaattaaaacttaagaaaccaccactt

SEQ ID NO: 979 - protein, 261 aa, Homo sapiens
MFRNQYDNDVTVWSPQGRIHQIEYAMEAVKQGSATVGLKSKTHAVLVKRAQSELAAHQKKILHVDNHIGISIAGLTADARLLCNFMRQECLDSRFVFDRPLPVSRLVSLIGSKTQIPTQRYGRRPYGVGLLIAGYDDMGPHIFQTCPSANYFDCRAMSIGARSQSARTYLERHMSEFMECNLNELVKHGLRALRETLPAEQDLTTKNVSIGIVGKDLEFTIYDDDDVSPFLEGLEERPQRKAQPAQPADEPAEKADEPMEH

SEQ ID NO: 980 - DNA, 38640 bp, Mus musculus
ctggatgctgccttgctcccaccttcatgataatggactgaacttcttttttttttttttttttttcagagcttttatatttgtgtttattcttcatttaacttttttttaaaacactactatagttgaatattaaaacaaaaacaatagccaagtagtgagcttattatgattacagtccttcccacattcactactgcatacagaatgtcaaagagtgactggcccattaagaggtctgacactgaacgccacctctggggtgatgttcatcatcctcatacgcttctccattataatgacgccgtctttcctgatttggatcaaagtccaccagttctacctgatccatttcatcagtctcttctacttccttcctttcaggaaggagtttttccagcaaagagagtttatcaggagagagaaagccattttcaggaaagtttaccttaaactcaatgattagacgtcccttttcatatggctgacggtatattggcataccttcatttagcacacattttatatccccatgcttgacaatctgacctggatgagaggtgatgactatggttcggttgtcaagagtagatagtggcttttggaagccgcacaatgcttcaatcagctgtatgtccatacacatgaaaaggtcttctcctcgccttgtaaaaacagcatggtccttctgatctaacacaatgataatatctcctggctccagtcctggttcttggtctccttcaccgtggaatgttatcttctgaccatctttcatgcctttatcaatatgaacttctaaaattttcttctctcgaactatttttcttccattgcagcttttacatctgtcttttggactgatgcgttctccatgaccctggcactccatgcacactgactgaatttgctgaaccattcctggtccaatctgatgaatccttatctgcatacctgtcccccggcagttgggacagcactctactgctcctttcttaccacctcggccttcacatttgtcacaaatcacattcttttgcagagccagttttcttgttgcaccattatataagtcttctaaggtcactgagagctgatgaacaacatttttacctctcctttctctttgcattcttcctcctcctccaaagaacatatcaaagatatccatgggtgagccaaaaccaccacctgctccgccctctttaatcgcctgctcccctcctttatcatatagttccctttttttggaatcagcaagaacttcataagcttgagaaatctgtttaaacttttctccttcatttggattcttatcagggtggtacttcaaggccaattttctatattcctttttcaattcttcctgggtggcattgggttttacccccaaaacatcgtagtaagcggtttctttcaccattttttacagccggtgagcgggccggcgccggagagcggaaaggagcggagcacagcgcagctcagccacacgctggtcctccaccacccaccgagcgttctggaaagttccgcccggcccgccctggcctgaacttctgaacctgtaagccagtctgaattaaatggtgtctttataagagttgccttggccatggtgtctgctcacagcagtgacacacagcagtgaaccctgactaagacactgggtacagacatgaaacccacctgctggccccaggcacacttcagtgtctggaacctatccacagcaccgctattgaaagcgtacagggtgtcaatcagccactgccggtcagtgtccctcagtgactccagcacagggtgcatgagctgtggggacagagacagacagttaactggtacaaagtcagactttcctcctccccacgctgttaagtgccaggccaacttacaagttctccaaagttaaaaactccctctccgagaagtccagcaagccccagtgtgaaggctctctcttgctgttctgacactacaaaacgatacagtcagtcatatcccagtctcgtctggccttacaaacctcacacaatgaagcacagaagccgttcttagaatggttctggtaccaaacttcagcgtgagctacctcttcaaaagcactagaagtcaggccataccaggagccgtgtatctgcatttcgtggaaatccacgtgtagagttttctccatagagatacgcgacctttcactgttcgccttgtactgccgactggaataacagaccctttgccccaccctgacctcagctccctcgtggttctaacagttcttcagattttctcctctcttggctgcactgctcgctttcctaatgtcttcctgttaccagagagtaatcgaagctttatctgcatttttaggagttgccagtctcctttccaccaacagcttcaagaaagtggtcaaattttctttcaaacacactctccttgtatttttacccaaactctcaggctactttttcttccaccctcagattcttgaaagatggtaatttattcccacaggtatgaactccttttgagcagaggtctcagccatgggatctcacatgcccgtcacccttcactacaatctgacttagctactaatatgggcctgcagcggagtaaagggaccgagaaagatgagcttgcataggatttaactcagcgctagagacaaatatgatataaaatctaaaatgtacattacattaaactttccaccttaaaagtgatgaacacctgacagagctaagacctattcccttcagcacgccatggctgctatgctcagcctcggactccctcaacgctgagaactgtgagggccctgggttacctggcaggtccttgatatccacacagcccagaaaccgtagagcatctttgtagtaggacgcgtggtttccgattgtttgatagtatttactggagagatcatagaaacgactgtgaacggacgtcacaccagggagattgttgagcatctcttcaacatcttcaatggtttcctatacacaagaagtaaaatcgtcttccaacttaaaagatctttaaagtaatagactggcaaaggatctagctccacgccctctaggggcagtgagccaggaagtatgaaggacacagtagaagacagtaacaggcagttagcagagaagacgggagtgcagagctactaaaccaataccaactgagaaataaaccaaaaccacgaccacttgacctccacggggccgtggagaattaaatagtgtgaaaatattaaagctgccaatggggcttcagaggtgcctgtaagcttttgtagaacaactcacattagcacttcacacaaacacacggaggggactgcccatgcacaaggagaccaggcacggaaatgctaacatgaagaacacttgtaattcagtaaatggtttcaaccttttgtaggagaacagctacatatgctgtaaaacagtatatagtgggatatcccacacaggagtaaaaatgagtggtctacacatatcaactcacaaatctgtctcaggaagacatatccatccagtgatggtcaatttatcaatttgagaggatctagaatcacgtaggagggtaactgaggcagggttaccctgaatgtcggccccaccctgagagcgggtgttggaggataaaatgaagccagcactgagcaccagcacttttctactctgctcctgtctgcagacccacggtaaccaagcatttcttgttcctgctgccatgcctttcctgccacagtggactgtaatcgctcagactatcagacaaaataaaccatcccctaaggcccttctcagtcaggtatgaggtcacagtaacagtgcatggcagctgagatggtggctgggggacgaacacagactgaggacacatggtctgtctatgtgctgctctactctcagactggctgaagtctcagggtgccgttatagcacccctcagtacgccatagctaatacctccaaacaaaatgtaatcaggatagatgtgatctgggactaggaagcaataagtaagaccttttcagggcaatgaaaacaaactgtcaactgccacctctggtatttttgttaacattatggttaccaaaattaagccaaaacaaaagcacaagcagtctctagataaacaaggtgaactgacaatattacattggtttctctgctaccactctttatgcctgtctcccaaactgaacaacaacgcaaaggggcacagatggggctgaagagacggcctaactattgagagtatttgttgctactgcaaaggacctaggttcagtccacatggcagcttccatctggctgtaattccagtttcgaggacacaatgctttctttcttttttctttttttggtttttccaagacagggtttctctgtgtagccttggctgtcttggatctcactctgtagaccaggctagcctcgaactcaaagattcgcctgtctctgcctctcaagggctgggattaaaggcacgcgccaccaccgcctgcctaacattctttctctctttctctccaccccctctctttctttttttcatgtaagtacactgtagctgtcttcagacactccagaatagggcattagattttgttatttcgttatggatggttgtgaggcaccatgtggttgctgggatttgaactcaggacctttggaagagcagtcggcactcttaaccactgagccatttcaccagcctccaacacaatgctttctttaggcctccattggcactgcatgcatgtagcgcagacatacatgcaggtacacaccaaaacacatacatatagacagaaaccttcaacaattcaagaagaaagagaacagtgaaacacactgcctggtgtgatgagagcccacactttgtacactagaccacacggagtcctggctggacagacagctgtggtcacacagggaatgttctttaagagtaaatgtcttaccagcaacttatccttaaataggaaaacaaaagcccgaaccaaccaaaccaagcaaccaaccacgcagagggtggaacacatcagtcaaaggcgacagtaagtaacagcggggacatctcggttagaatacgagagtgctttggctttttttctccctgtaacttaaaatatcttcaagaaaaagtcaaagaggaagaatgtctacattactctctctcacctttgtagcctgcagatcgccgatgtttaattttagagctccgattgccgtcttacacaagatcacggcttcatcactactttttacctgaagagattaaaaaaataagggaacctcagaaattcaggcaccaaacttacaaagcaggctgctccttgggcactgacttgactgagaccaggatcatgacttctgagggtgtagacataaattacgaatcacgtaaatactagaaaatgcttttcaaactccatactcaccttctcacgagtcttttccagaaaagtaagagccacattaggatctagaatagaaacaagaacgaagtcagacccaccgccagcagcttcttaccagttaagacaagataagcagttaacagttccctctctccgatcattacaaaaatctcacactggcccccacagtggcctacgtagctcaggctgtatttactgcctcaccccagtgttgggagcacaggtgtgcattgctaacctggccaatttggtattttctattatgaaacaagggcttaccggtcatctgtctaaccacatggagaattatttctaccagggacagagggtttaccctgaaataaaagccatcagttttttagtgtttaaaaagcactaatgtactcattttcaaagtaaaaaaaactgacaaaaagggattacctgtgctcaaactcactgatgaagttttcataaagctgcaaaagcaaagacggagaattagtacagcacgagccccactgagaaaccagactccagaagctgcatctagtgacagaggcagcactaagactggcaggtgagagtgtgccaaccacaatgcccatcgcacaggcagcactacctaaacctttgttgacgatgggcttactcgagtccacataagtaatcaccaatggattactggagaaccagagctcctggctgtgagaaccagagcactgatctctcagaatcttctacacagctgggtgtggtggctcacaccttcagtcccagaacttgggagacagaagcagacagatctctgtgattttgagactattctacagagctggttccaagtcacctagggttacacagagagactgtcttgaaaaaccaaacaattaaaaaaaattaaaaaaaaaatctaaatatttaattcctacattcttcctccaaggtacttcaagtacagctgaacaagtgtgaaatattcttaaacaaacaaaatagagttccttcagatttcagaaggctacaggccttctaaacgctcatattaccaagtttcttagccagtcagcacacagcagtacttcttcagacactaggctagtactgtggacacaccacgtgtgtcaaatgctgagcttccaaagctcctacactactggagaagacagaacaaacaaatgctgatattcttaatttaagaaacacagaaacagggctggtgaggtggctcagtgattaagagcactgactgctcttccgaaggtcctgagttcagatcccagcaaccacatggtagctcacaaccatctgtgatgaaatctgatgccctcttctggtgtgtctgagtcagctatagtgtacttacttaaaattaacaataaataaatctttgggccggagtgagcagaggtcctgagttcaattcccagcaaccatatgatggctcacagccatctgtacagctacactgtactcatatacataaaataaataaatgaatctttaaaaaacaaaaacaaaaacacagaatcgggctggagaggtggctcagcggttacgagcacctgttgctattgcagagttcttatcacccacatgatggaggactcataaccatctgaaacacctattccaggggatcgattgaatgccctcttctgatctccaagagcatcaagtatgcttgtggtgcacatacccatgaaggcaaaccattcctacatacaataaaaaccatcacaaaaagaaacaaagatggggagaggggcatatcaactgaagattagaaagcaaagaatatgaaaatatatcactatgatatagaacatgcagtgtgtgatttatcattcccacataattcttaagacagaatacaaacaactgcaaatcctttttttttttccgagacagggtttctctgtgtagccctggctatcctggaactcactctgtagaccaggctggccttgaactcagaaatccacctgcctctgcctcccgagtattggattaaatgcgtgtaccaccactgcccgcttacaactgcaaattcttaagagtagtaaaatgtcaaactgataagtaaaaaacatttaagcttcacaatgtattcaggagaaataactaaagctacaattataaactaattattctttacaaattcagatgatgacaagaaagttccagaaagaaggcttctggtgagaaaattcctgggtattccttaaggactctgacaaagcatgggaaagagtgtgtttttattttttttctgctgacaaaatttaaaaaatgctccattagagagatagcatagtaccacgtcccctcaaccctctcaccttcaaatgaagaggacttctcttttctacactactctggccagaaatctctgggcaagtggaacccttgtgcgtggatgggctgggagagctgggaagtgaggagagccctttaaaccgtccctctccctagcagtcttgctgtgtaacccaggttagtctttaactaaccatcttccagattcaagtttctaagtgctgggattgcaggtgtgccattggccccttttggtgctgtctcgtgaggtgcatgcatagggcctgtggatggaagcacatacttccagtgagccattttcccagctctagtctaaacttgtaaaaaccagaaagtctgtttcagtgttgggatttattagctgtaagctatggtgacttatctacgtctgctattacatatgagaaagagagagactttctcagtgctgtcatgagggcccagtgcttacagcagtccgtggcacaaagtgattgctaaaagatgcagcttagtgtgaccaccataatgccgccccttccccccactcttgtctttaaatgtccatgagcagagttgggcctgacactgcatatatttaatgacagcacttggaggaggctaaccactggtggactgtgaatccaatcccggtctggtctacagagcaagttccaggccagtcagagctatacagccacagctaatctcaaacaaaccaaccaaccaaccaaccaagcaagcaaaaattgtctggagacgtggctcagtgatagtttaagagcattttgaagactcaaactgggttcctagcacctacaccagttggcttacaactgcctgcaactccagttccaggagatctcttctggcatccttgggcgcacacacgttaaaagtaaataaaaatgaataataatagtttgtaattatattcaacatcgtctgagctgtctggtaagtcattaccttaatgagaccatctccttgggcaaagcatgggtcctgcacaaaatcaagcacctcaagtgtcagctgatgccacaacctacaaaacaaaaagccctcagtcccacatcctaatgtgaagaaaaggatgccttcagccttgacggtcccatcaaacaccaagtatttcccaggtcccactgcacagccaggagttaaagcaagcgccagccaattcaagcctatttctggactgactttgcttgcaccccctagtcacttatcctttcaagactcagttttcttaggtaacactggagaacactttttgagacagcgtcaactcccactctgagtgtcaactggaattccaatgccacaacctacaaaacaaaaagccctcagccccacatcctaatgtgaagaaacggatgccttcagccttgaaggcattggttgtgactttagaattctacagctatattttgaactccattctctcttacttattagctgaatacctcacagaatagaaaactgatattcaatcttatctgtcaataggaaggatgaaataagccaatactttaaaaaagccaatatatgaacctttaggacaccgaaatagcatacttcataccaagactaaaggataatatttaataatagagataaaagtgttttgaaaaacacaaaatgttacaccatatataggcaggtacatactaaacactgaaaaatttctcttgaaatcactaagagttttaactgctggacattgtcatgtggaaaggttctgaggaagaggtgttttttcataggcaaattcttatatcaaagtcagcaattcgtaattgttcttatcaaagctggtaaggctggaacgcagggagtctagatacagaaccctgttaacagctctgctcctaaggctatctcgacccctttcctccacatccctgaccctccggactgatcagagcccctggccctcccacagtcctctccctcccgccccagcctcggagctcacttcttcgtgtacagctcttccaaacggtgccaaacggcagcctggcccggcccggagctctgactctgctgtaagaaggccggcacatccttcatgattgcagagagctgggaacaacacaagcactaagcagtcagaaccggcagggatggcgcacggaagtgctcgctcacttccggcaccgcgggcgcgcggggcatgctgggagcgtcccactagcctcacgggttgcggtcgtcaaggtaaccgcgttcttgacttccgctaaacttctcccgggtttctggccctgcccttgaggcattaaagagtagaggtgcctggggacagctagccactgactggtcacgtagcctcaagcctgcagacttgggtcctctgaaaccggatggcgtttggcgaggactaggtgtgatgcaaatcgctcagagagcattagttatcacccgcctactcaaggaggtcgagagcggcgtaaaacgatgaaatctcccggtttggcttcccaaccaataagtcagagtcccacagagggagaagctgccagcaccaggcataaacacagccttccacacttcgggttatcgtgcgggggctgggctgggctcggccgagggaaggcgccggagggcggcacttggccagagggggggcgggagtaagagtgccgagagggcggggcttggctcacgggggcggggattcggatggcgcttgaccctctaggcgccgtcgtcctgcagagcatcatggcgctaagcggtcgactggcattggccgcgctcagactgtggggtccgggaggtgagccacggcaggggagacacgggatctcgcagataggctatcagcggcgttttaggggcgggtagctggaagcaattgtgggagtaaggacccggcaggcgcgcccttctacaaggttttgctgaccggccatcactaccttctccttaaaggtgtttttctatgtaactattgcagcacagtctttgaaatattttatagaagttcgttgtatggatgtcttataatttatatcaccatttccttattgaatactttctaatcttgaattattacaaataacgtgataaataaacgtgtttgcaccccatttggaccacaaattctcagtagacagccttgggtaaggttacgtggtttgtattattttgagactggtctcttgttcaaactggccttcagctggctgtgtgaaggaggatgaccttgaactccggatccaccttgcttccacctccctccaagcgtcggagactacagtcacatgccaccacatccagctgttacttgtgttttaattgtcccccataaaggttgtgaaactaaaaatttttaccaacagtcatactgtctgcaaaatagtaacatgtctcatagagtcctgagagtgatcaataatagggatattttcagtttgaaataagtgagtatattaagttagagagaaatcatcacactgcatattcaaaaaaaaaaaaaaaagtcagcagacgtctattggctatctttaaggtagctcggtggaactcccagtaaagagtccttgccagaacagagtgaccctttcagtgaggtttttagtaaagcaacagatggaagtaatatcaaattggacacttgctacatctaacagaaactggcagagaaagttgagatagtcatttggagctcccaggtgggctgtccctctgtctgagctgcgggatttccttcctactggagggcacattctttttcttgcagatactttcctatactgggataaactatagtgacttccactggaaaccgtttcccttctgttctcaagggcacaagtgttttcactcttgggctgttttgctgttctctctctgtccttttacatagttaggggagccagccctccagactttggactttgagacaaacatgggtctggcatgagggaaggggttgtcggccttgtttccaaagccatcttctcagtgagctcaaatgacgcaagacaatttatcaatataatgtacaaatttggactttttttttttgtctgtgctgagtaacaaactcaggctttgcaattgtctgataggctaacatggcaccactgaactacacacccagcctggagtccttacagttttagggcccacagtcgttagcaaagaaatgtaatggaagaatatttgggtagacaatggtatagtcacttgatgtgggtgacaacattttattcttttcaataaagagttgttcatttaggctacggttacagagcattttctctaccatactcgtgagtgctgaggataaagcagggatcagaaaagacactctaacttgtggaagcatttctaatatgagatcatctgtaagacagtgtggctgtcataaaccctaacacaggagccctgggatgtttgtgaggaggatgcctttacagaacattccttcttctcttgattttagatttgggactcttttgtgacttcatcctctgtaactttacaatgtcttgggcagaactgaatactaacctctgagtttcttcatctcaggggctttccataccatgtagatgtactttaagttatatcttaagtttgttgttagatatttggtaaaattttgtccacatgtatgtctgtcagttgcaaactgtttgtttgtttgtttgttttggtacaagtgactaaaaatgtcttttatgttccctgagtggtgcctagcggttggcagacactcagcaatggtcacaacttttcttttgtcccttttgtattctcatatggtttgtgtttaagaggagttcagaaaatattagggcaaaacctctgagtgcactgccctgggtgccctgtgcgccagggtatttgatgagtgagaggtgtgttggagccagagcttgcttgctgctgcttctcattcttgtttttatcaggagacctctaggagggttgcagtgacttagcgcgttggtccctaggacccggcatgggctttgcggtcaggctaagttctaagtgccacttccggaagtagcccccttgcttctcactgagcatttcctcctactgtactttgggtttatggtgtgtgcttgcaggaaagtaagggtacccagaaaacggggtgattttgtctcttgtgtgttttcccagctgggaataaggttccttccaagggaacaaaatctcttgtcttaggcttctcagtgaagctgttgtgcttttgggggagttctctttgattcctctgtcctgatggactagagagagcaagtgcctcttatctccaccatctttatgattaggcccccacaggagttctaaactaaaagggccaggttgcaatgaggaagagacagagacaaaaaggcaggcgtgccgagagaaaatcgagactgctggaaaacagattctggtgaacgctctactacagatgttctaacagttgctctgcaacagcaagaggccacctagtacgtgctcagataagccagtggaccatcagctaaacgaaagcaggtccagactgggtcccagggagcactctcatactctatccaaggaggtgacacagacagttggacacaaaggcctgttctggcccttggcactgctcctgatgacacctcggatgggacaggatcatccatgggcatctcacactgggtgcctagaccatgggcacaaggcacagctcttgcttgcttcaaagtgaataatgcatagcttactgtgaacccagtatgaatgatcgtgccctggaaacacagactcgggttacacgaaataatctcacttatggaaggggttatacaaacttctagtctcagaacaaaagatagtcagaaattcactcacttactgaatatcagtgggaacgttaggcagcagtaaaatcatcctattggcttccgatatgctctaacgggagtctttgctcctgggctagtggaagcttgtggtctttgaagtcaagacattccaaaggtcttatttcatagtcaaaaggatgttaggtatcctatccaggggactaaagatagctcaagataagtttagctctggatctgcaacattccaactctaaagttccatctggccagtcagctgtggttttctcagagcccttcagctcacaccattgatgatgagaagcatcagggaacctgtctgcaaacctgtctgtaaatcagaattttcttgcccccaagtaaatctcgattcctgatgcaagatggttctgtgctttagttggtagtcatgcgtggtgggaaagtggttgtttggctggcactggagaggccatgtccacctttgacggggggaagagtccagctgccctcactcttgctagcctaagactgactgttgcctgctgcctctctcctgcgctcttgctgtcagtgttacaggtgggagaaggcccatatccctctgtgtgggagcctcaggcggctttggaggtggaggaagcagtgagaagaagttttctctgcaggatgtagctgagctgcttcggaccagagcctgcagtagggtggtggtcatggtgggggccggcatcagcacacccagtggcatcccggacttcaggtatgctgcggttcccttgggtgtcatttccccactgtcttctgcagggctcagccttttccttctctctgcagatccccagggagcggcctctacagcaaccttcagcagtatgacatcccgtaccctgaagccatctttgaacttggctttttctttcacaaccccaagccctttttcatgttggccaaggagctgtaccctgggcactacaggcccaatgtcactcactacttcctgaggctcctccacgacaaggagctgcttctgcggctctatacacagaacatcgacgggcttgagagaggtgagcctttggccccttgcatgtctgtgcttgtttctcaggactgcctacggcctagtgtttatgtcggccctggactgttgctaggcagctggttatgcctttaccacttctgcatttgaggccacatggaaacctctctgtaggcctgtctcctgcacaccttctgagtcctgagttttagatggaactaaaattcatacaattttaaatctagtgtggatctcccctctctctgcctctctctctcttcttctctttccatctctttctccttccctttttcttcccttccctcttcctcccactttctctccatctctggctcccacctaaggaacccttaggtcctttcttccatttccatgtgtgacacatggccaggccttgttctctgttccctccacctcctctttcaccctcagattattttcaggcagatacctcacaccatggtgctactatagaaacaatgtctagatgtttatggatatgtctggaagataaagccttgttgcagcatagctctgatgccattattctgaagagccaccaacatttcagtgttgtccaagtcagtcagtgacatcttggctctacttcacactgagacagccatggttagagcctgcataccctgggggaggtgctgctgcttcctcaaggtgcaatatgcaggcccatggcagatccagccactctgccattctgtggagtgctgtggtctgaagtaagacatcacattgcgggataggagtcctgtgagaaggaatctacaacccagaaccagagacagtagtgaccaccccaagtttccccctaagcagaaggaaaggttttaggggaagataggaatttcctggctttgggtttaagcagtacagttaccaaagagcagtaatgaacttcatgagagcccggttgttgttccgaggaggttctgctagagcccacactcacctcaaacgtactccgtagctcagactgtcttggggctctcagctctttagcctcagcctccccagtgctaggattgtgtgcttgtgccaccacgtgcagctgagaggtccctttctgtttgcttacctgccatagagtttttttgaaatcagttttgtcaagcccagaaggtgagcttgtgtgcttacatagccatcccagaggctgcaacactgagatttgctttgaatttcagcatctgggatccctgcctcaaagctggttgaagcccacgggacctttgtaacagctacatgcacggtctgtcgaaggtccttcccaggggaagacatatgggtgagtcacctcaggaaatagtctctgccttctgcaattcttgggggtagaggatcttataatagtttgttttgtgcttgtttatttgtttgtttcaaaacaggacgctcacagaggtctgaaactcaccaaaatagctaggctggttggtcaggcaaccttaaagatccaccctaaggatctctgcctccccagtgctgggattacattatacatcaccatacttggctttgtttgtttagacaaggtctcactatttagaccaggttggcctataacacaaagagatccatcagcttctgtgggattcaggatgtgctccaccatgcctggctcccaaacttttgacttagaaaaataatacatacttgtaaaggaacataaggctgggctgagaatgtgacgcagctcaatggtggagtgcttgcctagcataaacggccctgggctctatggccagtgctccctccaccccaaaaatgcaggtcagaaatatatagggaaaatgaattccccatggcaggcatggttgagcacacctttaatcccagaacttgggagcaagaggcaggcagatctctgagttctaggccagccagagttacatagtgtttgtctaaaaaagcaaacaaaaagaaagaaagaaagaaagaaagaaagaaagaaagaagaaagaaaggaagaagaaataaaatgaatctctctctaaccaatccctttggccgacatttgtgattgagggataatgtaatagtctgtgtttttaaagcaaaagatatatgtacatataaacatgcatgcaaggtttctatatagacattaaaatattaaaattagttcattgattcctattaaatatcttttataaattctctacattcctgttcagtttaatggacatcttatgttgacatctgagacatgtttattccttttgttacttaatatgaggcatttttaatgtttataattgttgctattaaaacaacacaggaaagggtaaggagatggctcagtaggtgaaccatagaagagctaggcaggaatggcagcccgctggactctcagattcctagaacaagctggtatttgtactagctctgctaagcacaaagaccggtgttcagatcctttttgcccatccccttctcctgagggccactggatcgcctgagacccctggccctggactccgtacatttcacttctccccagcatgcaacatccaccatcttgtaaaagttggacacagtagtatacatgtctataaccctggggctgagtggttcgagacaggcatacctgtagagctcactggcaaaccagcctagcctaactgatgagctgcaggtggtgagacacactaaactcaaaaactaaggtggagtcaagtgtgcggttacatgcctttactctcagcacttgaggcagaggcaggcagatcttggtgagttcaaggccagcttggtctacatgttgaactccaggagggccaggactacatagagaccctgtctacatacacatgcacacgtggagcgtgactagagaaggtgctcagcatctacccctgtcctccacacgcatgtattcataagtgggtccatattcatgcataccgttctgcaaggtccagagaacatggagccaaccacattggctccttgcagctggtagggatggtggatgttgcatgctggggagaggtgaaatgtatggagtccagggccagggctctcaggtggtccagtggctcccaggagaaggggattagcaagggttggcatccttcaggcagcatcatttgaagcctggaagctagaaaacattaatcataaacgagcaaggaccaaaaccacagggcaagatggaaacagtgagacccagtggagcacatgactttcagggcagtgtgttgaattctggaggaaacgaagctcagtggccgtttcagggggaagtgtacatggctttgtctgctaggcacaggatttccctgcggttggtctttgtggtctctcttgaagagaaagcatgtgtccttggattgccttatttgtcttagtaggtttttcttatttcttgttttgagtgctttctggaaaatagggtttaattagggacaagtgaatctagtgagtgatttcctggaatttgtccatgggctcatgccacccacgttcatggtggttcttcccacgtagttaaccctctctagaaacaccctgcaggcacccccagagatgtgctttagcaattagttaagtcctaacagccagcaaggttgacagggaatatcactggggcaccggctagccaggtgcaagcggtcattttccttcttcattattggagtcacttctgctggagtctgtcaggtcaggtgcatctgctttcagccggttggtgcttggtctgcatgtatctgctctccacttccttattcttttaaagataagattacttttgttgttgttggtggtggtggtgggtttttttttgtttgttttgtcaagacagggtttctctgtgtagccctggctgtcctggaactcactctgtagaccaggcttagaaatccacctgcctctgcctcccaagtgctgggatgaaaggcgtgtgccaccactgcccggcttgaagattacttttatattttgcatttatattctatttacttgtgtgggtgtaggggatacatgtaccacagtgcccgagtggaggccggtgtgattgttgaaatccttgggttccgatcagccatcttactttgtgtttttcccactgctcaccattctttcttccgtcccttcctctgtctcttcctttccttctctattccatccctttctagttcatcagcttgggagttattatagtttgaagtaaaatgtccccacagggctgcatgtttgaacaccccatgtgtagtcctgtgctgtattaggaagttgtagaacctttgagatctgaggcctcgctgacagaagtagatcacctgggtaggctttggaaggctgggcagcttctggttctgcccttgctttctgcttcctggttggccatagcacgaacagcagcggcacccgttcccatgtccatgactggagccacccggcaccgtgatgaactgagtcaaagttctgcttcttcatcccttgcgctgtttctgcgaggcgtgggtcactgcgaggcgtgggccactgcgaggcgtgggtcacttcgaggcgtgggtcactgagaggcgtgggtcatgcacagcactgccaagagagcccagatcagggctgcacaagctccttgtgttcttttagtaacaaccaacacacacatgctcttttgttcacatttcaaatatgtttcctagctattatggtgtatatttgtaattgcagcacttaaggcgtagaagatgaaggattatgagctcagagctaacctagactacacagtgaaactctctcagaaaaaccctcataaaaatctttacgatgtttcattgtggtatgtataacacaaaagtcatcattcaaataacttaaaaatatttactttatatgtgtgtgtgttcctgagtgtatatatttatgtccacgtgggtgcaggatcccatagcagtcagaaggcatcgggtgccctgagactggagttacagatagttgtgagctgccataggtgatggcaattgaactaaagtcttctgcaagagcaacaagtactcttagctgttaagctatctctccagttcccagtttaataatttttaagtttagttgcaaggtatcaatgttctgcaaccagtactgccattatttccaaaataatctttatcataccgagcagaaactccatagctgttaaacaccagcttcccgtaagcctgtggtatgttccttctattatcacctaagtactggatcatagagtcactcagtccacattcttttgtgactggcttgtttcagatgtactgtcttcagatttacccatctcctagtcagactccccttcctttttaaagttgggcacgttttaaacctgtatctgtttgccaatgagtacttgtgttgctcctcccttttggtcatggagaatgtggacgtggtgtgcagacaaccctttgagaccctgctttcaattcttctcgttatagtcctaggcatgaaattgtaagcgtttatggtaaacctaacttcattttctgaggtttccttgagctttccgaagaggcgatccacttacattgtctcccgctcctgcactgctattactctaatgactttgtccagtgtcacagagcgtcggagctttaatgctgtcgggttgttttcctttggttggctgggcttttggcatctatcatagcttctcttgtgttttcttctcagggtttaaatgttttagctcttacatttatgaatttgatccattttgaattatgtttttgtgtacaatacatacacagttccaacttcctagttgagatgaagtcagtctggtttagaacaaagaattacatttatttggagattgtccccacccccaaggcagggtttcaccgtatagccctggctgtccaggaactcattctgtagactacgctggccatgaacttctttggatctttttagtattatggtctcaaagacgattcaggaagtagagagtatactgtctgatggtggccgttttcatagctcaatctcagaggatttattttggggttgtgacaggtgtgtgaggggtgaactgtctcacgtgaagccttgtttggcatagttcatggggtctgcatatgctggtgagtccacagctcatcctttacaaagccacatgctccatttaaggcctcacaaacagtgctgctcaacggtgactttctctcttaacagaattcatcttttcaatgcacctatctactgtttttagcactttacaatttgatattattatttattttttgtgtatgggtgtttagctggatgcatgtctatgccctgtgtgtgtgtacagtgcccaaggaggctagaagagggtgtccgatcccctggcattggaatatgggcaggttgtgagctaccatgtgtgtgctaggaaatgaactcaggtcttttggaagagcagccagtacttttaacttttctgtttctccagcttcccccacgggttcccctaatgcactaatgcactttgtgacagggtctcactatgtagccctggctagcttggaacttgctatgtagaccacgctgaccttgaacttacagagatccatttgtccctctgtcctaaattctgggattaaaggtatgtacctccatgcccagcttccatagtgaatgaaactatactctcccctcccccaacaataggcttgatatccttgaaaaaaagtattgattatgtatgtagggatttgtttgtgggctctctgctctgttctgttgatctctctgtcttttttttgtaccagtatcacactgcttggttattgtagcttgtagcaagttttaaagtcaggaaatatgaattaaaagtctttattttacacatatatacatatatgtgtgtgtattatatacagaggtcagaaggaggcactggttcccctgggactgtatttacaaatagtgtgagccaccgtgtgggtgctggggatcaaatccaggtcctctgcatgagcagcaatgctcttaaccactaggatgtttctctagcccatgcaatgtgaattttaacacattttagaatggctacatcagctttctgttaccacaagaaatacctcaggtaataaacttagaagacaaaaggtttatcttgactccagtgtcagggattctggctcatgttttgggcctgtgacaaggtagcgcattatgatgggagagcgtgctacaaaagtgctcatcccatgattaggagggaaagagaaaagaggagaaaagttatctttggttctttttaaaaataatccataacatttaaaatttttcttttcctagatatcttaagttggccattttttccccttttcatttaaacacaatatagttttatcttctgtagctaatactttctggcatctgttggcagttgtttctactcattcttgctgaatttattctactaaaatctacttagctagctataaaactttattttacgagatgtttctgtggccttgtcagaaagaatactgcctccttttctgtttggcatgagacttgttctagggtcagttattagtaattgtcatctactttccctgtaaggagctgcctgtgacagctgtggtcactcctgacagtgtcatcagtgagttgtagctgacctctagggtagaagcagaacactggtcacttcagctccaactggggacaggcctgtgctgcctttcccactgtgttcaagacgcctacaaagcactctagggctgtggtccatcccaggtgcaaccacaggaaaatttgtgggtaaaactaggtgatgtctaggacttgatttgaaatatttgcagcccccaaccccccccccccccgctccccacatctaagaaatagttgacagaaattgttaaagccacatggggaccattacagagtgaagatttttggacctgttcgacatctccttgaagagcttttgtgttttcctcttttaaaagtcatcttcctcccccaaccctcttctgattccccaggctgatgtgatggcggacagggtgccccgctgccctgtctgtactggcgttgtgaaacccgacattgtgttctttggggagcagctgcctgcaaggttcctactccatatggctgacttcgctttggcagatctgctactcattcttgggacctccctggaggtttgttgaaaggcatgtggggatgggtaggagggcggtgtggagggctagggcctggttgacggtgtcaccttttcaggtgaggagagtcactggtggtgacacttagggtttgaggacaatggctgtgtaggagggcgtaagggtgtagtgaaaggttagccatggggcagggctgaaaggactgatctcggcacagagctgtactatgggatgaagagcacatggcggccctgaagtgacctttggtgggaggaggttggctgcagcatcagcagttagctggtacggggcagtcagaggaccagtagggttggggtctgcatgcaggtatgtctgtggctctgtatggagatgaccactgatctgcatctgagtcagaatgccagcgagtttccaaaaggtgtaaagaggcaagaccacgggctggagcccatctgtgtgtagacataggggcaaaaggtccaaaaagctctgttcaggaggccagctgtgcagaggctgaggtctgtgcactcagcctgccactgtcactgcgtgatgtgaacaggccggtctggtgctttagaccactaacgtgagattcaaaactaaggcaccattgtgggtggtgtgtacggaaggacgtgtcagagtaaatgaatattgttgcatgggctgtggaggggtgacattgcaatgcagctgtttagtgtgagccttgtcagtgggtctcaataaagtggtaaggctttctgcttaaggttcggtggggtaccctacagtggtagcagtgaggccagggccatggagatcccactgggaggtctgatgctctgactttctgctgaaaaggctcctgtgggctgtgctgtggattggtcagacaggactcagcaaagtcccttgctgctggggttggatggtcctgacaggtggctagataaatcagcaggggccatgactgtgggtgtaaagtcagagggtactatgtcacgtaggacatggaagagagtgagctaccacagaactagggtgtgtgtgccctgttcctatcatgtgggtttgaggataccagctcagccaaataccttacaaaggtatctggtagccaaggtataataccctaaaggataaggtagcaaaatgtgggtgtgggaagtagagtcaggagggacctgggtgaaaggtgagcaagtagaagattccagagtgctgtcatagatacaggtttggaaggaaggacagacttgggtgggggtagaggggcagtcaggggccaaagggttgggccctctggtctgtggtactcagtatatgggcccagttcttctgattatggcagctatcagataaggacactgagactgtcagtcacctttatttttgaagtaaaatgaaaatagccatttttccttacttataaatgtaccatctgattttgtttgttttgagacagggtctttctacatagcccgtctattctggaactcactatgtagaccaggatggccttgaactcacagagatctccccacccccgcctctgcattcagagttctgggattaaaggtgtataccaccactgcctgccaaccatatgcttctactcatttatgccaggtagtggtgactgccaccagcactttagaggcagaggaaggacagccaggactatacaaagaaaacctgtctcaaaaaatcaaccaaccaaccaaccaaccaaccaaatgtctcgtttacagcagcagagacaaagtggagaatcaactttattctgtcagtttttattatcttagtctatgtatgtgggtgttatgtctgcatgtatttttggtgccagtggagtccagaagagggcatctgattcccaggaactggactgagaggtagttgtgagctgccatgtaggtgctgggattcaaacccagtttctctgcaagagcagcgtaccctatctctccagagcctttaaagaatcagctttaaagaacagtagctactaatattttggcctacatcctcattggtgtcttttcttggggacaaatggcagaggccacacactgtgacatgggtgatgtgagcacccacctggagcagccttgctagtgccctgctagtgctgtgtcctgtgagtgtgagggcacagacaggccaggcctcaatccactaccagtgtggggtaacaaatctgcagtgtcctggatcctatatttgcagaaaaaatagtaacctgttagattagattgtggagcacttaatcatataatcttcttcttctccttcttctcctcctccttcttctccttcttcttcctcttcttcttcttctccttcctcctcctcttcctcctcctccttcttcttccttcttcttcttccttcttctttcttctcctcctgctcctgctcctcctcctgctcctcctcctcctcctgctcctcctcctcctgctcctcttcttcctgctcctcctcctccttcttcttccttcctccttccttcttctcctccttcttcctcctcctcctccttcttcttttcttttctttttttttttttttcttttttcgagacagggtttctctgtatagccctggctgtcctggaacttaaatctgaactagccagaactctgcaacatttccagtcataggttctaagtcaagaattgtggacctataagacaatgtatgtaggccgttgcttattggtggacagtagacaaacagtaatttgtgtgctgtctgccgtggtgactgtccatgtgtgtatttacacctatgcaggtcctcttgctggacaaatgctgatatcggtgtatgagggtccagttgcttacattgtcaccaatatgaaaatgacccatttagttttctgtcattctgaacagttacagagaggcatgacagggctggtgatgtggcttggtgggttgcttgcctagcaagcactaagcctgggtcagctcccgccacagaccctgtggggccttatattcctgctcatgtttatgtaccgtttgtttcctctgcagagttgaatcactcgcccgtttctctcagggctgtaattagcaacgtaattaatgtgtataaagcatcgcaccatactttcccacagcagttttatgtagatgtcagggtggcagtgccgaagtcacctctctcctctcacttcaggttcacgtctagaacaccttttcctcctcacacccacaagccctagtttttctttatttttaagaacttttcttttacatttgtttatatgtctgtgtgggccagaggacagtctgtgagagtcagttctctccttccattctggttcctagggatcaaacttgggttgtcaggtttggtggcgccttacccactgcgctatcggcaccttctctaatgtttaggagctgttaagactctttgacttgttttgcttttcattttaaaagatatatgtatgagtgattgcctgcgtatgtgtatgatgtatgtgagtgtgtacaccctgtgtatctggtacctatgcacaggatattgaagactctggaactggagttgcagttgtgaactgccatgtggttgctgggagccaaacccagcagcaagcactcctagctgctgagacatttttccagccccttattttgattttgaggtgagggtcttatgtgccctagatgaccttcaatttgctgtgtagctgagaatgaccttgaacatctgaccctcggtctgtctctgactgctgggattagagctgtgctactatcatcctggctccacagctgctttgttcacacttaaatctaaaatccctttcaaagttccacagtgaaaggtaagaactgacttttccctttgagataggagccaggcttgatctcaccccttaatgaactcattttccaccgttattcttggtgcagaaataggacactgatggggacccaggaagtgggacagtagcagggtgataaagggtacttgctcctctttgtcaggcaagtataggggaggctcagagcagggccccggctgtagagtggacagagcaggtagaaggacaatgcttgcgggcagaacatgcagacaggggaggaggatggagtgtggggagaagtcagagcttgtattggcccacccagcagaagagaggggctatggatgggaaagagatcacccgaccagggggtaaaagcctttgtaaactaagtggcaggctctttgtgtcagtctcctgccccaaggtgtcagtgactagtgttcaatgtcctgatgtgcatggtcacactgcctctcacatttgggttatctttcaggtggagccttttgccagcttgtctgaagcagtacagaaatcagtgccccgactgctcatcaatcgagacttggtggggccgttcgttctgagtcctcgaaggaaagatgtggtccagctaggggatgtagttcatggtgtggaaaggctggtggacctcctggggtggacacaagaactgctggatcttatgcagcgggaacgtggcaaggtacagtggctctggccggtccgacagagtgcatcctctctggtcactgccctcagtgcgtggctggcgtttaggagcgtggtgcccctacagaccattgcttttgcttcctactctacagctctctgctgggacatggttctgggacctaggggaggggaagggctgagaagctgacattctctgctccctgcatgggacagagctaacctgaaatggtttgttaatcagtgccattatctagtatagccggtgggaataggaagcctgggaacactgctctaggttttatagtacctgtgaatcacaggaaataatctcctgtgagaaccaggttatatgtgattattataaaaaggtgctgcactgcccaggtctcaccagaatatatcacagctgatgttatgtggctctgggtctgtggtctcactttaactgtcaaaagctcccagcctcttgtgcttagcctgagcccttaatgaaactggaccaaagagaagcctggcatattaaggagccgtggcatttactgcttccacagatgagatgtaaccaccagtattgcatctttttgttccaaggcttggttcttaaggctgaatgtacgcaggtgccatttattagaaaacagtctatgttttgtgctaggccttctgggttcccttttcttattcatttcaaagacaaaagtttgttccataaaatattttttacctcaatgactgatccatgtctaggatctgctagcctctgtgtgtgatgttaactgacctctgcctgttctagctggatggtgctggctctgtgtgtgatgttaactgacctctgcctgttctagctggatggtgctggctctgtgtgtgatgttaactgacctcttgtctgttctagctggatggacaggacagataagactatggcttcttcacctggggaagtcacacagcagatcatcctatgtccagcaagacttcatgcctgaagacagctccaacacgtttacaaacatgaaccagaccacaacatgtggcctggacagtggtcctccgaggctgcctttggaaaggctgaccagggatgtctacccttggggcccctccatgtgtgcgccctgtccacctcatcactgctgaaggtgtagtgcaggtgctgctttctgcagcggcccttaagttatcacgagggcagcacagcacgcccgtcgccaggcaggcgatgcactagggcaatctagcatgttgatcggtaaagtggcatctttaactacaacatcatttcttgcatgaaataaacttagtataaaaacttggcatcctgtctctttgggatagtgagtgttgacaaacttcaggttatgtgggtgttctcctcctggatgacaggacggagcccatttgtcccttgacttactctcgtgttcactcaggctcctcttctgcagtccctggagaatacccatgtccttcagaatccccatctgcccagccctccctgagccacttcccgccacactacccaggtttcttccagtaacgatgctaaaaccaatggcaggcattactccgggaaaccccattgagcctcctgttttcctgtcctgtgtgcagtcattactaagcacaggctgcctcctcctcggcgcctactcagaaacagttcaggctgtttgccaggcagaagcaccccattgctgttacgacccatttgactgcggctgacagtatgtagccgacccaacgagattccaggaactggggtcttgtcttctatccttgttcttcgttgacagcagatgtgtggtgatgtaggaaatcatgaatgttaaacagaatgaaatcagtttctgtttaatagcctttcacctgactacttcacatacacagtcttgtcccaaactctcctgtattctgtgcctcagaatctcagatttgactttgtcttactttcgccttcacagaattactaagccagtggttgtgactgagttagttgtcacaactagtgaggcttgggtatgcggatactgcagtgggtggcagcgccaggaccaaaaagttaagaagaggccactagccctgtgctcagtggggccagaagcaggaaccatgacgcttggtgtgttttctgacatacttaaacaatttcaacagattctaaaatgtttgaaacacagcgtatgccccacatacgggctctgggctggcatccagcccagtcatgcttacaccatgtgtaccctgctccattaccaccctcatacacgcatgttcatttatgtgccagggcaattctgctcgtggctgcagccacatccaagaaacaacttcacttgtggaaatgaaaggtgggttccccgtcttcacagagggtaagactaccacagtcctaaacacaggaaactggaccaaaggcagatgacagaaatgtgaggaggagagagaagggctccccagctggagaggggtgtggcttcttgaggcagcaccccaggacatgtctggaagcagcaccagttctgaaggggagcaaggccgctggcatcttcagtcaggatctgagtcagggtctgaggagagctgtccctccattgtctcacacatcgcatcttgcagagaagtgaggtgacccctgggactcatccccatgggttggatgactctgtgcctgagggaaagcacagtgcttggggaagggaccttgtgtgcagggcagggggctcttgctcatttctaggctgctacttggactaggttaactattaactaggccccaatcctaaccaccacctaactagctttgagacgttagacagtccttcaccttcttgtcatctagaaacagggctcaatgctgactgtaccttcttctctttgccagaggcttacctctggggcaagttatctcaaatgtccaatacagcctcaccaggatcctcacctctaagccagtctccttgggctcacaaaacaatcattcgcatgtcttctagctacaagccttcctcataacacatacctggagagcttgtcaaacatgttcactagcttcatggcctcatgttccttctgctcctctgtcatgccttccataggattaggcggcttctcctccacccttccagtcacagggttgatgctacttcccaggaacagtgcgtggaaatgggttagtgatgctataggaaaagtggcactcggtggggcaggtagtctccatcttcatgcttagggctgggttagcaagaacccaccttcttggttttggttttggtgctgatgggacttcaggagggagatgcccctcaaacaccagcctgacaagtcttgcccaggacctcctggatcccagatagatagctcacttgctgggccttagtacaccgaggacataactagtcatcagaacacaagttcctgaatccaggtcttatctattccttatcctgtcctatgtactactggttcgagctggagagggagtggatgggagaatgggggttatgagggaacccaagtatacattaggggcacatacctggccttggcttccctgtactcctctgtgtccgtgtcctcgtcctctgagtactggccctcgggtcggcccccagccatgaggcccctggcagccaggaggccggcagcattcccgtagcctgtgtacttgatgaatcggggcactgaagaccagggcagaggtcaatgtgtgaatatggctgaggcaggggaggcctggggcttgggctcccccaactcaccactttcagaacataagacaaagaggaactcggcagctactctcttcacatctgtatccaggtgtgtcatgaggcggacaagcttgtttcgaagcaggtcccccacctcaggccgagtcctcacatccctcagagggggcaggacctagggaggcagctgtctctaagtgttggcttggagcagccaggagccaataaaaaggatacaggccagatttcccagctctgtctcatttgccaagtacctgggccttcaggaacttcctggcaggacggtgcatgcgggcacattctgtcaacacgttcagcacaggtgccacacattccttcagcctgtgggtctgcagaagggcttctgtcactgacatatgctccccaggtaagatggagctacactgtacacttcaccagatggttcctaacaacctcctataaagaggccatgctgccggaagttagctaagagccaaagatggtgctgggtgtcaattagcttaaaaaggtatagacacattaaagccagtcatggtggtacaagcctgcaactccagcacttgggaggcaggcagatctgaagttcaagttcatccttgcctgtaccgggtctatgagacctttaagaagagaaagtgaagaaaaccagacccacttctggaaaactttgtcacctgggtcaaacaactcgcttctttaaaaccaacagttacacctacgacccagggctacgaacgaaacaaaaggcatctgacgctgtctgcacacctgaggtacacactaccctcaggaaacagcaaaagcaaataacagatttcccattcaaagttcctcacggacagcactcaggggccaggcagccatttctcaccaagctcataggcgttgagcaccctctgcctagcaacatggctcctcagatctaatgaatctcagtctgtggctttcagctgtggggggtttcacacggaaaggctggatcgccagctctctggatgccccatggaaacccacagggggtcagattactttgtggttatgcctctttaagatgcagagggacagctggggggtgggggtggggtgacggtggtatcggtacacatctttaatcccagcactcaggggacagaggcagacagatctctgtgagtctgaggccagcctggtctacagagtgagttccaggacagccagagttacacagagaaaccctgtcttgaaaacaaaacaaaacaaaacaaaaccaaaaaaatgcagagggacaatgtcgcctctggctgcccatgtatagaaacacgaggagcctgacggttggaagcgggaactaaaggcttctgagaaccacttagcagagccacagagacctaagggctacctttcaccttgggacccgagaagcttgctctcctctggtaatcagcagcaggagggctcacacacacagtgtatctgcaggcttctgcgagggcctgactgagcggccaccgtctagctgcaccacagagcagtcagagcaactgtccacgatatatcgtcaagctgagttctactcgccagtaccaatggttcagaaacagcagtcacaacaggtgcccgagcccctgggtgtccacgtagcaggcccccagtcctacctggtgcagacgtttctctaggaaggcgaggagggcactgatcacatccatgttaactcccatgaactctaaggatccttcgtggagctccagggccagaagcacatccaaacacttgaggggcaagttccccaggagattcaccgtgtggctggggacagacacacagaggcctcgacacagtaattatatttagcacagatacactccctggcccttctcctggggtacacatggatgggctcgaagggttgcactgaaagcaatagactataggcaagggcaggtggtaccccaactcaaatttggtggggagattctgcagacgctatctgggccattatgtctgagctgagatgccaaacaatctctcgaacctgagatgagcagaggcaccagcaagagaccatactgcctccgcctaaggccctgtctctaagttcatagctcttctcttagccatacctgagttacctaggctctctggaaacaacactggtgccccattcccctgatgaagtcaaaggtggggcctgggcccccaagtgcttctgattcacaactagggttaaggacttctgtacccatacctaggaactcttgccgtccccaacattgtgagccctacccctcacccgtggaactcctctgtgcggtccccagcagcttcaaccatcacgcagtgccgcagaagagtccccaggtaccggtaaagggcagcatcttcctaaccaaagacagaaaggggctcctgtgagatcgaacccctgttcttgtggccacatggagttgatccctagacgctgtgcacagcacatgtggtgcttttggccacctgaagcactgtggagaatacccacctgcaaccccatgcacagtgcggctcaggcaccttccctgagttcccgcctacaccatcctctagtcctcgccatatctgataccctgcaagctgaggtacaaagggaagcaaactgtcccacccgaactgagtctcagccaagacttccaacctacctcatcaacttccctcttgacagagtcaaaggtgatattaaagagcactttgaggatctccatggccctctccgtctcttgggctggaagcatcaccggagggttttctttgggggccacgcccagtgttagttccagcgcatcagtcagcaggcgtacaccgtgcagctcctgaaacagttgctggcgcacatccgtgcgaagggctgttagcaggaaaaggagcctcaagtcaaagaactggacttcgtggggatagctcctcttgcggtacagtcccacacgctccgctagcctcaccaccaggcgagcctctgctgctagcatctgtgctgttggactgctgagcacaagattacacaggcatttgagagactcgaggaggacatccatgtctggggactgtgggatgggttcctctgagacggtaatgtcagcatagcaggctagtgcatgtaagctctggcggctggcaaatgagtccaggcagctgcggtctcgggataggattcggatagtctgcagccaggtgacacggtgctttggtgacaagccctgctccaggacggagaccagtagctttgcgagtctctgtggggtcgaacaaaagtggttccactaggccctcttcttggggtcagcccgtgcctgccctaggagcccttggggctgacacctaccttcctgtcctcctgctgggcatcatcgaaggtgaagctctgagaatgctgcagggagacccaggaggctcagatccacatgcaggtaggacccgtgctcctcgagtcagagcagacctctgaagcagcatccatcgctctgaaccttaaggcaaggcccaccctagcctcccatacacctgccccaccacacgccaccacagagccacccgagggaccagcccaccacccaccgccgtgctccctgccaccactcgcacgcacaccccagccgagttgcgcgcacacccctgcttcctctcttcctgaaatttcctcggcagccggatgcctctcacctcccggttgaacgaccgcagagcttctgtcaccgcatcttcctctccggtctccaaggcatccgcaactgcccggggctccatggcccctggcaccgggtgctggaaggcttgggctgggaagacgcaatcggccaaaccccggggctccgcccaggtccggaagcccggcgtccacgcgtgagggatgctgggagagcagccgaacccaagggtgtgtacaggcgcctccgacttaaggtggagcaacccggctgtggtcgctgagcggctagtcttggagcggcgatgctagctaaccagccaggcagtgtcctccttttgagccctcctctctagcccgagttcctggcaggcggggggtggggtgggatgggagggtggggagtggggtgtggcttggcccgcgcgtggaccgtcctctttacgctcttgtccccgtactgtgataaaaaagggagcgccggctcctggccgcttaatcagttggggaagacgattctcgcgatccaggccttggagctcatcttccatagggaatagggaaagagaagtacaacgacttggatggtcaaaataatgcacgtggttagccgggcatagtgacgcacgccttcttaaatcccagcactcgagaggcagaaactagcagacctatctaaaaagaatagccaccaaagtaatacggttattctcaagaaaattgcagagaaggaagtgaagaacacccgtggaaaagccactcccgcgagaggagcaacggaggggcggccagccgaggcgtgtctgaggttagaagcgtaggagcgctgtgtagcggggagccaggtccgcacgccacttagctgagtcggtgccccacagtgacacatacaaacagtgctccagtggatgatgtcacccgccgtgctaaccggctctgcccctactcagtggcaggccccggccgtctccttcaccagtctctttcgggtctgcctgtcctccccatccagttggatttagcagcgccagaggcatccgactgatttactgagctggttcctagcctctgctccaaatttgggtctgaacacctgctccgagtaacacccacagcgcaggactaatattgctgaccaatccgtgggtccgaatgctggtggcccgcccttcccttatttacattcccgagaagcactccaggtctgtttcttccgcttcagaaccttctcccggaagttattagcccggaggcggaaccggaagacccgggtactggtgccacgtccgttgctgtgctgcgaattccctgagtgggaccctggagggcgcgatggcagattggactcgaggtgagagcacttgaaaggcagtagaggtaggaggggaagtctaagtctggagctggagacatcgctcgtttctcggtggaaggacctgcgtggggtggcgcttacgtatccctggaaaaacagggccggatttcgcctggcgctgccttggaacccaagccggcatgccatcagttttgtgtgtggttgatgccaagagctggaagcagagggtccaagcagggttttactaatgaggggcctgagtgcctcggttcacacacattccccgcccccgtgcctgtgttcagtgtgacagttgtgatactgatgcttcgcccacaacgatgactatgcagtggtcggtaggacacagccgtctgtctttcagagtctggtcgcacttgtttgctggtgctgctggccttccccttaggtgggtcacatcgaggctgggtgggtggtttttatgcttcagatcggtgctagtcacacttaggggggtgattctcaactacctgtccctgtccatcggagttaggtttccacgagcacagtgctctgggcattccagagattctgtgtgggttgcagacatagggcgaggtagtttctacagtagaaggactttcttacacttaccttggatctgatttccaagtcctccccacacagccttcctgtcacctgctgtgccaccggctgttctgttttccctatggtccctatcagaaagtactgtttccctttgagaccggccccacaccctcagatgacaatttcagctaaggcaatattcacttcggttcaggaacagtatacagcagggtcgtgtatgtagattgattggatcttcaggctccccagcccgtccttgcctgggcatgcacacaggttctcacacgacccatgctacatgtctgatgtgtaggtggtcagcctgttggagcatagggtgggacgtgctaagttagcagaagtatatgggggaatgcgcttagatgtctccactggagtgaggaatcagggaccacatgtctgagggaatgctatccttccgcctctttctctcacagctcagagctctggtgctgtggaggacattctggacagagagaacaagcggatggctgacagcctggcctccaaggtgaccaggcttaaatcggtcagtggtggccctcttcccttccgtgagatactttggtgggtggggctgagaggggaggaaggaggccgtgtgctgtctgtgggcattgctgactggagaagtgcttcaggtaataacttggccttttttttagctttctctggtaataggtacttttcagagtcgtgggtaaaatgtagctggtctgaagggaaggtgggcactactctctgtggctttgcttgacggtgccttctgtatcccaaccagctggctttggacatcgacagggacacagaggaccagaaccgttacttagacggcatggtaagtgcccgcggtacgggtacgtacaaatcatagtcagctccgcccacctgccgtctgctctgctgggtcttcgctgctagtgtggttgggtagtcaagggtcccaactctatgtgaccctgttgggtctctcccacaggactcagatttcacaagtgtgactggcctactcacggggagtgtgaagcgcttctccacgatggcacggtctgggcgagacaaccggaagcttctgtgtggtatggctgtggtcttaatcgtggccttcttcatcctctcctacctcttgtcgaggacaaggacgtgagccagtgggagccaagggcagccaggctcttgtacacctggcatcctggtttcctaaggacctgactacaaaaaaaaaaaaaaaaatccctttgaaattatcatcatgggtcattcatcttcctaagtcaggacgactgcagctgcctctgtcataatgagctcatcttggcttgtcctgtgtatgaaggaagaagaaaaaggcaaaagccaatgccactccctggtgctaaagacactggcagagccagagccatgttgtgtgagatcaagccaggtctatgcaaagcatctgtgagtcccaaatgggcccactgtggccatcggccacactcctcagaagccaggatcttaagggccttctggattgccctaacctgtttatgcctggtttaaacccgtgtctgtgtccttgaagagtctgaaactgacaccagaagggaatatggccgtgagccctctccagatgatggtcattggctgaggctgctgatgaggagtggacctgggcaggctgtacccaccagtcactggcaagaggcaaagccgtggatagaggagtggactgcagtccagaggcactggactaagatccttctgggccacaaggccaggtgtccaggagcacaggcacagatgtgtgtgtccttgggattgagaatcttatcagtgtcaaagatgtctccatccccagacagacagacagagagctgtaccaggtggcttttcagagccaggccgtgctggggtgctctctctgctggggatccttatggggccggag

SEQ ID NO: 981 - DNA, 1461 bp, Mus musculus
acttccgctaaacttctcccgggtttctggccctgcccttgaggcattaaagagtagaggtgcctggggacagctagccactgactggtcacgtagcctcaagcctgcagacttgggtcctctgaaaccggatggcgtttggcgaggactagtgttacaggtgggagaaggcccatatccctctgtgtgggagcctcaggcggctttggaggtggaggaagcagtgagaagaagttttctctgcaggatgtagctgagctgcttcggaccagagcctgcagtagggtggtggtcatggtgggggccggcatcagcacacccagtggcatcccggacttcagatccccagggagcggcctctacagcaaccttcagcagtatgacatcccgtaccctgaagccatctttgaacttggctttttctttcacaaccccaagccctttttcatgttggccaaggagctgtaccctgggcactacaggcccaatgtcactcactacttcctgaggctcctccacgacaaggagctgcttctgcggctctatacacagaacatcgacgggcttgagagagcatctgggatccctgcctcaaagctggttgaagcccacgggacctttgtaacagctacatgcacggtctgtcgaaggtccttcccaggggaagacatatgggctgatgtgatggcggacagggtgccccgctgccctgtctgtactggcgttgtgaaacccgacattgtgttctttggggagcagctgcctgcaaggttcctactccatatggctgacttcgctttggcagatctgctactcattcttgggacctccctggaggtggagccttttgccagcttgtctgaagcagtacagaaatcagtgccccgactgctcatcaatcgagacttggtggggccgttcgttctgagtcctcgaaggaaagatgtggtccagctaggggatgtagttcatggtgtggaaaggctggtggacctcctggggtggacacaagaactgctggatcttatgcagcgggaacgtggcaagctggatggacaggacagataagactatggcttcttcacctggggaagtcacacagcagatcatcctatgtccagcaagacttcatgcctgaagacagctccaacacgtttacaaacatgaaccagaccacaacatgtggcctggacagtggtcctccgaggctgcctttggaaaggctgaccagggatgtctacccttggggcccctccatgtgtgcgccctgtccacctcatcactgctgaaggtgtagtgcaggtgctgctttctgcagcggcccttaagttatcacgagggcagcacagcacgcccgtcgccaggcaggcgatgcactagggcaatctagcatgttgatcggtaaagtggcatctttaactacaacatcatttcttgcatgaaataaacttagtataaaaa

SEQ ID NO: 982 - protein, 319 aa, Mus musculus
PQACRLGSSETGWRLARTSVTGGRRPISLCVGASGGFGGGGSSEKKFSLQDVAELLRTRACSRVVVMVGAGISTPSGIPDFRSPGSGSNLQQYDIPYPEAIFELGFFFHNPKPFFMLAKELYPGHYRPNVTHYFLRLLHDKELLLRLYTQNIDGLERASGIPASKLVEAHGTFVTATCTVCRRSFPGEDIWADVMADRVPRCPVCTGVVKPDIVFFGEQLPARFLLHMADFADLLLILGTSLEVEPFASLSEAVQKSVPRLLINRDLVGPFVLSPRRKDVVQLGDVVHGVERLVDLLGWTQELLDLMQRERGKLDGQDR

SEQ ID NO: 983 - DNA, 40952 bp, Homo sapiens
atagtaaaaaaaacaacctaaatctccctttttttttgagacagagtctcgctctgttgcccaagctgtagtgcagtggtgtgatctcggctcactgcaacctccgccttgcaggctgaagcaattcgctgcctcagcctcccgagtggctgggactacaggcgcccgccaccatgcccggctaatttttgtggttttagtagagacggggttttaccatcttggctgggttggtcttgaactcctgaccttgtgatccacctgcctcagcctcccaaagtgctgggattacaggtgtgaccaccgcacctggccctaaatctcttcaataggagactggatacatatgttgtgaaacacttatacaatgaaataccgtataggagtaacagcacattggttacacatacccacatgactctgaaacctagtattgagccaatgttaaaacgcttgagttacacacccctatttaatgaaggacaaggaaatgcatgggcatgagagggagcctggctgggggagaagtgtggtctgaagggtactgggaccctgactgtgccgtgtggcttcattccttcctaagctggttggggcacatggatgcctattacagcattctgtactgtgacttatagctttcaatatgtcttaaaatatttgaaaataaaatgcagtaagtatgcatatgggttaggactgacaataaacaataaaaagtatcttttcagggcaatgaggacatgaacacttttaacccttacccccaatattttctttaacattgtgattagcaaacacacacacacacaaacacacacacacaaacacacgaacacacacgcaacacacacacacacacacacacacacacacacacacgttctggttcaaccaggtggaccagccacatgtcggtttcactgccacccacatccatacctgtctcccaactgcaccaaaacataattgaacataagaaagacataaaaatagacagaatacttcaacaacatttaggaggcagaaggaagatggagaaatagcacgtgacatgccagtggtgtgtaggctgaccttggtcagggagaaccaatgtgctttgggctgactgaggccatgtggagtcattattagacggatgtgctgtggtcacacaggggagtgctcttttgtttaagggcaacaggcattgtatcagcaacttactcctaagtggttttggaaaaaagctacagacacacacaaaggcaaaagcggtaaaaggttagcaatcgggggggctgggcgcagcggctcacggctgtaatcccagcactttgggaggctgaggcagagggatcacttgaggtcaggagttccagaccagcctggccaacatggcgaaaccctgtctctactaaaaatacaaaaaaattagccgggcagggaggcacgcgcctgtaattccagctactcaggaggttgaggcaggagaattgcttgaacccgtgaggcggaggttgcggtgggccgagattgcaccattgcactccagcctgggaaacagagcgagactctgtgtttaaaaaaaaaaaaaaaaaaaggtttgcaatgggaaatttaggttggggtatagtagttctttgtgttatttttgcaacttttctgtaatgtaaaaatgttttaaaataaacagtaaagaagaaaaataggttattttttttcctagggttttaaataattttaaaccaaagataaatctgtattatggtgatctcacctttgtaacctgtaggtccccgatgtttaattttagagctccaattgctgttttacacaggatcactgcctcatcactacttttcacctaagacatcaaaaacaaaaacaagaaacctcagaatgtgggcagttgactaacaaaggaagctagctacttgtacattaacttaaccttgatgactagaggccttgtggtctctaaaggtccggacagtgagcatgaacacaagctgttaagtcatacatactctaaaaggtattgcccacatgccacatttaccttctcacgagtcttttccagaaaagtaagagccacattaggatctggaaaagaaagaacaatcagaaggaccatcaacagactggtttctgctaaccaagacacccttaggtagggtaatctttaggttttgaccataaagtataataaaaacataatatctgatacagaaaacacaaaagttcagttaacttatatttcaattttaaccaccatttggatctgctcctttataaaacaaagtgagacttaccagtcatctgtctaactacgtgaagaatgatttccacgagggacagaggattcaccctgaaataaaagccaccagtctttgagcaccaccgagcatcaatgtactcatctccaaagtgaaaaacggatgagaggcttttacctgtgttcaaattcactgataaagttttcataaagctgtgaaaccaaaacatggagagaaattataggatgtcttttattctgcaaaatgaagaccccaaacactatctttggtaaagaagctgcatcaatgctatcaagttgggagtgtgcaagccacagtgcccagcacacagtaagcaatgcatgtttgcagaatgataggagaccatatcagggcttatttacattcacataaatgatcaacagattactaaggaatattaggtttcttctagttttgggaattagagtactgacctataagaacctccagacagattcctatattctttcttccaggtactgtaagctaaatagactaccagattgaaacgctccctcagttctctccctgtggcttctgggctgttggtatttggacccttgtgaagatggcctgcgctgccgtgtggtccccagcctaccaggacaggtttatttgtatctatcctgcttatttaaataataagaagaccattgtggaaggaaggtgaatcccataagtaaggctgttgaaaatcctacagccagagattcaagatctatgttcaggtttatttgtatctgtcctactcatttaaataataagaccattgtggaaggaaggtgaatccccataagtaagactgttgaaaatcctacagctagagattcaagatctatgtttagcagttggacttaatgcatttcttgagaaaaataaaatgttctctagagaatggaatcgtgatgttcaatataaaagcagaatctgggcccagctcaaacaggaaaatggcagcctctatcttgtacatttcccaccacgttaagtcagtaatgtcgtgtgcagcataaatgatacctaaactaaaaacaaggacacaaaaaaacaggaggtggtgaccaaagtcttcaacaaggagagggaagtaaaaaaagggaaagaaaaagacgtaaccggccgggcgcagtggctcacgcctgtaatcccagcactttgggaggcagaggtgggtggatcatgaggtcaagattggaaccatcctggtcaacatggtgaaaccccgtctctactaaaaatacaaaaatcagctgggcatggtggcgcgcgcctgtagtcccagctacttgggaggctgaggcagaagaatcgcttgaaccagggaggcagaggttgctgtgagctgagattgtgccattgcattccagcctaggcaacaagagtgaaactccatctcaaaaaaaaaagagaaaaagaaaaagacataatgtagtatcaggatcaagtatgcggtactactgtaagagacctgaatggaggcttctaatttgtatcaaaggaaaacagaagcttttcgtttgcatcatttaactgaactgtgaacgcttgtgcctcccatctttatcatcggagttgacagtgaaataaatttatatcagaagtttgcatctcaattttatggagtataaaagatttttttgacattcaacgcagtttttttggaagaaagaatatcttaaaatggacaatggactgtacaataagttacttgaaatcttatatctatcttctgtgtaaacatgtttcagatgaatttcaattagatttgaaatacacattttgttcacctattaagttaatgaaataaaatttaaaacaaaaagagaaatgtttgctaatcaaacagaatggagttccttcagattttaattaaagctaattatgcaccgttttcaaatttcttagccattcagcacacttgagcacttcctcagactccatactagatactacaacatagaacgtgtaagacaaatgatgtgtcttcaaggagctcctggtccactgaagacagtctttaaacaaataaatgacaatacagtgagtttaagagcaaaaagaaagaaagaaaaaaaaaagggcagaagtgcatcagccaaagggagaggcttcaaaggttactgtagaagtggcaatactgagtttcaaggaatgaagggcggttagagaggtggccatttggtgtgggaggggaagaagctgagagaagaacattccagacagtaacaaacatgtgcaaaagcactgaagaaaaaaatacattatgtttcaggggcatttctgagggacacagactaggaagcactgaagattggtctctgtccagagtgcaaggccgaaccagaggacacacatgatcatttctattttagaaacacgcctggggcagagaggacagcaggtgaaagagactgagagagaacagtcagaggctagtactggccaagacaggagagtgagggagcaaccgtaatgaggatggatgaataatttgagagagatttaggggtaacgaaccagactcactcagatgtgggccggtcacagagaaggagagctgacaataacccctgagttaggggtaactgggccaagagcgcctagtgtgggcacagtaggagagggaacctccaaatgaccttaactttggattaggagagcctgtagttcctctgggatatgaaggtagaaggatgaaaacacccctgtagcaattacatattccaatcaggcacacaagaaacagtcaactaaataaaatggcatttttgtcccggtgctgtggctcacgtctgttatgtagcactttgggaggccgaggctggtggatcacgtgaggacaggagttcaagaccagcctggccaacatggtgaaatgccatctctactaaaactacaaaaattagccaggtgtggtggcacacgcttgtaatcccagctacttgggaggctgaggcatgagaatggcttgaactggggagacggaggttgcagcgagctgagatctgccattgcactccagcctgggcgacagtgcgagactctgtccctttgcccacccaaaataaataaaatggtggccaggtggtggttcacacctgtaatcccagcactttgggaggccaaggcgggtggatcgcctgaggttaggagtttgagaccagcctggtcaacatgatgaaaccctgtctctactaaaaatacaaaaattatccaggcgtggtggcgggtgcctgtaatcccagctactctggaggctgtggcaggagaatcactggaacccgggaggaggaggatgtagtgagctgagactgtgccattgcactccagcctgggtgaccagaatgaaactccgtctcaaaaaataataataataaataaataaaatggcatttttattacaaaagactatttcaaagatatcttccttattagaaggaaatgtttgaactttcctgacatgtattaatctaaaaaattaccttaaaaaagaagcccactaagtccagaaagtcaaaattacttctggtgactataaattcataaatactatccattttacacttatgctagctggatcccaacaaattttaaaggtttattctgtctatgggaaaagtaaactcagatctgccaacctaaataaacatcaccttaccatgaggttgaggaaatattttgtcatgtgtagaaaagtgatttaaagataagaaaccaaaggacagagataaacaattatgaatcatctatcgtgatgatttagaaccttagggaacaagtattaagacaggtctcaggccaggcacagtggctcctgcctataatcccagcactctgggaggccaaggcaggcagatcacctgaggtcaggagtctgagaccagcctggccaacactggtgaaaccccatctctactaagaaatacaaaaatcagctggctgtggtggtgggcacctgtaatcccagctacttgggacgctgaggcagaagaatcgcttgaactcgggaggtggaagttgcagtgagccaagatcgcaccattgcactccagcccgggcaacaagagcgaaactccgtcaaaaaaaaaaaaaaaaaaaaaaaaaaaagcaggtctcatttatcattttcccacataatccagaagactgaatgttcagcaaaatctccaggcttacagatgattgtaagttcctctgaatagtaaaatgtcaaattgatggctataaaccacaagaaaatcttacaagcccaggtggtggggtagcaaggtggtaagctctattgcgagcatataaaagtaatgtattcaggagaaatgactcaaaatgtaattataagctatcagttgcaatgctggtatgaatctctgattcattcagaatcagagaaagccatcatagagtaagatgtcaggaaaaacttcaaagaggaggctaccagtgagcaaattcgtggggatgtgtcaggggatctggggaaggctgggaaagaaggtgcgtatttgtctactgctgaaaaaattctaaaagtcctctattacagaggcagcatgacactatacaggactctccctccaatccacctaccctcaaccgaagtacaaaaggtgttttattttccacactacccaggacagaagtgtctgggcaagcaagcagtgcggcttaaagaaggggagtgatggaagttatctaagattcccacagatagtaatcttcctcataccttactccaccctctaactgggtttgaactttgtttctaaaactagagtactaaaaagaagcctatgaactaagatacttaggcatgttgtaagataatactttatgctagaatttcaaaaaaagccagaatgtcagtgtttgaatcctcttctgccacttatcagcagtgatctatggtaagttacttaaagtcttatgtttgcttctacatcaaaaaagtgagatagtagtatctactgaccagcgttgtcatgaaggatatgtgaagcgctcagaccagtacctgacgtaaagtgactgctgaatattggagcttattattattattagcataaagcctatcttattttcaaaagtccttgagcacattcatataatctaatctggtatagcaaattatttaccttaatgagaccatctccttgggcaaagcacggatcctgcacaaaatcaagcacctgaagtgtcagctgatgccacaacctgaaaaacatacagcccttaagacctctaacctaatatccagtcacagacacctccagccttgatgattctatcaagtcacaaatacaggttgggtatctctaatccaaaactccaaaactccaaaattcaaaatgctccaaaatccaaaactttttgagcaccaacatagggctcaaaggaaatgaccactggagcatctcagatttcagatttttgatttatggatactgaacgggtaagtatatatcgcaaatatttcaaaatttgaaaaaatactaaatccaaaaaaacttttgccccaatgcatttctttctttcttttttgagacagagtctgactctgttgcccaggctgtagtgcagtggcgccatctcggctcactgcaacctctgcctcccaggatcaagtgattctcctgcctcagcctcccgagtagcagggattacaggcatgagccactgcgcccggccgccccaatgcatttctgataagggatactaaatccatactaaccagtctctacggtgtagcagaaagaatgctaaagcagatgtgataaacctgagttcttttcctggctctgctattgaatggctatgtcactttgagatcacttaacttctctaagactcagttttcccaggtatgaaatggagaacattaatctagattaactcaaagggttattgtgaggtttcactggaaacgagaactttggaatcatacatatctaacttgagatgctggctcttctacctattagctgagtatctcagggaaggcaattaaaatgagcttcagtttcctcctctgtgaaaaggatgaataaaggattaaataagctaatatttaaaacctcagggacagtgacatagcgcttcatccaaaacccaaaggctaatatttaataacgcagataaaatgctttgaaaattaccaagtgctatccaacacaaaccattatttgccaaacattaatttgctctcaaaaactgctaatagcagaaggctgctgaatgctaaacatcatcaaaacatgtatggaacatctatgtgaaaggtattatattaaatgctagggttaacagggaggttactacaggagatgtattttctatagaatagctccagcccaatgccagcaatttattctactcatattaaaaggaggttagtgcttagcaagaatttaattgctctgcaattcatcctgtttctaaacaaacctaaactttaagatctttctaggggcagaaagcccatgagaaatacaatggaaggtaaagacaatgggacggcggaagtggttgcaccccgtgcaaccagctgcagaatgaatagggaagacagcaaagctgtactagcctctggtttatcaactccagaccatgagaaagataactgtagatacagttacactatgacaaggctaagcacgaatcaccaacatgtttcccaaagtgggtggtggccctgaaagtgtgtttgcttgttagatggaatcaagagctaaaatcaaaggctactcctgaaccgttttagtaagacccgaggtaggagttcagaagcctcagtctcagtcccccgttaaggaagcagtgaatctcagaccgaaacatcctggctacagctcttggccctcgtggtctgtcatccctcttattcctcgaccctgccactcgaggttcctcagcaaaccttgccggcacagccggtcgctacacgtccccgtttccccccaacttgggtctgggcgccctcagcccatcaagggtccgctcctccgcccgcctgccccctccgtctccctctatcgccggggcccagggcccgtctgctcggcgctcacttcttcgtgtagagctcctccagacggtgccacacagcgggctgcccgggcccggagctctggctctgctgtaggaagcccggtacgtccttcatgacagcaggaagacccccggcacagaagaacaaccgggatgtcagcaccgcggggatggctgccggaaatgctcactcacttccggcgccgagcggcgcggggcaggctgggagcgccgtagcaggccgggggcgggccccgctggttgctcggttacagcgcgtctctgcgctccgggcaaaactctccggcgtttgcagcccacttcccgcgcacttggctgtgccattgaggcgttaaagagtgtgggcgcctgtggtcgaacccgctacggactagctttgtggtgtcagcctttgtgacccggaattgctcctgtcaaatgaggatcttcccagtagtgttttgcgaggattaggtgtaaatataatgcctgaccatagtaaaagcgctcagaaagtattaactatcaccgccatccgggttgaaaaaggtgtgagcgcagggtacagaaatgctggctccaggtttgacctccggggcgagagatgagacaccagactagggaacttcctctactcgcctctacgtctacctgggcgcgccggaggcgtcggcaaggaggcgggggcgggacgcggaggcgggaccggggcgccgggggcgggggcggtaggcggaggcggggctggggcgccgggggcgggggtgggaggcggaggcggggccggggcgccgcgggcggggcgccgggggcggggcgagtccggaggactcctcggactgcgcggaacatggcgttctggggttggcgcgccgcggcagccctccggctgtggggccgggtagttgaacgggtcgaggccgggggaggcgtggggccgtttcaggcctgcggctgtcggctggtgcttggcggcagggacgatgtgagtgcggggctgagaggcagccatggggcccgcggtgagcccttggacccggcgcgccccttgcagaggcctcccagacccgaggtgcccagggcattccggaggcagccgagggcagcagctcccagtttcttcttttcgaggtattttgggcaaggacaagcacttcttgcgtgttcgttgtcgacacctcgcccactctttctcaccttgccgtgtttcctttgcggcatgtctgggagtttacgtgcgttccaacaccggggcctccgtctttatgctgatctgtggacgtcccttatgggggttttgtcgtttatttcaccattccctcattgaaatacgttctaacctttagttattgtgcatcatgctgtggtgaataaccttgttggcacctcactgtttgcataaattcctagtactgggattgctaggtccaaaagtatatgcatttaacgctttaatgatccctcataaatgttgtgcggttaatactcccactggcatgtgatcgtacccgtctccatagtaattgcatctaagaactgaggctacataggaaaaaatcttaaggtccatggttgttaggtatcagatgccctataatggatgaatatttaagtaaataatggcacattgacttgctgtctgacacaactgctgaaaatgttggtgaaaagtgagtctcgaagtggtagctcacacttgtaataccagcactttcggaggctgagacggggatcgctcgaggccaggagttcaagagcagcctgggcaacataacgagacccccatctctaccaaaaatttaaaaattagccgggcatggtggcgcaagcctgttgtcccagttactcctgagactaaggcaagaggatcccttgagtccaggagttcaaggctgcagtgagctatgattgagccactgcactccagcctgggtgacagagcaagactcttatctacctgtgggaaaaaaaaagaaaaaagtttaatagatcctgaagagttggccgggcgcggtagctcacgcctgtaatcccagcactttgggaggatgagacgggtggataacgaggtcaggagttcgagaccagctgggccaacatggtgaaaccccatttctactgaaattacaaaaattagccgggcgtggtggcgggcgcctgtaatcctagctactcaggaggcggaggcaggagaatcacttgaacccggaaggcagaggttgcagtgagccgagatggcaccattgcactccagcccgggcgaaagagcaaaaactccgtctcaaaaaaaaacaaagatcccgaagagtcagtcgttcatccaagaagccctgactgagctcttattctgtgccagactctgttctaggtgctatggatggagcagggaccaggacctacaaacacgtggagcgcattctaatatctgtgatactctgcaaaactgttaaaacaaatccttgcggccgggcgcggtggctcacgcctgtaattccagcactttggaaggccgagacgggcggatcacgaggtcaggagatcgagaccatcctggctaacacagtgaaaccccgtctttactaaaaatacaaggaaattagccaggcgtggtggcgggtgcctgtagtcccagctactcgggaggctgaggcaggagaatggcgtgaacctgggaggcggagcttgcagtgagccgagatcgcgacactgcactccagcctgggcaaaagagcgagactccgtctcaaaacaaaacaaaacaaaacaaaacaaaacaaatccttgctaccactggccctaaagcaggaggcatagggctgcgtgtgaggagtagtccattgcatgggcttcctccagtttggctttggatttttgagctctctgaatttgttgtttgtgtcctttgcacagtgtccctcccaggttgcacccatgcctgcccctcagggtcccccactcccagtgaatttcacaccatgcagcatgtactttaagccatacatcttacgtatgttccagacatttggtaaaacgccgtttatgtgtttttcagtgactcacaaacattttatttacgtagatgaggaatgtactcaggcacccttcgtgataccttgccctcagcaggcactcaacagcaataataactttcattccttttgtgcttctcttaacagttcgtgtttagtaggagcacagtagctgtttggggaacgaccttaagtgaatagatgtctgaaatgctgtgtgaagtggggcgcttaataggtggtgagatggttttagaaccagggttttccctctttgcttcttgactccttaaccagttttcattaggagacccctttggaggtttgcagtcagtcagagttgagtgcctactgagtgtactgaattatgaaatgagcacagttcccattaacctgaattttttgctcccaagtaagtcttgatttctgatttatgactgctttttgttgtaccccaatagtcgtctaagaaaggtgattattttgagaggcctggggagacacacatgctcattctcgagggtggcggtggtgcagagggcagagccatgctcgttcttgctatcctgagattggttgctatctgtttcctttgctgctgtgtttttttctgtcagtattaaaggtggaagaaggtccatatctttttctgtgggtgcttcaagtgttgttggaagtggaggcagcagtgacaaggggaagctttccctgcaggatgtagctgagctgattcgggccagagcctgccagagggtggtggtcatggtgggggccggcatcagcacacccagtggcattccagacttcaggtactgcccacagtcccacctgccttctgcgctcccctcccctgactcctgccctccccactgcccagtttattccacttccctgtcctcttccaaaggcctcagagcctttcttctctccctgcagatcgccggggagtggcctgtacagcaacctccagcagtacgatctcccgtaccccgaggccatttttgaactcccattcttctttcacaaccccaagccctttttcactttggccaaggagctgtaccctggaaactacaagcccaacgtcactcactactttctccggctgcttcatgacaaggggctgcttctgcggctctacacgcagaacatcgatgggcttgagagaggtgagccctctgtgagtcgcacacattctttttctcccacggaggctcgggtgcctgtttctcccagggaggctcgggtgcctgtttctcacaggggatgctcgggtgcctgtttctggggacggccaaaacctatcgcttatgcttcttccttgggactttttttgagccaactagttagggctttgttcccaaggaaaatgtcctctgggtgtttaaaggccactgcttgttctcctgcatacctgcagagctgtgtattttgggcagaagttgacattgttttgccaatctggtgtgatgatctctttttttcttctctcttttaagaagtgtattatggaatttttttgagcacacacaaagagagcaatgtaacgaaccgtcctgtcctcatcaccagcacacagccagttcttcctgcgtcctcaccaccttcttccaaatccccagattattttgaagcaaatctctcacatcatgaatttaatctagaaataatctataaacacatgaatggatagctctagagaatactttaaaaacaactccggccgggtgccggattacaggtgtgggatcacacctgtaatcccagcattttgggaggccgaggcaggtagatcacctgaggtcgggagttcgagaccagcctggccaacgtggcaaaaccccgtctctactaaaaatacaaaaaattagccaggcgtggtggtgtgtgcctgtaatcccaggtactcgggaggctgagacaggagaatctcttgaacccagcaggcggaggttgcagtgagccgagatcgtgccacttcactccagcctgggcgacagagggagattctgtctcaaaaaaataaataaaaataaaaataattaaaaaataaaaacaactctgatagtgattcacactgaagaatcactagtaattccttaatatggtcacacttagtctgtggtgatttcttgaccgtatccatatggtgcccaaaccagcgattcacaggttgtgccaacttctggccgtgcacctaacggaagcacttggtggggccttttccttacgtgcagtgatgcagacaggtgctgggacagtcagctctccgggagccaggagcagtctcctggctcccggagagactgctgatgtgttgtcagttaaaaagaggtggcaccttggctccaggaatgtgtttccttgccagaaggatcccctgacttggaaccacagaggcagcagtggatgccccatgttggtgggctcttctcccagaggtgcagcagggcaggccttgtgggaaggtgggagctcctggctgtgagattcagcactgctgagttagggcagcgacagggacttgggaagcctcctgcagctgggaccctggctgtgccaccgcagcctttcagaaccagttaatactaacacaactttcataagaagtcactttttgtctgtttctaccaagcaattcttttggaatttatgatatttatatcctcattttaacttggtatctgtagaatagaagatatgttcctggatattagatataaatttttgagacagggtcttggctctgttgcccaggctagagtgcagtggcatgatcatagctcactatagcctgaactcttgggccgaagtgatccttttgcctcagcctctggaatagctgggactacgggcatgcactaccatgcctggctaattaaaaaaattttttaagacaagtctcactatgttgctgaggctggtctcaaactcctggcctcaagtgatcctcctgccttggccttccaaagcactgggattacaggcatgagccactgcacccagcctggtattaggtgtaattttttttttttttttttgagacagaatctcgctctcttacccaaactggagtgcggtggcacgacctcagctcactgcaacttccacctcccgggttcaagcgattctcctgtctcagcctccccgagtagctggcactacaggtgcctgccaccacatctggctaatttttgtatttttagtagaggtacggtttcaccatgatggccaggccggtcttgaactcctagcctcaaatgatctgcccacctcggcctcccaaagtgctgggattacaggcgtgggccactgtgcccggctggatataattttatttgagcttttatcaaatggtttttcgtactgagttttgacaggctttgttttaaccgtgatttggctccagctaggcgcccctttgctcccctgccttattctggttgatggcgcatgtaggtgatacgggcatgaaaaccaggcttgaggacatcacaaccccaaggggctgtgcctccttccaggagtcctgccaagcccagaagttgtgctcttggccttgcgtgctcatctcggaggcggcagcaacacttcgctttggcttgaatttcagtgtcgggcatccctgcctcaaagctggttgaagctcatggaacctttgcctctgccacctgcacagtctgccaaagacccttcccaggggaggacattcgggtgagttatcctgctgttggttgtccttctgcagtttgctgttggggtgatctggaaaagtggtattttataagcattgtctcgaaaggacagttgaacaataatagtgtgaaacattttatttgtaaattagaaaatcaatacatgcttgtaaaaaaatttaagacaatatagaaatatgtagggaaaatgaatctcccttcagccaattccagctgcccactttttttttttttttttttgagattgagtctcactctgtcgcccaggctggagtgcagtgggcgatctcggctcactgcaacctccgtctcccgggttcaaggaattcttctgcctcagcctcctaagtagctgggattacaggcgtgagccaccacgcccggcaatcagatggccttttgtgccgagcttatttcctgaaaatgtttctcgctccttcgccttgtagcttgtgttagtatttcatcctgttttatggctaaatgttccactgatgtatgcaccacagttggtttgtttgtacatggatgggtgtttgggttgtcccacctttctgctcttgtgtatagttctgctgtggagcatatgcaagtattcgtttgagagtccttgttttttattcttttgagtatgatacctacaagtattgctgggtaactccacgtttagctatatttatttatttattttttgagacacagtcttacactgtcacccaggctggagtgcaatggcgcgatttcggctcaatacaacctctgcctcccgggttcaagcgattctcctgcctcagcctcctgagaagctgggattacaggtgcctgccaccatgcccagctaatgttttttgtatttctagtagagatggggtttcaccatgttggccaggctgctcttgcattcctgacctcaggtggttcacccgcctcggcctcccaaagtgctaagattacaggcgtgagccaccatgccctgcccatgtttaacttttttgtttgtttgttttgagacggagtctagctcttatcaccaggctggagtgcagtggcgcaatctcggctcactgtaccatccgcctcctgggttcaagcgattctcctgcctcagcttcctgagtagctgggactacaggcacacaccaccacgcccggctaatttttgtattttagtagagacggggtttcaccatgttggccaggatgtctcgatctcttgacctcgtgatccgcctgcctctttctcccaaagtgtgggattacaggcgagagccactgcgcccggcccgttttaactttttgaggaacgaatatactgttatctgcagaagctggaccattttacattccaccaacagtgggcaagggtttcatcttttccacatcccaacacttactttccattttttaattacagctatcccagtgggtgggaggtggtaacccactgtagcactgattggcattttcctaatgattcatgatatcaaacatctttccatgtgctttttggccatttgtatatctttggagattgaagtcctttgcgcattgtttaattgtgttgtcttttttattgttaagagagtcctttatatattctggaagctagatccttatcagagacatgatttgcaaatattttctgtcattctgtaggttgtcttttttactttgttgatgtcttttgatgcatagaagttttgattttgatgaaatctagtttgtctatttattttctcactcttttggaatcatatctgagaaatggtattgttttactcctgttttcttataagagttttatagtttaaagcttttacatttagttctttgatccattttgagttaatttttgtgtgcgctgtaaggtagggatccagcttcattttcttttatgtggatatgtaattgttccagcaccatttgtttaaaaaaactgtggtcttggcattgttgttgaaaatcagttggccataggtgtatgggttatttctagagtctcaattctattccattgttatctgtatatccttgtgcctgcactataatgttttggttactgtagctttgtagtaagttttgaaattaggaagtgtgagtccagcacatagtagaaacttgatatatacgtattattgttttggtcaactcattcattgaatgaccaatttattcaacaaatagtttagtctcctcagtgccaggccctttgctgggttctgtggatgtgaatagaaattaaaataaggtggagtcatccaacagttacaactgggtgccatacgaattttactataaatatgtactggacactacactgactcagctgtaggaacagagtaggctgggaagcacctttgagatgaggccgtctggatgtaagagtctgtttctggcagcagagacctggagtgtgggaggcctgcttgctctgttagggtttgaactgtatcctgacgatcatgggaggcattggaggatttttaggcaggaaaatgatgtgaagggatttgcatttaaaagagattatttgggactgggcacagtggctcacgcctgtaattccagcactttgggaggcctagacaggcgggtcacctgaggtgggaagcttgagagcagcctgccaaaatggtgaaatcccatctctactaaaaatacaaaaattagccaggtgtggtggtgcacctgtaatcccagctactcaggaggctgaggcagaagaattgcttgaacctgggaggggaggttgctgtgagctgagatcgcaccactgcactccagcctgggtgacagagtgagactccatctcaaaacaaaataaataaataaataagagaataaaatagataatttgggcaacaggttgatgttaattccccacctttgttcttctccttcagtactgtgttggctggtctgaatcttttggcttttcatataaatttctgaaactgttgctatctgttctctgcctgttttatttttgttgttgttgtttggattttttgtttttttgagatagagtcttgctctgttgcccaggctggagtgcagtggtatgatctcagctcattgcaacctccccctctcaggttcaagcgattctcttgcctcatcctcctgagtagctgggattgcaggcatgcgccaccatgcccagctaatttttgtatttttagtagagatggggtttcactatgttggtgaggctggtgtcgaactcctgacctcatgatccacccgcctcggcctcccaaagtgctgggatgacaggcatgagccaccgtgtctggcctctctgcctgttttttaagacttttgtctttggagttttgcggtttctccactgtggttttccatatgaattttcttttatttcttctgcttaaaatttgtaggccagttggtcatggtggctcacgcccgtaatcccagtactttgggaggccgggtgggtggatcgcctgaggtcaggagtttgagaccagcctgaccaacatggagaaaccccatatctactaaaaatacaaaattagccgggcgtgatggtgcatgcctataatctcagatactcgggaggctgaggcaggcgaattgcttgaaccagggaggcggaggttgcggtgagctgagattaggccattgcactccagcctgggaaacaagagcgaaactccatctcaaaaaaaaaaaaaaaataataataattgtaggccttccttaagaaaaataaaataaaattctaggctgggcgcggtggctcctgcctgtaatcccagtactttgggaagctgaggcgggtggatcacctgagttaggagtttgagaccagcctggccaacatggtgaaaccccgtctctactaaaaatacaaagatgagccatttgtggtggcacccatctgtaatcccagctactcgggaggctgaggcaggagaattgctggaacccaggaggcagaagttgtagtgaaccgagatcatgccactgcactccagcctgggtgacagagcgagatgccatctcaaaaaaataaaatataaaataaaattctaagccctgcaaccaactgaatggagccctccccttggtcaagggaaccccagagaaaccttggaagcttgagttcctggccgtagcaggagaggaggtcagacgcgcctcactgtacccctccctccccagccaccattaggcttcttcactaagggctaaacagaaaccagcccttttcaaagactctacactgctaatgtggattactggtttatcttcccagatacagattaaagacaagatgagattaatggttccttcacccttccctgagaggtctgcttagttctcttcctctgtttccttctatcttaggtaaaatgtacatttactgggcacttactgaagtctcacaagtacgtaaccactcacctcacagccaccctccctctttgaaggaccacatgtaattactaaacctcctgagaacctcttgggacagaaacaagcacagatgtgccgtgactcatgtttttcctgtgggcaccctcaggctggctcagtagccctcacttgcttgagatcctgaatctgcgggttggcgtctttcatggttgctggatcatactctgccgttatctcttcggatatgagttgcccctagcccactatctggcccctctctttagggacctctgattgaacatacattagaccttctctctcctgctgttcctgatcactcttctgtcctgtaattgctgcttcttgtgctgcattctgggtaatttcttctggtcttttttccagtttactaatattgtattctgttataaggtccttccattgagtgtttctttctttcttttttcccaaacagcaactcaaaacagacattgagttttaattttggttcctgtactttttatttctagaagttctatttggttatttttcaagtctgctacattattacataattttttaatagttttatatctttaatagatagttttttgttttgttttgttttgttttgttttttgagacagagtctcgctttgttgcccaggctggagtgcagtggtgcaatctcagctcacagcaacctccgcctcccaggttcaagtgattcccctgcctcagcctcccaagtagctgggattacaggcacgcatcaccacgcctggctaattttttgtgttttagtagagacagggtttcaccatgttggccaagacagtctcgatctcctgacctcgtgatctgcccacctcggcctcccaaagtcctgggattacagagctgagccactgcgcctggcctttgatagatatttcaagttcatcttttttttttgcttccttaatttttttttttgctataccccatgcctccaagataacagttttttctttttaatttaaatataatacagttttactgtgtatccaagaatatctgaaatctttcgtgggtctctttcttttgtcttttgtatctgttgctttttgctgggctgagcctgcttaaaacaagccccgttagctgtaaaggtttaccttagaaagtcaggtgtcttcctctgtaactctctcccttttccatctgctccaaggcatttatttatattaatcttgacgcaaagggaagttgtgtccacttcaccttggccagtaaggaagcagtgtttggcagatgttgttactcctaataatgccagccagtgagtgaagctgacctgaatgcctcccagggctgaggcaatggcatgatcaccgaagctcaaaccagagacagtttcacctttctgactgaatagtgttcggtgtaggccaaatgcctgcagactactgtttgaggactggtgtggtctaccaggtgtttccttagcgcctggatgtctctggctgccatcccagggatagagcatggtgttagatacgctagatgcctgccgaagtaattatgggtgaaacatatgatgtccaagatttgcttttaaaggctccaatacctcctcccagattccggagggctgtgaaacaattagctatgaaaaccggtaattcctgaagctgggtacatgggggttcatgatccctctctcaccttttttgggggagaatgtttgagactttaataagaacttgttgccttttccttttacagggtgttgcaggcatcttcctcaggcctgttttctctgttttccaggctgacgtgatggcagacagggttccccgctgcccggtctgcaccggcgttgtgaagcccgacattgtgttctttggggagccgctgccccagaggttcttgctgcatgtggttgatttccccatggcagatctgctgctcatccttgggaactccctggaggtttgtcagcaggcctgtgcagggaggaggctggagggcaggggaagggaggggtacaggagtcatctcatgggctgtcggcaggcctgtgcagggaggaggctggagggcaggagaagggaggggtacaggagtcatctcatgggcccttccagggctggtgccactttgggaaggtgaatggattcagctggggttccaggctgagggagcagcagcctgtgcaggagacaggaaggtgggaagctgctgggctttggaggtggtataggtgtgggtggggcaccacgtgtgaggagaagggagaaggatgggggtgtgggggcgagatggaggggcagggcctcccaggtcagatcaggaatactgatgctgcagtgggaggagtgataaatccacagggactggcccggggacgtagctgcacccttggggtcagggaggcctttggggagtggagagtggagcaagcagtgccaggaggctggtcctggagaaggtggagctgtggtcgcctgagggatggcgaggagggggactggactcgcagtctgtgatgttttggggacgtgagaaggaggcgtctggcttggtctgtaaggtcagggcacttgctggtgaggcgtgatttgggagggaggatgcccagctcggttctgtgcgtgtctgaggtgtcgggaaacatgccctggatgtgttcaagcagctgttctgcgtctgcgtctgcagctcaggaaattcctaaaagctgtgatgagagcaagaaatgagaccatgaagtcagtgtgtgcgtgactggatgtaggcaccgagggcagaagggccagaaagacctgtgctcagaggggcccagggcagccacaggggcccagagcatgtgtttgttcaggcattcattgtgtgctgggccctgctccagtgctttggacatacacggtcagatgtcagtgtaagaagttatatagtttgttaggagatgattgatgttatgagaaagataacaagtaggatagaaaggctagaagggttgggaaccagctgcagtgtcaagtcaggcaggtggagttggatctaagagtttaccgaggtgaggagggtctggcaggggacactgcacaggtgacaagcagcaaggagggtggggcgaagtcagcattgatggccacggggctggagcagagaagaaggtggggcacaagtgtcatctcatgggaggctggcgccacctcagaaggtgaatgggttcagcttgggttccaggccagagtctgaagttgagaggactccgttgggtgctgggctgtgagcccaccgtgggggcaagactgggagcagcagacccagcagggcccttgtaggtaatcaccggctggcactggctgggggccaggtaaagccagcagaggctgaggggtgctggagtctgggtgtgtgtgaacgcagagtgggtacgctggcacagtgcatgggaggccgtggattcccaaggaccccagggctgtggctggagcagctggaaagacggagccgccgcttcctgagatggagaagcctggtaggtgggtttgggggagctcaggaactcagccttgtttccacggatttgaggatgtgctgcggactggaggtgttgagcaggtggacatgagtctggagtccaggaaggcccagaggcaggagctggggtgctggagtgagcagacaggagagcccagggtgtggacagacatgagaatgccatgctaggcctaggatggagggacagacacaggaggagcagtcagaggggccatggtggtcagcacagtgtgggctgagaccagctgaccgtgctggccaccaggtgtggacacttgggccaccagccatctttattgttgaagtgaaatgaaaatggcctttttcctgattataagtgtatcatgtgtgtctttgaaaagattcgtacattatataaagatataaagcaaaggatcaactttttaatcccaccaactgttagcattttattctgtgtcctctcagctttcttttttttgtacaaatgcatacgtacagatggtaattttaaactaaaagttggacagcactgtacattctattctgcagcctgctgttttcacgtaacaatgtgagtccatggagatgtgctgcgttgttaatgccaacagtttcccttacacggatatgaggtcccaactgagaaacccatgtctgtaaggctggtgccatcatgaactgaatgagctggtgtcacgcacagactctatctcacgtgctttgtggacgaaatgttaatgtgtttgactgtggagtaccactccagatcccctttaggtgtgacataacgtgggatgtaaaccatatgatcttttctaaaatctcaaaaattctgaaacatattcagccacaagagctttaacatagattttgtggatttaatacaaaatttatgtaagcaatttcttactgatggacaatgataataaatagtatataatttttacattaaaagtaatgctgggccaggcaccgtggctcacacctgttatcccagcactctgggaggccaaggcaggaagattgcctgaagctaggcatttgagaccagactgggcagtatagtcagacctcgtctctacaaaaaataaaaagatagccaggcatggtctgtgtagttgcagctatttgagaggctgaggaaggaggattgcttgagcccaggaatttgaggttatagtgaactatgatcatgccactgcattccagcctgggtaacagaatgagatcccgtgctgtagtgaatatccctgtgtatcatccttatctactcatgcaagtactcctgaagggtaaatgctgtagtgaatatccctgtgtatcatccttatctacccatgcaagtactctggaagggtaaatgctgataaatactgagaacttgccttccggtgaatatccctgtgtgtcatccttatctacccatgcaagtactcctgaagggtaaatgctgtggtgaatatccctgtgtatcatccttatctacccatgcaagaactcctgaagggtaaatgctgataaatattgagaacttgccttccagaaagatgtaacaattacactgccacaaactgtgtttttatgtagccattttatcacatcctcaccaaaaccaaaatcacacaaatcaaattggttaaaaaatgcatgtgtgtgtgtggaggggggtgcggattttgcctttctgtagtaaagaatgaagttcatcttttcatgtttattgccagttgtgtttcttctctttggattgtatatttgtacctcttgaccatttttcattgggtcattataaattagcaatataaattagttttaattttaatataaattaaataatataattacattttaatgttaatataaacttctttcttttttttttttttttttttgagacagagtcttgccctgtctcccaggctggaggttcagtggcgcgatctcggctcactgcaacctccacctcccaggctcaagccgttctcctgcctcaacctcccgagtagctcggattataggtgcgtgccaccacgcccagctaagttttgtatttttagtagagacgtggtttcactatgttggccaggctggtcttgaactcctgacctcagctgatctgcccgcctcggcctcccaaagtgctgggattataggtgtgaaccaccatgcccagctgttaatataaatttcattataaattagcattataaattagttcataaattatatgtttataaatgagtttatcaattagcaatataaactattgtcatatgttgtaaatatttttgcagtttatgatgatgagaggtttttaaaaattttaaattttctacatagtagttttatgtagataccgagataatagtatttacatagtcagatctgtcattttcctttgccttatctgacttcagtttttgcgcctaaaacgttcttccctatccttacttgtaaatccttagttttcttcaagaactgttttgtttacattgaaacctttaatccatttgaattttttttcagtgggaggtaggaatggagtattttcctcccagataatgagccagttttaatgccatttattaatgtatccattttttaccttgttcctcttaaaagaagctttgagagctgtatgaagaagcctgatggcaccgagctaggcctctctagaggctgggcggggaagaccatggagagacgtaacagtaactcctgctcgggggcaccagctcgtctgggtgcccgatgctggtggtggctgtcacagcaagcagggctagccagaggagatggacgagtctgtgctgttgtccctctgtgtcatgctgggagacagcgaggtggggaggacagggagaacagaacgtgctcacaaagaggaggcaggaaggttggatccctgatgagccttggaacggaggtggggaaaagcaaggatgtgtggaaacagcaagaagtgggagagagagagagaggcggaggggagaaaaccgtcacggaggccaagcggcaggagctcagctgaagaaatgagattggtggtgggttttccctatatcgcaggctctgactgccaatctgctgctcctccaaggcctcggtggctgtggcatgaaacatcctgaggggcttgtaaagtggacactgtgcccctcacgtttggcccatttttcaggtggagccttttgccagcttgaccgaggccgtgcggagctcagttccccgactgctcatcaaccgggacttggtggggcccttggcttggcatcctcgcagcagggacgtggcccagctgggggacgtggttcacggcgtggaaagcctagtggagcttctgggctggacagaagagatgcgggaccttgtgcagcgggaaactgggaaggtacagactgctgaggaggaccatccaaggggctgcccttctcactgctctagggtatggtccacctgatatggagccccgttggttaacacagtaacagtaatagctgatgatgctgtgaatcctgcaccaggcactacctggacctgactgggtgttactttcaatacctccatttagagatgaggaaacagatgctaacaggccaagcagggacacggtccagacactcagggctgatgagtctgtattcttaacagactataggcgttaccttcactccctaaaataaagcagccaacagtgtccctctaaggcctggtatgtgattctaagatgatacgggttaaagaactttgagaagctaaagttctctgcatctatgtgggatgaaggctacatgagtgatgcttttcggaagtaattggtatgagagccattgatcaattataatccgctgaggaaagccaaagagccttgatgctttctaagagatttcaaaccgcctataaacaagtgaagttacagaaaatgcagtttcccataagaatcatgtagcatgtgtagccttgatattaagggttttcaatgggaggtggtagcattaagcatttaaagtccagtgtcatgattacaggcaggtgtaacactgtccaaaggggatttcaccagtgtattagtctgttctctggctgctcataaaggcatacctgagactgggtaatttataaaggaaagaggtttaatggactcacagttccatatggctgtgggggcctcacaatcatagtggaaggcaaagcaggagcaaagtactgtcttacaaggtggcaggcaagaggacgtgtgcgggggaactgccctttataaaactatcagatcttgtgagacttattcactatcagaagaagagtgtgggaaagacccgcccccatgattcagttacttccacttggccccacccttgacacatggggatgattacaattcaaggtgagatttgggtggggacacagccaaaccatatcaactacaatatatcacagttgatgctcctcttgccttccaaggcagatgtcttaggaaatcctgatcctttttccttgtccacagctgtggctgcctcatggctcagggccatggggtcagcactctcctcacctccaccagtccaagacctccaacctctggttgcaggctgattttttaccaatcatggtcacttcattatggaggcagggaacccagctaacaatgaggcttaaacgctgagaggcgagtgcctcctggccagctcacaaggcagcggagatcttagatcagcccagcaggcttttttgagggatccttttcctgctccaacttcatattttcttttttttgtaatggagtttcactcttgttgcccaagctggagtgcaatggcacgattttggctcactgcagccctgcctcctgggttcaagtgattctcctgcctcagcctcctgagcagctgggattacaggcatgtgccaccatgcctggctaatttctgtacttttattagagatgggatttcatcatgttagtcaggctggtctcaaactcctgacctcgggtgatccacctgcctcagcctcccaaagtgctgggattataggcatgagccagcaggcccggcccaacttcctgttttcatagaaaagcaggttgtaactctggtagctcctgtggagttttggaagtggcttaataggatttgaactgtataatctagtttcagagaaatgtatgtaaaatgggttatgatttcattttctgttttttacagcattactatccaaggggttacttttccaaatagtgaatgcttttaagcacatgagcatcagtacatattgatttgggtactttaagacccatagaatgaggctctccatttagccaccctgttctgcccaggcctgctgggatcctcttagcccagcacagcagcagcagtatttgcagaaagcagcttgttttgtgaaatattttgcatgtctgcagctagagctgtttgaacagagatctgctggcctgcctgggtgtgtaaacagatagctgataccctctgtcttctgtattccagcttgatggaccagacaaataggatgatggctgcccccacacaataaatggtaacataggagacatccacatcccaattctgacaagacctcatgcctgaagacagcttgggcaggtgaaaccagaatatgtgaactgagtggacacccgaggctgccactggaatgtcttctcaggccatgagctgcagtgactggtagggctgtgtttacagtcagggccaccccgtcacatatacaaaggagctgcctgcctgtttgctgtgttgaactcttcactctgctgaagctcctaatggaaaaagctttcttctgactgtgaccctcttgaactgaatcagaccaactggaatcccagaccgagtctgctttctgtgcctagttgaacggcaagctcggcatctgttggttacaagatccagacttgggccgagcggtccccagccctcttcatgttccgaagtgtagtcttgaggccctggtgccgcacttctagcatgttggtctcctttagtggggctatttttaatgagagaaaatctgttctttccagcatgaaatacatttagtctcctcaaagggactgcaggtgttgacatgagttggaaagggaaccctgggatacgtggcgtcccctctattggaacagtctgaggactgaaggcatttgtccctggatttattggagacggcccagctcctccctctgaaggtggtcacattctgttgactctccatactcagcctctcctccagaaacagatctgttccagaacattccagcactttctatctggcctccttgtccccacactacgcccccccaccctcgccagggcttcctctagtgacactgttagagctaatctctgagacagggaaggcattactcacttaaaacccaggctgagtcctggccacctgctggattgtgacataggaggtggaatccactgaactgctacttctgcacaggctccttctcctggggctgtacccaggcccagccctgatggctcaccctgtcaggcaccagctgctccctcctgggctctcacccacctgcacatcctccttcctagcatcacattacctgcgtgtttccccagacaaaagcacttcccattcttgaaccttgcctaccctgggctgagctgacggcaatagatttaatgacagtgactcccaggaagggggtcctgtgactttgcgccttaataagaacaaaaggtggaattggtgacctaggaaaactgttgaattctaaaaagaatgaagttagtttctaaccctagttaatgttccttttttattttttgagtcttgccctgtcactcagggtggagtgcggtgttatgatctcagctcactgcaacttccgcctcccgggtttaagcgattctcctgggtagctgggattacaggtgtgtcccaccacacctagcacatgggcatatttgtaatagagacaaggttttgctatgttggccaggctggtctcgaactcctggcttcaagtgatccacccacctcggcctcccaaagtgctgggattacaggcatgagccactgtgcctggcccctttatttgataatttacacatacatttttgtccaaaactcttctttatttcaagatgatgtttctgtggctatgtgtggtatgtggtataaatctcaatctatggtcacacgaggggcattttccttgttgtaagtgtagtctaaaccagtaggaaggaggtttaattgccaaaaccagcgagaactcgggcactgtggatactacagtgggcagctgaacgaggaccaaggagaatgtctaagaggcctccagccctgcgctcagtgaagacaggacaggaacaacagagcatacataccttggaagggtgtgttctgatatactcgtatggaaagttctgacaggttttctccctgggaagtgcagcacataccccaacacactggctctgccagtgtgccaatcccagatggtgcttgctttgtgtgcacccacacccaaacccctgccctcccatatgctcttctgtgtgcccaggtaggccctgccctcaggcagcagcttctgaacacattcctcttggcgcagacaaaagaaagtacttcgtctgtggaattcgaggctgagcctgagttctagcacaagaagaccgttgcagtccagagatgagaaactggaccagaggcaaatcatgaacagaacgggagtcaagagaaggggtttctaagatggagaagtgggggcgggtgtggatccagtgggatgtggcttccccaggttgcaaccccaaggaagtctctggaagcagcaccagtcctgatgggggagcagaagagctgccatcctcagtcagggtccgagtcagggtccgaggagagctgctgctccatagtctcgcacatggcatcctgcagggacgtaagatgaccccggggactcatccccattggctggatgactctgttcctgttggggaaaggtgcagtggggctggggaaggggcccagttggccaggcaggggtcctactcacccgtggctgctaccttcctctctaccaagtaggctgctcccatttactggggaagcctggttggaccttctgttaactgggcccaaaccctaactgctgcctcctggctttaagcagtttcctattttaaacatctaaattggccttaagcaggctcttaatttggacactgggccatctccaataaatctggcgacattagtctcttttttttttttgagacgaagtctcactctgttgccaggctggagtgcggtggcacaatgtcagctcactgcaagctctgcctcctgggttcaagtgattcccctgcctcaacctcccgagcagctgggactacaggcgcccaccaccacgcccagctaactttttttttgtattttagcagagacggggtttcaccatgttggccaggatggtctcgatctcctgaccttgtgatctacctgcctcagtctcccaaagtgctgggattataggcgtgagctaccacgcccggccttagacagtctcttaatttctctgggcctcagttatcatctgtaaaaggggcacaatactgatctcaatatacccatcccctgggggatttcctccagggcaagtgatttcaaacgtgagcaatgcaacctaataccaggatcctaagctctcctctgatcctacctcctggggctcacaagacaggatgtgggtcagctctcccttctcccagctgcaggcccctcctcctcatgccacacacctggagagcttgtcaaacatggtcaccagcttcatggcctcgtgctccttctgctcctctgtcatgccctccatagggttaggcggcttctcctccaccctcccggtcacagggtttatgctgtttcccagtgggtggaatgtggggaatgcattagtgactctccaggacaggaggcaagccacctattttcccagtggggtgaggtgggcaaggcaactgcaggaagaggcctccctccagaagcggcacaggtaaccagctcctgccatctgccaccttctggtatcccagatagcacttaggaacaggtgcttgattctggaagctcttgcccatttgtcatcctgtcccaccctacaggggtccacatgggtgtggaagcagggactatggggctgtgagtggagacccgagggtgtgttgggggtacacacctggctttggcttccttgtactcatctgtgtctgtgtcctcatcctctgagtactggccctcgggccggcctcctgccatgaggcccctggcagccagaaggccagcagcattcccatagcctgtgtacttgatgaatcggggcactgaggggcaaggcagaggtcagtgtgcaagcctggctgaggtggggtgggctgggacctgggtctccataactcaccactctcagagcacaggacaaacaagaactcggcagccaccctcttcacatctgtgtccaggtgtgtcatgaggcggacaagcttgttccgcagcatctccccaacctcaggccgtgtcctcacatcccgcagagggggcagcacctggggaggtggccatccctaagcttgggcttagagcagccaagggtctgtgatcagggccgaaaccacatcccccaggagcaccagctcctcagccttatacctgggccttcaggaacttcctggctgggcggtgcatccgggcacattcagtcagcacgctcagcacgggagctacactctccttcagcctgtgtgtctgtagaggattctctgtcactggggctatgcccctgcctaacttgtgactggcacagagttacacctccccaccaccccttcccaccaacatacacaacagctggtcctggcggcagaggtttgggaagaggcccctctgcagttagtcagcagaaggccaagagtgggtggtgggtgtctgtgtcacttttgaaaaggacagggatagagcgtaactcagaggtactcgtaagctttgtgacttgggagaaataactgctttaagtctaattacttcaactataaaccagagctgggaagaaaacacaaagcaattaaagctttagactcgcacacacattgccctcagatgttggtggcaaaaagaaacgagaaccgaatccccgctctgtgtacttcgtggacagagcagggagttcttgaccctcctagcataatgtgcctggaccccagcaccagcagtggcagcgacgggcacagacaaccccctagctgtgtgtccagtgccagctccctatcctgactggctcgcaggcaccttgtgtgtcccttgcttaggcaggtagattcccaggaggtctactaaatctcggtttattgtactccagcctgctttctgcaagctcctggaagatggttagagccccagctgtccagatgccctgtagtgcagtcacagcaatcagaaggaagctttgatctgaggttcctatgggtctcctcaggatgctgagggacaactatgcttgtaatcaagggctgcctgtgtttaagacttaaaagtagggactggggggcttctctggaccactcagtaaagatccccaaagatttaagaagtgaaaccttcaagtgtgtggaaggtgtccacatgcttctcatggaggaagggtctggcttcttgccaggctggaccacagaacaaccggaagagtcgcccatatcacaccaccaagacaatctccacgtaccagtgtggacagtgtggaagcactgaccacatctgtgcaggagaaccagtgccagagccactgggggagcctgcacagccatccccagcctaccttgtgcaaacgcttctctaggaagatgaggagggcacgaatcacatccatattcactcccatgaactccgtggagtctccatgtggctccagggtgaggagaacatccagacacttgaggggcaagttccccaggaggttcactgcgtggctggggacagatggaggtaggggtttcaacagggctaatccctgagcacaggtgcaatctttgtgactccgctgaaccacacattacatgagctggcatctgagtcccaaaggggcagcgctagggaccaaagccaagggcagggactgatctgagaggcactgccactcagctgtacagtggggtcccctggggaagtgggggcactgagacacactgcctccccgaccctgtctgagccaaagcgccagaccatctctggaaacccagaccagcctaggggcaggtagaccaaaaacggggacaaggaaccaatgtgccctagtaagtaccatactgttgccactacccaaggcccagttggcacattcctgcccccaaattcatggctatgtccagtctcactcacccagacaacgtcagactctctagggtggggcctgggctctcaggtggttctggttcagagccggggttgaggacgaccatctagacatgtgggcacacttccctcccagaaaaagccccattctcacccgtggaactcctctgtgcggtctccagcagtagcgatcatcacacagtgccggagaagggtccccaggtgtcggtaaagggcagcgtcttcctgaccaaagaaagaagggttcctgtgaggagccccactcatcccactgctgcctgctgaggctccactgtctgttgcactccaggactgtgtggcaatgactgtgcacctcctgtactgcatacctggtcccctggggtcttcctaggtgactctgggtagtgctgggggcaaaagatgaccactgctgtcttcctaaaaactccatgagtattcttctaagagcacttccctgattaggaatgctaacacataccttagggatgaagtcacactctgtctcagccccactcacagcctcatggtggaggatctcttacagtctccccagacaccacacagccctcctgccaggcagcaagagccagaaggggcctctacttccctcagaagcctttcctgaggtcccagcccagaactggcatctccttggccttgtcccaacaggctgggaggtcctgtcctctccatgtctgacacccagaaacctgaaggtacccagtaggaagcaggtccaggaaatgttggagctgagttgagacccatccatgggttaaggtcagtgctcacctcgtccacctcccccttgatggagtccagggtgatgttgaagagcactttgaggatctccatggcccgctcagtctcttgggaaggaaggagcgtgggtggggggttcccttcaggagtcacccccagcgtcagctccagtgtgtcagttagcaggcgcactcctttcagctcctgaaacagctgctggcgcacatcggtgcggagtgccgttagcaggaagaggagccgcaagtcaaagaactggacatcgtgggggaagctcctctcacggtacagccccacacgctctgtgagcttcaccactaggcgggcctctgctgccagcatctgtgccacagggctgctgagcacgaggttgcacaggcacttgagggactccagtacaacatccatgtctgcggactctgggacggacccctcagagacagagatgtcagcatagcaggctagtgcctgcaggctctggcggctggtgaacgggtccaggcagttgcggtcccgggacaggattcggacactctgcagccagatgacacggtgggagggtggcaagccctgttccaggacggagaccagcagctccgccagtctctgtgggcagggagaagagcggctccaccaggcccttcttcctggggccacccgtccctgcccctttaccccttgggccagcacccaccttccggtcctcctgttgggcatcatcaaacgtgaagctctgggagtgctgcagagagaactagtgaattcaaatccacagaggggtaggatccgcgtccgctgatgcgggcggcctattggcctctaactcaggcagcagccactgctcagaacggatggcagggtcggcactcgcccccatccctacacgcctgccacccaacgggtgcacccccactctccccgcaacactgcatcccagacctgccccccgcaccccgccgcgtcccctacgcttgctgacacagcctctgcctcacccacgccctccctgccacccgcgcacgaccctgccccaccccctccgtgcccgccccccggcctcaggcggccgcttacctcctggttgtatgaccgcagagcttccataatcacatcctcctcacccgtctccacggcttctgcaaccgcccggggctccatggcgcgccggggaaggcgggacgggcccttcctcagccgttccgggccgcagttcgccggccccgccctggcccagaaagccccgcgccagcgcgcgggggaggccgggacggggcgcggcgtctggtggcgctttaacggggcgcagcgtctggtggcgctttaagggggcgcggcctgaggcagaactggcggctcggaggttttaagacccgagtcgaggggctgagtcgctctgaaccgaactgacccctctccttgtgacccgcgcttcttgggccagaagttccaacaggaaacgatctcagcccccaccgtgccctgccacacacacagtgacgcccctcgagctccacagaaccgatgggatgtagaggggaaagccgaagtggaaaggaattttcagtcctgggccattgggttcgttaggcgtttgctggggaatgcaggcgaacgggattcccaggtccctgcctttgtggagcttatgttccagaggggaagggggacaaggaaaaacaaaaggacacgaggcggtcacagggctgtgcttcaaaagaagcaaaaggcgactgctgggctgcaacgggctgtgaggaagtgctgtttttgctgacaccggacggtgggaagtgagccgggaaaagactggaggagccactccaggcagaaggagcagcacttgcaaaggtggaggggccgagagaaaggggagcaacccagtctggcctggactcagttccctcttgaaaagcaaagatcctgcgtgtccgtttcagtggccgtcatgaggattcagtgacgcacaggaagcgcgatccactcgctcttctaacaagtgcccgggagcaaaggcgtctacggcccccagtccccgcgccgcctcccagtctctctcccggcttcactttcctgtagtgcgttctgtacggctgtattcgacgcggcgcgcactcgcaggcacgagcgaggcgccgatctccacttgacagaggaggcacccctgcccccaccacacccagtgctcctcgcgggcttctgcccgaggggtctgctccttcctcatgacccgcctgtgaatccttcctaaccgttaggacctaacccacagaagcgtctttccaccaccatcgtctaggcactgagcaagcaaacggccccgccccgccccacgttcacaggaacaccaaacgtcacatccgcggtgctgctgtaatcccagcaccttgggagcccggcaggcgggggctgcagtgagctgagatcgcgccactgtctgcgcgacagtgctgaaaataagccacagatatgcccatcgcttccgcgcccggcagttccccaccctcggccctaagccggaagtcagcgagcccgaagcggaaggggctgggctatctaggggcgtggtcggtgcggaggcggggccatcgctagctgggggcggggccggaagctctttccccgcgactgcgccacgtctgaggcggctgtggccacgtctgaggcggctgtggccgcgtcggtgtccgcgtcgaggagccggggcagggcacgatggcggactgggctcggggtgagcgcgggagagcggagccgttgggggcagggccgggccgaaaccgacgccgctgcctgtagagccgcgtgcgcctgcctctggcccagctggggtgacctcggccgagaggaccctgtcaggggggcggattcggatccttccgggtccgagcagggccgggtttcggccggcactgccgttaggaccgaaggcgcgcgtggcggcccagcagctccagcgaggggtcgcgcagcagcggggtctccccactccccgccgccccctgtgagatcgttctgcatgggttcggggtgagcgggagtcggcattcgacaggtcccgaggccaggccctaggagtagaggctgtgctccgctggtgtccaagcaggactcttactttggcctcggtggccccatttcccctcctggagcccgtgttcttgtctgcaaagtgggatattgatgcctgtctctgtgaggtgttatgatgattaaaggaatttataaatatgaagtggctggaaggacgctggcatcccttcctgacactgaagctagggaggaggtggttctcacgcacctgatgtgacagaacttccttatcccctggcccagcctgtcacaggccaggcctctgcgagcactctgccctgggtgttgcaggaagccccatgcgggatgcagaccaaggatcccgctcctggtcgacctcagctcccgtctcggggaaattgggaactttgctcagccattttctgtgcggtaaagggccttcccaatgttctgtcctggttccttgccacctcttcaggacctagctcaaaggtcgtctctgcaggagcctttctgctgccttgctgggtacttttcccaagtcttttctatgctcttagcagagtttactctttttctataagaatgggctccacatacacagatggtgacctccctggatgcaagtgtcacatcatactagcaccccagggctgggtccagtttttgctacacagtctcagaaggtgctggttggaccgaacccattgtgggtgcttgcccatccccaccttgatgtgtacacaggacatgtgttcacatgacaggcccttacacacatcgtcctttatgcagcctgtctcatgtgcaagattcacctgctggaaccttggttagggccccctagatttctgactcacccagatgtggttggagtgagaggggtcaggggccgtgctcaccgatggatgcaacccttcagcccctctcttttctcagctcagagcccgggcgctgtggaagagattctagaccgggagaacaagcgaatggctgacagcctggcctccaaagtcaccaggctcaaatcggtcagtggtggtctgtcctcttacctccacctggtgcctttggggaatggggatcagagggaaggcagagggcccagaggagtttcaggcagttttccatcctcatccaattcgtggctgtgctcacctgcatgaggccccagctgacacctggacctttctgtctgctgcagccccactgtgtctggtgttggcagggtttatctggtctggggagggtgagtgctgtattatgtgtctgctctggcccaaccctgccctctctgtctgctgaacagctcgccctggacatcgatagggatgcagaggatcagaaccggtacctggatggcatggtaagggcccacggtgtgcgtgtatcagtgccctgccctagcactacctgctgcagagcctgcagtgtctccttcagcactggtgcgggtgggtggtcaaatcaccacttctgtgtgatcttgctgggattcctcccttaggactcggatttcacaagcatgaccagcctgcttacagggagcgtgaagcgcttttccacaatggcaaggtccggacaagacaaccggaagcttctatgtggcatggccgtgggtctaattgtggccttcttcatcctctcctacttcttgtcca

SEQ ID NO: 984 - DNA, 2122 bp, Homo sapiens
gggcgcgccggaggcgtcggcaaggaggcgggggcgggacgcggaggcgggaccggggcgccgggggcgggggcggtaggcggaggcggggctggggcgccgggggcgggggtgggaggcggaggcggggccggggcgccgcgggcggggcgccgggggcggggcgagtccggaggactcctcggactgcgcggaacatggcgttctggggttggcgcgccgcggcagccctccggctgtggggccgggtagttgaacgggtcgaggccgggggaggcgtggggccgtttcaggcctgcggctgtcggctggtgcttggcggcagggacgatgctgacgtgatggcagacagggttccccgctgcccggtctgcaccggcgttgtgaagcccgacattgtgttctttggggagccgctgccccagaggttcttgctgcatgtggttgatttccccatggcagatctgctgctcatccttgggaactccctggaggtggagccttttgccagcttgaccgaggccgtgcggagctcagttccccgactgctcatcaaccgggacttggtggggcccttggcttggcatcctcgcagcagggacgtggcccagctgggggacgtggttcacggcgtggaaagcctagtggagcttctgggctggacagaagagatgcgggaccttgtgcagcgggaaactgggaagcttgatggaccagacaaataggatgatggctgcccccacacaataaatggtaacataggagacatccacatcccaattctgacaagacctcatgcctgaagacagcttgggcaggtgaaaccagaatatgtgaactgagtggacacccgaggctgccactggaatgtcttctcaggccatgagctgcagtgactggtagggctgtgtttacagtcagggccaccccgtcacatatacaaaggagctgcctgcctgtttgctgtgttgaactcttcactctgctgaagctcctaatggaaaaagctttcttctgactgtgaccctcttgaactgaatcagaccaactggaatcccagaccgagtctgctttctgtgcctagttgaacggcaagctcggcatctgttggttacaagatccagacttgggccgagcggtccccagccctcttcatgttccgaagtgtagtcttgaggccctggtgccgcacttctagcatgttggtctcctttagtggggctatttttaatgagagaaaatctgttctttccagcatgaaatacatttagtctcctcaaagggactgcaggtgttgacatgagttggaaagggaaccctgggatacgtggcgtcccctctattggaacagtctgaggactgaaggcatttgtccctggatttattggagacggcccagctcctccctctgaaggtggtcacattctgttgactctccatactcagcctctcctccagaaacagatctgttccagaacattccagcactttctatctggcctccttgtccccacactacgcccccccaccctcgccagggcttcctctagtgacactgttagagctaatctctgagacagggaaggcattactcacttaaaacccaggctgagtcctggccacctgctggattgtgacataggaggtggaatccactgaactgctacttctgcacaggctccttctcctggggctgtacccaggcccagccctgatggctcaccctgtcaggcaccagctgctccctcctgggctctcacccacctgcacatcctccttcctagcatcacattacctgcgtgtttccccagacaaaagcacttcccattcttgaaccttgcctaccctgggctgagctgacggcaatagatttaatgacagtgactcccaggaagggggtcctgtgactttgcgccttaataagaacaaaaggtggaattggtgacctaggaaaactgttgaattctaaaaagaatgaagttagtttctaaccctagttaatgttccttttttattttttgagtcttgccctgtcactcagggtggagtgcggtgttatgatctcagctcactgcaacttccgcctcccgggtttaagcgattctcctgggtagctgggatt

SEQ ID NO: 985 - protein, 83 aa, Homo sapiens [sequence omitted]

SEQ ID NO: 986 - DNA, 2794 bp, Homo sapiens
gggcgcgccggaggcgtcggcaaggaggcgggggcgggacgcggaggcgggaccggggcgccgggggcgggggcggtaggcggaggcggggctggggcgccgggggcgggggtgggaggcggaggcggggccggggcgccgcgggcggggcgccgggggcggggcgagtccggaggactcctcggactgcgcggaacatggcgttctggggttggcgcgccgcggcagccctccggctgtggggccgggtagttgaacgggtcgaggccgggggaggcgtggggccgtttcaggcctgcggctgtcggctggtgcttggcggcagggacgatgtgagtgcggggctgagaggcagccatggggcccgcggtgagcccttggacccggcgcgccccttgcagaggcctcccagacccgaggtgcccagggcattccggaggcagccgagggcagcagctcccagtttcttcttttcgagtattaaaggtggaagaaggtccatatctttttctgtgggtgcttcaagtgttgttggaagtggaggcagcagtgacaaggggaagctttccctgcaggatgtagctgagctgattcgggccagagcctgccagagggtggtggtcatggtgggggccggcatcagcacacccagtggcattccagacttcagatcgccggggagtggcctgtacagcaacctccagcagtacgatctcccgtaccccgaggccatttttgaactcccattcttctttcacaaccccaagccctttttcactttggccaaggagctgtaccctggaaactacaagcccaacgtcactcactactttctccggctgcttcatgacaaggggctgcttctgcggctctacacgcagaacatcgatgggcttgagagagtgtcgggcatccctgcctcaaagctggttgaagctcatggaacctttgcctctgccacctgcacagtctgccaaagacccttcccaggggaggacattcgggctgacgtgatggcagacagggttccccgctgcccggtctgcaccggcgttgtgaagcccgacattgtgttctttggggagccgctgccccagaggttcttgctgcatgtggttgatttccccatggcagatctgctgctcatccttgggaactccctggaggtggagccttttgccagcttgaccgaggccgtgcggagctcagttccccgactgctcatcaaccgggacttggtggggcccttggcttggcatcctcgcagcagggacgtggcccagctgggggacgtggttcacggcgtggaaagcctagtggagcttctgggctggacagaagagatgcgggaccttgtgcagcgggaaactgggaagcttgatggaccagacaaataggatgatggctgcccccacacaataaatggtaacataggagacatccacatcccaattctgacaagacctcatgcctgaagacagcttgggcaggtgaaaccagaatatgtgaactgagtggacacccgaggctgccactggaatgtcttctcaggccatgagctgcagtgactggtagggctgtgtttacagtcagggccaccccgtcacatatacaaaggagctgcctgcctgtttgctgtgttgaactcttcactctgctgaagctcctaatggaaaaagctttcttctgactgtgaccctcttgaactgaatcagaccaactggaatcccagaccgagtctgctttctgtgcctagttgaacggcaagctcggcatctgttggttacaagatccagacttgggccgagcggtccccagccctcttcatgttccgaagtgtagtcttgaggccctggtgccgcacttctagcatgttggtctcctttagtggggctatttttaatgagagaaaatctgttctttccagcatgaaatacatttagtctcctcaaagggactgcaggtgttgacatgagttggaaagggaaccctgggatacgtggcgtcccctctattggaacagtctgaggactgaaggcatttgtccctggatttattggagacggcccagctcctccctctgaaggtggtcacattctgttgactctccatactcagcctctcctccagaaacagatctgttccagaacattccagcactttctatctggcctccttgtccccacactacgcccccccaccctcgccagggcttcctctagtgacactgttagagctaatctctgagacagggaaggcattactcacttaaaacccaggctgagtcctggccacctgctggattgtgacataggaggtggaatccactgaactgctacttctgcacaggctccttctcctggggctgtacccaggcccagccctgatggctcaccctgtcaggcaccagctgctccctcctgggctctcacccacctgcacatcctccttcctagcatcacattacctgcgtgtttccccagacaaaagcacttcccattcttgaaccttgcctaccctgggctgagctgacggcaatagatttaatgacagtgactcccaggaagggggtcctgtgactttgcgccttaataagaacaaaaggtggaattggtgacctaggaaaactgttgaattctaaaaagaatgaagttagtttctaaccctagttaatgttccttttttattttttgagtcttgccctgtcactcagggtggagtgcggtgttatgatctcagctcactgcaacttccgcctcccgggtttaagcgattctcctgggtagctgggatt

SEQ ID NO: 987 - protein, 395 aa, Homo sapiens
MAFWGWRAAAALRLWGRVVERVEAGGGVGPFQACGCRLVLGGRDDVSAGLRGSHGREPLDPARPLQRPPRPEVPRAFRRQPRAAAPSFFFSSIKGGRRSISFSVGASSVVGSGGSSDKGKLSLQDVAELIRARACQRVVVMVGAGISTPSGIPDFRSPGSGSNLQQYDLPYPEAIFELPFFFHNPKPFFTLAKELYPGNYKPNVTHYFLRLLHDKGLLLRLYTQNIDGLERVSGIPASKLVEAHGTFASATCTVCQRPFPGEDIRADVMADRVPRCPVCTGVVKPDIVFFGEPLPQRFLLHVVDFPMADLLLILGNSLEVEPFASLTEAVRSSVPRLLINRDLVGPLAWHPRSRDVAQLGDVVHGVESLVELLGWTEEMRDLVQRETGKLDGPDK

SEQ ID NO: 988 - DNA, 2726 bp, Homo sapiens
gggtgggaggcggaggcggggccggggccgccgggggcggggcgagtccggaggactcctcggactgcgcggaacatggcgttctggggttggcgcgccgcggcagccctccggctgtggggccgggtagttgaacgggtcgaggccgggggaggcgtggggccgtttcaggcctgcggctgtcggctggtgcttggcggcagggacgatgtgagtgcggggctgagaggcagccatggggcccgcggtgagcccttggacccggcgcgccccttgcagaggcctcccagacccgaggtgcccagggcattccggaggcagccgagggcagcagctcccagtttcttcttttcgagtattaaaggtggaagaaggtccatatctttttctgtgggtgcttcaagtgttgttggaagtggaggcagcagtgacaaggggaagctttccctgcaggatgtagctgagctgattcgggccagagcctgccagagggtggtggtcatggtgggggccggcatcagcacacccagtggcattccagacttcagatcgccggggagtggcctgtacagcaacctccagcagtacgatctcccgtaccccgaggccatttttgaactcccattcttctttcacaaccccaagccctttttcactttggccaaggagctgtaccctggaaactacaagcccaacgtcactcactactttctccggctgcttcatgacaaggggctgcttctgcggctctacacgcagaacatcgatgggcttgagagagtgtcgggcatccctgcctcaaagctggttgaagctcatggaacctttgcctctgccacctgcacagtctgccaaagacccttcccaggggaggacattcgggctgacgtgatggcagacagggttccccgctgcccggtctgcaccggcgttgtgaagcccgacattgtgttctttggggagccgctgccccagaggttcttgctgcatgtggttgatttccccatggcagatctgctgctcatccttgggaactccctggaggtggagccttttgccagcttgaccgaggccgtgcggagctcagttccccgactgctcatcaaccgggacttggtggggcccttggcttggcatcctcgcagcagggacgtggcccagctgggggacgtggttcacggcgtggaaagcctagtggagcttctgggctggacagaagagatgcgggaccttgtgcagcgggaaactgggaaggtacagactgctgaggaggaccatccaaggggctgcccttctcactgctctaggcttgatggaccagacaaataggatgatggctgcccccacacaataaatggtaacataggagacatccacatcccaattctgacaagacctcatgcctgaagacagcttgggcaggtgaaaccagaatatgtgaactgagtggacacccgaggctgccactggaatgtcttctcaggccatgagctgcagtgactggtagggctgtgtttacagtcagggccaccccgtcacatatacaaaggagctgcctgcctgtttgctgtgttgaactcttcactctgctgaagctcctaatggaaaaagctttcttctgactgtgaccctcttgaactgaatcagaccaactggaatcccagaccgagtctgctttctgtgcctagttgaacggcaagctcggcatctgttggttacaagatccagacttgggccgagcggtccccagccctcttcatgttccgaagtgtagtcttgaggccctggtgccgcacttctagcatgttggtctcctttagtggggctatttttaatgagagaaaatctgttctttccagcatgaaatacatttagtctcctcaaagggactgcaggtgttgacatgagttggaaagggaaccctgggatacgtggcgtcccctctattggaacagtctgaggactgaaggcatttgtccctggatttattggagacggcccagctcctccctctgaaggtggtcacattctgttgactctccatactcagcctctcctccagaaacagatctgttccagaacattccagcactttctatctggcctccttgtccccacactacgcccccccaccctcgccagggcttcctctagtgacactgttagagctaatctctgagacagggaaggcattactcacttaaaacccaggctgagtcctggccacctgctggattgtgacataggaggtggaatccactgaactgctacttctgcacaggctccttctcctggggctgtacccaggcccagccctgatggctcaccctgtcaggcaccagctgctccctcctgggctctcacccacctgcacatcctccttcctagcatcacattacctgcgtgtttccccagacaaaagcacttcccattcttgaaccttgcctaccctgggctgagctgacggcaatagatttaatgacagtgactcccaggaagggggtcctgtgactttgcgccttaataagaacaaaaggtggaattggtgacctaggaaaactgttgaattctaaaaagaatgaagttagtttctaaccctagttaatgttccttttttattttttgagtcttgccctgtcactcagggtggagtgcggtgttatgatctcagctcactgcaacttccgcctcccgggtttaagcgattctcctgggtagctgggatt

SEQ ID NO: 989 - protein, 413 aa, Homo sapiens
MAFWGWRAAAALRLWGRVVERVEAGGGVGPFQACGCRLVLGGRDDVSAGLRGSHGREPLDPARPLQRPPRPEVPRAFRRQPRAAAPSFFFSSIKGGRRSISFSVGASSVVGSGGSSDKGKLSLQDVAELIRARACQRVVVMVGAGISTPSGIPDFRSPGSGSNLQQYDLPYPEAIFELPFFFHNPKPFFTLAKELYPGNYKPNVTHYFLRLLHDKGLLLRLYTQNIDGLERVSGIPASKLVEAHGTFASATCTVCQRPFPGEDIRADVMADRVPRCPVCTGVVKPDIVFFGEPLPQRFLLHVVDFPMADLLLILGNSLEVEPFASLTEAVRSSVPRLLINRDLVGPLAWHPRSRDVAQLGDVVHGVESLVELLGWTEEMRDLVQRETGKVQTAEEDHPRGCPSHCSRLDGPDK

SEQ ID NO: 990 - DNA, 2648 bp, Homo sapiens
gggcgcgccggaggcgtcggcaaggaggcgggggcgggacgcggaggcgggaccggggcgccgggggcgggggcggtaggcggaggcggggctggggcgccgggggcgggggtgggaggcggaggcggggccggggcgccgcgggcggggcgccgggggcggggcgagtccggaggactcctcggactgcgcggaacatggcgttctggggttggcgcgccgcggcagccctccggctgtggggccgggtagttgaacgggtcgaggccgggggaggcgtggggccgtttcaggcctgcggctgtcggctggtgcttggcggcagggacgattattaaaggtggaagaaggtccatatctttttctgtgggtgcttcaagtgttgttggaagtggaggcagcagtgacaaggggaagctttccctgcaggatgtagctgagctgattcgggccagagcctgccagagggtggtggtcatggtgggggccggcatcagcacacccagtggcattccagacttcagatcgccggggagtggcctgtacagcaacctccagcagtacgatctcccgtaccccgaggccatttttgaactcccattcttctttcacaaccccaagccctttttcactttggccaaggagctgtaccctggaaactacaagcccaacgtcactcactactttctccggctgcttcatgacaaggggctgcttctgcggctctacacgcagaacatcgatgggcttgagagagtgtcgggcatccctgcctcaaagctggttgaagctcatggaacctttgcctctgccacctgcacagtctgccaaagacccttcccaggggaggacattcgggctgacgtgatggcagacagggttccccgctgcccggtctgcaccggcgttgtgaagcccgacattgtgttctttggggagccgctgccccagaggttcttgctgcatgtggttgatttccccatggcagatctgctgctcatccttgggaactccctggaggtggagccttttgccagcttgaccgaggccgtgcggagctcagttccccgactgctcatcaaccgggacttggtggggcccttggcttggcatcctcgcagcagggacgtggcccagctgggggacgtggttcacggcgtggaaagcctagtggagcttctgggctggacagaagagatgcgggaccttgtgcagcgggaaactgggaagcttgatggaccagacaaataggatgatggctgcccccacacaataaatggtaacataggagacatccacatcccaattctgacaagacctcatgcctgaagacagcttgggcaggtgaaaccagaatatgtgaactgagtggacacccgaggctgccactggaatgtcttctcaggccatgagctgcagtgactggtagggctgtgtttacagtcagggccaccccgtcacatatacaaaggagctgcctgcctgtttgctgtgttgaactcttcactctgctgaagctcctaatggaaaaagctttcttctgactgtgaccctcttgaactgaatcagaccaactggaatcccagaccgagtctgctttctgtgcctagttgaacggcaagctcggcatctgttggttacaagatccagacttgggccgagcggtccccagccctcttcatgttccgaagtgtagtcttgaggccctggtgccgcacttctagcatgttggtctcctttagtggggctatttttaatgagagaaaatctgttctttccagcatgaaatacatttagtctcctcaaagggactgcaggtgttgacatgagttggaaagggaaccctgggatacgtggcgtcccctctattggaacagtctgaggactgaaggcatttgtccctggatttattggagacggcccagctcctccctctgaaggtggtcacattctgttgactctccatactcagcctctcctccagaaacagatctgttccagaacattccagcactttctatctggcctccttgtccccacactacgcccccccaccctcgccagggcttcctctagtgacactgttagagctaatctctgagacagggaaggcattactcacttaaaacccaggctgagtcctggccacctgctggattgtgacataggaggtggaatccactgaactgctacttctgcacaggctccttctcctggggctgtacccaggcccagccctgatggctcaccctgtcaggcaccagctgctccctcctgggctctcacccacctgcacatcctccttcctagcatcacattacctgcgtgtttccccagacaaaagcacttcccattcttgaaccttgcctaccctgggctgagctgacggcaatagatttaatgacagtgactcccaggaagggggtcctgtgactttgcgccttaataagaacaaaaggtggaattggtgacctaggaaaactgttgaattctaaaaagaatgaagttagtttctaaccctagttaatgttccttttttattttttgagtcttgccctgtcactcagggtggagtgcggtgttatgatctcagctcactgcaacttccgcctcccgggtttaagcgattctcctgggtagctgggatt

SEQ ID NO: 991 - protein, 255 aa, Homo sapiens
MVGAGISTPSGIPDFRSPGSGSNLQQYDLPYPEAIFELPFFFHNPKPFFTLAKELYPGNYKPNVTHYFLRLLHDKGLLLRLYTQNIDGLERVSGIPASKLVEAHGTFASATCTVCQRPFPGEDIRADVMADRVPRCPVCTGVVKPDIVFFGEPLPQRFLLHVVDFPMADLLLILGNSLEVEPFASLTEAVRSSVPRLLINRDLVGPLAWHPRSRDVAQLGDVVHGVESLVELLGWTEEMRDLVQRETGKLDGPDK

SEQ ID NO: 992 - DNA, 44124 bp, Mus musculus
  misc_feature (1)...(44124): n = A,T,C or G
tgccctaggacctccagcccttcaggaatgtgtcaatcatgtgactagataatactccatccctttgaccaagatgcctctgagtggaagtggctgcctccaagaacccacttcctatcttctctctgggctggtttccaaccttgttccatgcaaggggagactcaatcgtctctcaggttgccagcctatcacatctctctttctgaagctggccttgtgtttttcacacatgggtggggctgccctacagaatgttcagtttttctgctttgctccttaaaaaaaactcccccctcaaaaaaaaggggggctggcgagatggctcagcaggtaagagcactgactgctcttccaaaggtcctgagttcaaatcccagcaaccacatggtggcttacaactacccgtaatgagatctgacgcccttttctggtgcatatgaagccagctacagtgtacttacatatagtaataaataaatctttaaaaaacaaacaaacaggggctggtgagatggctcagtgggttagagcacccgactgctcttccgaaggtgcagagttcaaatcccagcaaccacatggtggctcacaaccatccgtaacaagatctgaccccctcttctggagtgtctgaagacagctacaatgtacttacatataataaataaataaacaaacaaacaaataaataaaaaaatctttaaaaaaaaaaaaaaaaaaacaaacaaacaaactcccaagtagcaggtgtgctgggaacgagttttctataatccattcagctttatgatttaccctaccagttgaaatatgattgttcctttgcaaaggctttctctcctttcttgacgagtatttttagaaaagtatttccgccagtgttctaccatttcccaccctgaatgtgattcctagggcctaaggaaaccttgagctctgaagtcaggccagaccacgcccacgtgagcgttggcgcccttcttcccagggtaaggccggaatttgccacttcctttaagtcctgtctggctccagagccttgggtctctgacaggaggcttcttcatagctgagaaaaggccactctgtattctgctccctaggaacagaggtgaggacttttgcagccttcggacgagatgaaggtgacacacaggtgcgaacctacaagcggagggaacgcctgcagattcctgaagttctggtagaagcttcgcgttcctgtgaagtgttaggagtagagatccttaaacttagcgctgttcagcatctctgttcctaaacaagatgcaaaaataaaactcaagagttgtgaaactgggggctggtgagatggctcagtgggtaagagcacccgactgctcttccgaaggtccagagttcaaatcccagcaaccacatggtggctcacaaccatctgaaatgagatctgactccctcttctggagtgtctgaaaacagctacagtgtacttacatataataaataaataaatattaaaaaaaagagagagttgtgaaactaaaagcatttgtaaagtgttgagaatttgggagaattttccaaagcacatcgctggagtttgcagcgaacagcgtggtcctttaaggcggactcttccttttagaccacacccttgccgagaccgcctctatccaatgccggccggcttgtaggacctgaaccctaggtaactcagctccgcccctgagctgtgttctttgggctggacctttaggtcttgactcctccctggaaccgcccatgccccaggcaccagagcctggccacgccattgacccgccccaaccataagccccgccctatccgccttacccacagatcgtcacttcagtccacccgaaaccccgcctttgaacatagtccgaccccagactgcccttccagaggtcaggggccctagaccaatcccagacgatgcccccaagccagcgagccacccctcgcagaagcagtctcgagttgaagttactgcattcagctttgtctgggcgaaaggaggcgtggtctctgatggggagaaacacccacactagggaagctaactctcgcctccaagggagctcaccagagaggtgcaaggacggggcgcaaaaggatggatggcttggaggcagccgttcgtggcgttattggtaagggataagccggtagctagccgaccagcgcaggattctacttcgcttggcccggcatcacctcgccttacgtatgtacaggccatcgtctcagtcgcagacaatgcagtcggggtactgccaactccatcaagctttcagctgcttcaagatcccttacaggatggaaattaaggcccaaccctgccctcatatctagccccgtcttgtccagtctcacacacacacacacacacacacacacacacacacacacacacacacacagataagtcagggccaacacaacgagtagagccacaccggactagagcaatgggtggcaggaggtacagagaggcaagcactcagcttaccagaagactcacacatatttgttcgtagagcaaggttcagtattaaggtgttgagtattttaacaaactgtaacaaaggcaggtggatttctgagatcgaggccagcctggtctacagagtgagttccaagacagccagggctacacagagaaaccctgtctcgaaacaaaagaaaacaaaaaaacaacaaactgtaaaagttgcaaacattgaggcaggctagaaagacaggagaatgtaagtagaaaggagcccctccccagctgaaagtcaagaattccagcgcaactgacatttgccgtgaagactggctacctgtctatgtagaggcactatattacttttttacagaaatattttcaaatagctatgttaaaataccaataaaccatactcaaaccctgagcgtatatgaccttagaatacggggttacttctttcccagatgcaagcctgaaaattattgaaagtttcacaaacaaaagtttccagtcaaagctccatccaacccttgtgacccagggttttattttatccatttagtcctatccagtgcacactgagagccactctaggaccacatttatattccttagcaaccccttgagatgtaacgtcagatgacatcaacatctttgtttgggtttggtttgggacacagggtttctccgtgtagccctggctgtcttggatcttgctctgtacatcaggctggtttcaaactccacctacctctgcctcctgagtgccagtgcggggaataaaggtgtgtgccaccatttccaggcatccaacatcttacatggctactgtaagggagacttaagggagaatctcttgagaaacccacattcccgcttgggtgtgtacaactgtcttccccatatgcctattacccacccccctaccatgtgtagacctgtgttaaattctcttcttaattaattccggctttacttcattctgactcaccctgaaatctcctggggtgtagtcaagaagtccagtttcaaaagctcagcatagatacagccccactgctgacaaaaccctaatcaaataagactgagtaggacacatgcccataatctcaacactagctacctgaggcagaaaggatggctgcatttctagtcagcctgggctacatggtgaattgtaggccgagaccttgtcacaacaaaaaatctacccatggctgaggtgtggtggcactcacctttaatcccagcactcgtgagacagaggcaggccgatctcagtgagttcaaggccagcctgatctacagagcagagagcagttccaggattgtccctgggctacacagaataaccctgtgtcaagaaaccaaaaaaaaaaaaggaaaaccaaaatgccaaacctatccaaggccagagaaatggcttagaaggtaaaagtgctagccgcacaaacctgaaggaagacctaactccgatacccttggaagaagctgcattctatagcaggcatctgtaaccctagtactcctatgggggacatggtaggcagaagcaaaaattcttcttcaggaaagccagctccttttcaagagccagctagcctatagtactggtctcacactccacctgccttggaggctgggactaaaggcacgcaccaccatttctaggcatccaacatctaatatgactactgtaaaggtgcttaagggagactctttttattttctttttttattttttttcgagacagggtttctctgtgtagccctggttgtcctggaacttactctgtagaccaggctggcctccaactatgcccctgcctcccaagtgctgggattaaaggtttgtgtcaccactgccaggcagggagactcttctatacatctctctactggtatcaaatgtaccagtgaatctgatagcagcacaagagcattgataagacatttttgcctcagtatagtatgctaagaataaattcaaggtcaaatacaaagagaccatcactccacaagaagtgtgactaaggggtaaactttacccacgattgtgtaggagacaggatatgcatttgggtttttattctaatgcaagtgatgacctttttttttattttcttcagtgcctggagtctgacctctcactctttcaacattggctactttgaaaagcatttgctgcaaaagaaatgaaggaaagcagaaaagagtcactgctccaggccatggacttcctggaatgcatgaggcctgctagggaaggaaggtgttcaattatttctctgctgccagcaaaaaaaaaaaaaaaaaaaaaaaagccaactcaaaccagattagattatagtaaatgcaggtttactgggaaactgtgggagagtttactgcccccaaggaagaagaagaagaagaagaagaagaagaagaagaagaagaagaagaagaagaagaagaagaagaagaagaagaagaagaagaagaagaagtcactatgggaaggaagagggaggaaaggggaaagagagagagaggggaaaagaaagagaagggggaagagaaaaggggggaagaagaagggagggggagagattgagtgagagagtgagagtacaggttctaaatgatgtctggattataaagggaagagcctggggggaggcgggaggaaaggactgcattttctaaatacactttacactgatgtcggccacagctaatgaagttgcagcagttgcagcaaagcagggcaatctgtggtataggccttaaggcgctgatagtattatcaggtttggatttggtgaaggagagtggtcaaaaaagaatacactccccaggttttaacccagagtccaaacggaagttacaggtagaggtgggaaatgaatagctgctaagtatgataaagacagagaaactttgtctcaggatctgaaacgttgtaactctcctcaatcctcaggtctgatcagcatttcagcctgaaggactctcagtacacgggatactcttttgttttttattttttatttttgacagttgtggagttttacagaagcctatgttgggtctgtttgctgtccttacaataaagtattttatcttagaaactaatctgagtgtctttttcccatgtaacttctgttcctttctttttctggtacactcctttataatcccagcaattgggaggcagaggctactgagtgagttcaaggacagccagggctacacagagaagcactccctgccttggggggaaaaagttatcccttttctttttcttttcttttgannnnnnnnnnnnnnnnnnnnnnnnnnnnnnnnnnnnnnnnnnnnnnnnnnnnnnnnnnnnnnnnnnnnnnnnnnnnnnnnnnnnnnnnnnnnnnnnnnnnnnnnnnnnnnnnnnnnnnnnnnnnnnnnnnnnnnnnnnnnnnnnnnnnnnnnnnnnnnnnnnnnnnnnnnnnnnnnnnnnnnnnnnnnnnnnnnnnnnnnnnnnnnnnnnnnnnnnnnnnnnnnnnnnnnnnnnnnnnnnnnnnnnnnnnnnnnnnnnnnnnnnnnnnnnnnnnnnnnnnnnnnnnnnnnnnnnnnnnnnnnnnnnnnnnnnnnnnnnnnnnnnnnnnnnnnnnnnnnnnnnnnnnnnnnnnnnnnnnnnnnnnnnnnnnnnnnnnnnnnnnnnnnnnnnnnnnnnnnnnnnnnnnnnnnnnnnnnnnnnnnnnnnnnnnnnnnnnnnnnnnnnnnnnnnnnnnnnnnnnnnnnnnnnnnnnnnnnnnnnnnnnnnnnnnnnnnnnnnnnnnnnnnnnnnnnnnnnnnnnnnnnnnnnnnnnnnnnnnnnnnnnnnnnnnnnnnnnnnnnnnnnnnnnnnnnnnnnnnnnnnnnnnnnnnnnnnnnnnnnnnnnnnnnnnnnnnnnnnnnnnnnnngggctgcacagaaaaacactctcaaaaaaccaaaaaaattatttgtgagccttagtaaaacgataatttaaaaaacttgggagaaacatgaaccactgagaatgagttcaaatacctccagcagtggtggccttggtttcttatcctcaaaatagactagtacactaaagggactattggctctatctccctttgcagtaactggtgatttctgtctgcttgcttgcttgtttgttcttggtttttcaaacagggtcttaggtagcctagctggcctctgtctgacaatttaaccaagagttaaagagtctaggttcttctctctgccaagaaaagaactttaaaaggaagtgagaagtagggatggagcggaggaggggcacacgtttttaatcctagcactcagttgacactggcaagcagatttctttctttctttctttctttctttctttctttctttctttctttctttctttctttctttctttctttctttcttttttggttttttcaagacagggtttttctgtatagccctggctgtcctggaattcactttgtagaccaggctggcctcgaactcagaaatcttcctgcctctgcctcccaaatgctgggattaaaggcctgtgccatcgcgcccggctggcaggcagatatctaatagaggccagcttagtctgtagagtgggttccaagataaccaccactacagagaaaccctgtcttgggggtgggggtgggggtggggtgaagaataaaaggcacaagcaggggcagggnnnnnnnnnnnnnnnnnnnnnnnnnnnnnnnnnnnnnnnnnnnnnnnnnnnnnnnnnnnnnnnnnnnnnnnnnnnnnnnnnnnnnnnnnnnnnnnnnnnnnnnnnnnnnnnnnnnnnnnnnnnnnnnnnnnnnnnnnnnnnnnnnnnnnnnnnnnnnnnnnnnnnnnnnnnnnnnnnnnnnnnnnnnnnnnnnnnnnnnnnnnnntattagggtgaagaagcacacggggtattgggtttcagactgggggtgggggtgagggggatggagggggactgactgatgctgatgctgtgagaacctgaaggccagatgggctttgtaaatatgtacctcagccccttatcctaggtctgaaacccagcatcaaggtaccagctgataagttatttctccaccagtgaaatgagccaattcaagccaaattaaagtacatataagcacaggtacactgggaaactgctcttggataggagggttcactggtaccaaggaagggggctagggaagtcaccatggaaagggagagagcagggagtaggaaaagaaagagagaagagtgcatgcagagagagggagggtagagagataagagggagaagagaaggaggaggaagaaggaagaaaaagaagaggaaaaggagaaggaggaggagggggggggtggggaggagagaccaaaatatctggctaaagggcagcccagcccctgaactggaaagttcagagtagcaacgtggtatgccaggtagggactgagggatgctgggagaacctggaagctagatgtgctttagtatgtaaaatatgcacttcagcccttgtccctgggtctaaaaccctgcacaggtcacctagaaagaccctctgcagatctaagggggccttcaggagcccctctgaagcccttttttgaagtccctttgaaggctgggtggttgtttgtttgagacaggatctcactatatatcccaggctgacttgaacttgctatgtagattaaactaaccttccaaactcactgagatctgcctgcccctgggacctggaatgaaaggtctggactactggtgccatccatacccagcaacacaggctgagagctccaaggatctctggggggatggggggtcttactcctctaatttatggtttgtcagtttgaacaatgacagggaggctgacaaacccacgacttttgggcaaacatgtcctgatctggccttgagcttgtctggactggtgaccctcctggtggagaaaaggttcaccaaggcctttcttttaagctgctagacttttatttcaggtaaggagggtgaagaagaaaccaagagtctgccatcttattgtttatttgtttgtttgtttcaagatagagtttttctttgtagcctttgttttctaggatctcattatgtagaccaggctgccccaaactcacaaagatcttcctgcctctgcctcctgagtactgggattaaaggtgtgggccaccgctacccggctgaattttgtcatcttcaatatccaataggctctctcttctctgtctgcctatcagggaatctatctaactcctaatctcacgtgaaggataaccacagactccctgatatatatacctccacctcaaagtgctgggattgcaggctggtggcaccacaagccaacacatctgagaaaactgaagaaggacccacactctcagacaagaagcccattccctacctctggcaaaatgtaagtactctcagcaactaaccataccagtttcaactatccaacttgactggtcctgctaatttagtcattaatttttatttacgttaaagtttgagacagagtctagccttggctgatctagagctcacagtgtgtagacttggatggcttcaaacacatatagatcttcctgcctctgatacctgagtgctaggattaaaggactatgccatcatgtctggcaataatttatctaatttatctatctatctacatctatttattagtgtataagtgttttggttgagtgtatgcatctatacaccaactgtatacagtgccctagatactagaagagggcattggagccactgctgctatgtgagagtggaaactgaactccatcctctagaaggtcaggcagtgatcttaactgctaagccatttctctatcactatttcatcttatttatttattcattcattcattcattttcgagacggtttcgctgtgtagttctggctgtccttgaactcactctgtagaccaggctggccttgaactcagagacccgcctgcctctgcctcccaagtgctgggattaaaggcatgggccaccagtgcccggcgcctccttttttttttaattcaaggtttgaataactcaggctgtccttggattcgttcaatcctcctgcctcagcttccggagtttagtttgcttggcagggctgtctaccacaacagtttaggttgagtctcttttgcgtccctatccccagagattatatgtcttcggaactttatcaacaccagccagtgccagccggcttgtacagtctctgtcaggcggagcacgcggccggtctcctagcaaccggaccgcgtccctcccaccgggcagtttagggctttccagcgcccagcatgccctgcggcccggcgcgcactacgcgtcccacaatgcctcacggccccgccccactcccgcggagaccccgccgggcagcactgcgaccccagcccaccgcctgcagcctactgggctgcgcaggccgggcgccatgcggaggggcgagcgcagagtcgccggaggctcgggatctgagtctccgctgctcaagggccgccgcagcaccgagtctgaagtctacgacgatggcactaacaccttcttttggtgagggtctccccgcgtcggggcaggagtttgggacagacagtttagattggaatcgggaaccgtcagggcctggatcagccaggggagcgcctcactccctccggccctcgtggaaccccccgtggtcgtctccgtatgagatgtcgagtgttttttcggatcggaggagccccgggatgagctctggaaggcctggccactacatattagtgacttttcaggtttccctttctgggggatagctgttgttcccctgctcttcacccgtaacgttgccctgaactggcctggtgggcatggcatatctgtatggtagattttcctcacagctacccttttcagtgacccttgcttgcacaactcaacctctgacaagttttggggtcaggttgccccgtctgcctttcgtggagttgagtgcgtaggaattgcaggtgttttgcttctttgaaggaccatgccaccgccctggctgaccaggtgtaatcccatgaccttgggctaacccttcacctttccttgtttgtgagaaggagcacgcttcatgagaggaatggctttgcttttatttcaggcagccaagtttctacccacctatgcgacactggagtcccagggtgggccctacaggcaagtgacacccaagtgcacagaaacaaatgtgttcccactggaggggatgttaagtggaagttgctctgagagaacagagctgtggcagtgtccagaacacatttgatcagagagaatcctggtctggaagtgttaagataattcaggagaaggtgccatcacacagatagggtcctccaagggactcttgtgtatgtcagcttgtatctctggcttgcaagtgggagtggtaactgaggcactggtgagatacagttgaaatagcaggaaagtgggttgggtgtgggagatagctttgcatctggaccttatactattagcaccttccctgggttatggacagcttctgcagtgagagccaaccagagctgcttttcaatatgattccgtctaatgactgtgaaaacattagagggaaaagaagcaatcccagcacttggaaggcagaggcaggtgggtctctgtgagtttgaagcgagcctggtttacatagtgagtttccagtacagccagaccctggagggagcgagagagggagagagagagagagcgcgcttggaagcgagcatggggcagttgaagttgtgggtatggtgccagagctagtgccgatggccttctttgacctttgaggtcctttggacattaaaatggcctataagtcgggctgttgcaaccccataaactaatctgaagactgatcccataccccattcttcttgactggacataatggcctctaaccccataactgaccccacaccatctcagtcatatcctggatgacaggacaaagaggaatgatgcttacaaaatccctgacccacacctggttttttgttttcataaaccgtgcactgccttacttcagggccaagagatctttgtggcaggagcctgttcctggttgcctacttaaataaaggactccaattggccttacattcatagcagtccgtgaattactcaagtgggtttttaaacatcaattctctatcaggtagcctccaccatggctcttggacaggagagaggcgggactgtccttcagtgcaggtgacggccactggactgagaattctggagtgtgttgctggcttgcctttcttgctttatagtcatttattcattcagccattcttcagtgtgtattttggggacttttgctgagtgtcattactatcttaggggataatatcaggaaactaaacaagagctctgattctggcacagacctggaactttatttatataaagttttattttgtgtgtattgatgttctgcctgcatgtgtgtgtataaaacctgtatgcaatgcccctagaagccagaagagagtgttgggtcccttggaaccatagttccagacgggagctgctgagtcgatgttagggaccccatctgggtcctctggaagagtagcctgtgttgttaacctctgagtcagggctccaacccaaccccctaccacgggatctcactttcttttcttttcttttcttttcttttcttttcttttcttttcttttcttttcctttcctttcctttcctttcctttcctttcctttcctttctttctttctttttttttttttttccccagatggggtttctctgtatagccctggctgtaatggaactcactttgtagaccaggctggactcgaactcagaaatccacctgcctctgcctctgcctcccgggtgctgggattaaaggcgtgtgtcaccacgcccggcttggatctcactttctaacccactcccaccagcatggaatctgtgacagtttgagaattggtagtctattcttgggtcttagagcatggtgcttctagtgagccatctaggagagttggggcagaaatcaccagtacatccgtagcaataatttctgcagcttcagatataagtgatctatcactgtgggctagggcttacctagacttgcccacatttagtaagcatgatttgataattcatactcttttgactatcagatcaacaagccaagaaagccagtgtaacaggctagaagcctcttgaagacctgacctgggaccggccctgtccctttcttggcaacgccttcatggttccctggttggttctggcagggttgccttcctacccactcagcgtgaggagcgtggtcatctccagggaagaacaggaactgggtattttccactcagagcaaggaaccagtttgtcctcatgcctgcccctgggcagtaactgaagtcccaaaatttacataggtcaactctcatattgggcctagtcatgggactcagaccatccccgtgtctgtgtatggtagggaggagtaggaggcagcgctgcacaaacctgacgttctggaaggaaaaagatgacctgtcttggcaacctgttgtgcctccctccctccatcccaccccccacctcaccccccacatacgtgcgtgtgtgtgtgtgtgtgtgtgtgtgtgtgtgtgtgtatgtaagtgtgtaagagagagagagagttagacgaggagcaacaaggcagagctcactcttgagcgagcattgattgaacactctgaggtctttagctgtgagtctgtttggctgatgccctccctcccatttcaccgtttccagatcaggggaggccgggggaggccaggttttggtgactgtgtgagtaatagggtgaacattgacctcaagggaaaggtctatttattcagatattcctggtctactgagaagaaatagaaaatagtactcctttcaagatcgtagacagccaaggatgccctcaacttgctggctacttcaaaaactgtgaagatcagagcagtacagaaaccatggagctaaagtaatttctaaggtcttcggaaatgagctggggattagagcttagtggcagaatacttgtctagcatatgtaagaccagaggcccagttctcattaccagaggggaagttgggggaagccttccacatttactgttaaatgtgaccatatctacctgtgttggaaggtagtacccctctggtacccacgggaatggtcagtcagcttgggagtgcaggtgagccccgctcctgtgctgggtgactaggtatcacgtgagtgcttggtgatctctgctctgacactacctgtgtgtttttggattcaggcgtgcccacactttaactgtgctgttcatcctcacctgtgcgctgggctacgtgactctcctagaagaaacccctcaggatacagcctacaacaccaagaggtaactgcttctgttcagagggtgtgatgtcctgtggagctctggccagccggggctctgcattttccttgtgtgtctgattgactggctttcacaccttcccctgaagctgtgtggtattccttgcccaggactgtgggaactcgtcacctttgagtggtagggatattttgctttagccttcagggtgactccctctagctggggtgcagaagccttgtgagatcgaccacatcatcacaccagcagctcccctcagacgtaaggattctcagattgtctgggatctagagccaccagcagtgaaccctgtgatggcacttacatccttgttgcattcaggttccgaagctagtccctagcatgtagggacaagttactccagagtactgacagacttttctgttgctcctctggttctctgggctgcatgtctgccctgggaaggcaggtcagttactgttagttactggttctgtgcaggtcctgcttgctctgggagggctagaggggaggcccgagagacctagtgaggtttccaggctgctttggttgctttcccctgacctgtggaatccccgtggtcttaacacttccaggctagaattttgtttttgaaaactgggagtcttagtactttgctctaagaattgaatggggtgaatttgtctggaccctagggctcccttctgcctttcttgtgcagtacaggtaacctccctagctgtttcccagctgttcctggcctattctttactgctcagtgacttccagctcagagtcagcctctcaggagtgttctctctctcccctctctcccccctccctttctctttttctcgctccccttctccctctccctctctccctttctctcccgagcttgggatagcttgttcccaggccctgtagcccttctggcgatgtctgccctggcctatgctggtgcttcctgctcattctcatctgcaggctggcctgctcctccctccttttttcggaaggcttctttctaccagactctcagtctcaagtctcaggcaaggtctataagctcagcatgctcttaaggagatgagttaacactgagagagggacttgtgcttcctgggccaccgggtcaggtctactttgtccttcctgtcctgctgccgacagaggggtcatctgcagatattggcccttggggtatggaggcagtactcctctttgtgcctttatctgctcagagggaattttcaagtagaactgggtctttagcaaagtatggttgctcacacatgtagacctagcacttgggaaactgaggcaggaggatcagaagtttgaggccaatcttggctacatggtgagttcaaaagaccagcctgtgttacatgagactctgtttcagaaaaacaaaggggacatggtggcacacacctttctagcactgagacgcagaaaggcagatctctgagtttgaagccagcctggcctccatagcattccaggccattttttgagaccctgtctcgaaaaaagaaaagaaaaaaagaaaagaacgagcaacaaaactatgtctgctggcgtctgtgtgtacctgggaatagagggtctgctggcatctgcaaggcacagcaaggaagtccagagagctgagacgtggttatacctcgggaggtactctccagggcctggatacatcactcaggagcctagggtttaatccttagcaccagaccctgcactccaaaaaagtttctctatatgagaagtttagctaaagatgcccaggtctgatgtcactcactggacaggagttgtctcaggaagagtacagtcctctctctgaagagtaggaacatacaaaggtaccctggagtggtcaccagtcacctgccagagctgttacagagctgtcgtccacccagtctgttggtggtgttgtcaatactaggtgacccagaacctagagagtccaagagctcagactcccaagtgtaaggagggtagcactgtggaccgtgtggacacagcctttcttcatccaggggacactgcacatctgttcctcatctttgtccccctatttcctctttaagagcatgaaggaactacctttctggcctgtaattcttctggtagagcctggaatctgctatttgctcctccctggaacggtgggagtcttcttatgtgcttaaaagtaggcttggtgacaagcatgtaacctactgagccatctcaccagctctatagaaaatattttataatttttatgttgttgcagatggaactcagacccttatatatcccaagcaaacactgttccatagagagacaactgcaagacttacttagttttcatttaaaaaattatttttacttatgtgtatgtatgtattgggataggtaagtgagtatcctcagaggccaaaagagggtgtcgagtcccttggagctacagacagttgcgagtcacagaataggtgctagaatctgattctgggccttctgtacaatcagcaaacgctcctaaccactgagcaatctccggctcaccaagacttagtttgtaacgtatttctttaaaaaaaaagatttatttattttatgtatgtgagtacactgtagctgtctttagacatgccagaagaggacttcagatcccattacagatggttgtgagccaccctgtggttgctgggaattgaattcagaacctctggaagagcagtcagtgctcttatctgctgagccatctctccagcccaacatatttcttaagatttacttaacttttgtgtccatacatgtgtgcctgtgtgagttacatgcactatgtacatataggtacccatgggtgtcagggcatttgatcccctggatttggagttatagtcagttatgagccttctgattcgggtgctgggaactgcactcaggtcctctacaccagcagctaatgctctaaccagtgtgccatcttttctgcctcctttgtaaagtgtttcctttctacttgtgcgtcattgctctttttctttgagatgtcggttgtgtttcatgatattgccagtcttgtcctgaaattcactatgtgggccaggctggtctggaactcacagacccacttacctctgcctcccaagtgttgtgatcaaaggcattctctaccatacccagctgccagtttgttcttgaactccagggctcaagtgattcttttgtctcagccaggactctagacacagaccactgtacagctttgttttcttctcagattaacctattggtctataatttgatgcatttctaattaagttccagcttggtgagtttgagatgcacatacctatgtgcctgttgctgaccgaggcagccctgagtctcacaccatgtgttctggtttcccaggagtggtgttgctatgttactttctgtgcctggcttcttccccacaccagggatatatgtctttgtagactgtcagtactgttggtaagctgtcccacacagatggctcatgatttatcatctggtgtggtgggtgacctggggcacttctggctctcttatcttctcagttagtgagctgtccattccatttaccatttaaaacattttacaaatttaaaaaataagcatgataaggttacacacctgtaatctcagtgctgagttgtttgaagcaggagactcctacattgtaggcaaatctgggctgtgtagcaagatcctgcctttctcaaacagaacaaaaatctacccacatttttttttcaaaaggcaaacacaattaacaagaagcaacacaataaaatctgatggaacacatgtactcccagatactcaggaggctgaggcaggaggattgcttggtctggacagcatagtgagacccattctcaagaaagtgaataaagactgtaaaagtgagcaagatggctcagctgcgaagagcactctctgttcttgcaggggaaccaagttcagatctcagcagtaatggctgctggccataatggtctataactccagctccaagggatctgacaccttgttggcacttacgtttaatgtgtacattaaaagtaatagaaataagtcttgggaaaaaaccctgaagaggtactctaccaagaaagagaaagaggagagaaacagcctgtgaaatgtgcgctgctgacatcccggggcagggctcctcagactgagaactgccagattccaccacacagcttctgcaggactgaaatgtaaagacgataagagtttgaaacagcagcagctcattcattactaatagggatgtggctgcattggaaagcaacttagggaattaaaatcaatctctcaatctctctctctctctcatctgtatttgtgtgtctggtgctcatgacagaacccctggaggtagagatgatagtgagctgtcttgtgggtgctgaaaatcagacctgggtgctctatgtgagtatccagtgctcttaactactgggccatctctccagccccactaaactcacatgtggtccagcatcatgcttttaaaggtgagggcaatggtagaatatttgctttgtgctgtctaggccctggctttctttccaaactatcttagataatgtaatggctgggaccctaagaatgaaggcatactgacaagagaatcaatttatagacgcactgagcctcctgaagtgccaggagatgggctctttaagaacagaggcagaggctgcaagagcccatggattggctgacagctgagcccgtgggcacctctgcagttgctgctgctgtatccttgattatgtgacaggtgccagaaatcagtagagtttttaggttaccagaggacagaggtcagaagtgccccccccccccccccccaactggggaacatcagaaacaagctcagattaagttcactacagatacagtcagttacaaacggaaatgtgtgtcatctataacacttcagcctcctggatccacgagcttcatctccgaggaggagtcaaccagtttttgaacccttttgaaaggggtccagagagatggctctgtgtaagagcatgagctgctcttccatcggggaaaacgggctgatcagtcctgcacacagccacctgggtcaccacaaacagcctctgtcaccgcctgaggagactcaggagatgtgaagactcaccgtcatggctcctacacggagatctggggcagaggaggactttagagggacctgagcaaataggataaagtgaggactttacttgcttaaagatttatttaaaaaaaattttttttaattttattaatttatttattatatgtaagtacactgtagctgttttcagacactccagaagagggcatcagatcttgttacagatggttgtgagcatcattacagatgtaatgggcatcagaccccattacaagttgtaagccaccctgtggttgctgggatttgaactccggacctttggaagagcagtcgggtgctcttacccactgagccatctcaccagccccaaaatttttaacaatttattttatgtatacgagtatacaccattgctgtcttcagacacaacagaagagggcatcagatcacaaccattacagatggttgtgagccattgtgtggctgctgggatttgaactcaggacctctggaaggcagtcagtgctcttaactgctgagccatctctccagcccggtttactttaaattggcaacatttggtttctttttccattacctcggctcagctgatacatttcaggtccgtaggtacttcttacagcccatccttgtaaatcgtcattcacaccagccttgtgtgtatggcccaggtcccatgccacccagcctacgtggctgtgttgctttgtaccacaggggactgtgtagtttagatactgatggtcccaggtaggtgtgacccgggcttctctcaggtgagcagtacagtggcgtctctttgtcttgactttcatttctattcttttgggaatggtaactgtccttcacctaataggattgccattgttctgaacaggaagcctgccttttgccctgcctggtatctgtggagtgctggtttcagggtcctccaaagataatgaaatgtgtgaacacttagatcttttacatacagtgctatctgtatacccacatatatctcccgtttcctttttttttttttttttttttttttttgagacagggtttctctgtatggccctggttgtcctggaactcactttgtagaccaggctggcctcgaactcagaaatccacttgtctatgcctcccaagtgctgggattaaaggcgtacgccaccaccgcccggcctatctcccatttcctaaaaacatctctcaattgcatatgctacctatgtggactgtggctgctatatagagagctgggttagcagagccaccattcacgagattgttctgaacaggaagcctgccttttgcccatttactgatttaatcaacttatctcactgtggacatgagatttgttgttcagcattgccttaggccattactgggacatgacctgagaacgctaatgggcttttctgagtttcagacacaacaggaacctctaggcccatttttttttccttcctttttgcttcagtcctgtccttaagaacgactctaaggagtctgggtctctcactgaagaacacctgaagccaagactggttgttgggtatgcctgttgccactatggtgaggctggctttagactgctaataggatagcagtctacaggggaaggcaactaattcaggctgtgccttgtgtgaggtattgcttcagggagccccttccaggttcctttcccacctcctgtcttgctagtgctgtgaaagagctatgatccctcctcggagctgagcagcaagtgctctgttcctcctggcagcagtggtatcgagccaggctggataaatcacacgtgccttggagagctgcagatgctccgctaagattaggggtggctctcgtcttgactgctcggggcaggcaggtaatacttaattttcttggcttgttctggccacagccatgaggtaggatgtccagatattaagggcatcagcatgggcagggcagagtgagaccgggattcctgtgaacactggcctgagggtgtccttagcagggactgtagcctcacggcctcggccctggctttgtgtggtccacgcttctgtgccctgtgccctgttttcaatgtggtctacatacatgtaggtgtcatactttccatcctgcacctccaagagcacattggtgtaggaggtggtgacccaacaggacgacaattctggcaaggcccaataggcctgcgctatgaggtagctattagatcctgatgtttctcagaggctttatgaggtctaatcaagtgaacctgtggtgacactctaaatgacaggagaaacctcacgtggacatctgagagtgtgctgcttgtgggctgttgaggtggagtgagccatgtggaccagcctcccgccaagtagctgccagacggagttgtgggctgtttccagcatggctggtctatcatgggtgtccactggggtccccgctgcctcccaccgctgcctgaaagaagcctgcacacactgaggggctctttgttctttatttgcagaggtattgtggccagtattttggttttcttatgttttggagtcacacaagctaaagacgggccattttccagacctcatccaggtaactcaccatttcttttccatgtgtgccacgtctcttctgtcttgagcagctgctgtatctgtactgctgggtgtgactgtcctgtcctccgccagcgccccctgtggctgctgactgtacttcctccccctgtctctccctgtctgtggctttctcaccttcctgcagaccagagggcctgcctgggctcctaggaggggctggagacctaggagtgtcattgagtactgcctccaccacccccacccaagttctgacaaatctatggcatcaaattgcccccgtgaacctcagctggaggacacaagccacctacttgcctgctcagttggccagagctcagatgaggaggcccttaaggctacaagttggttggtgttacttcttaagggccttggcatagatgtttcttttgtgcctcaatgtgagtataaactgtgaaaatacagaaactatttttaggcattttaaaaaataaacacttaaatttggatgtcttgtgtatatttatttacttatttttgagggtctcactgttgctcaggttatcctcaaattcttagaagcaaggaattctcttgcctcttcctgtgtactgggaccacaagtgagtcccccagtattgctgtttttcctgggttttgtttcttttttttgtttttggattgctttgtaaagtaggcagtcttgagatttttctttctgtagctgtgtacttacttgattgtttaaccaagtactgttggagcaagagatgagggattagccttccagaacggggaatgtctgccaagggtgagttcgttctgaagctgtgaacagattcccccatggtcctgaagctctgagcaggctgtgtggtttgttattgctgctagattcctgagtggccttcaccctctgcacccatccagccttgacacactaggagttgaaccagagccacagggaagggaaataatttaaaaagtgcctacttcatcttagcagcaagtgttcttttttgtttttttgagacaagggtcttctgtgtagccttggctgtcctagaactagctctgtagaccagactggccttgaactcagagatcctcctgtgtatcccctcagtgctgggattaaaggcgtgtgtcaccactgcccagcttatttgtgattttatttctttagatttatttattttatgtatatgagtacactgtagctgtcttcagacacaccagaagagggcatcagaccccattacaagttgtaagccaccctgtggttgctgggaattgaactcaggacctctggaagagcagtcagtgctcttaaccgctgagccatctctccagcccctatgtgtgttttaagatgtcatttttgaagtaagtttccctgccaataatgatttgtcctacaacacagtgggaaaagtcagccgaatctgtacagttatatttggagttggcgttttctgttcgtaatttaattacacacacatatgtatatttggtatgctagaaaggaaggatgcataattttgggtgttaaagttgtagagtttgctttgtcacaataaaactacatgtgtacagggacaggtgctggctgacgggtaagggcttgtcctgcatttggaggaagagagctataagcccatatggtaaggcaacttcctctcaagagccacatctcaaggagcatgacagatgggaccacactggccaactggcagtaacttgcttctgcaacttggctccgggactcttgaaagtgtcttccagacttgcaggttcttaagtccaggggcacaaggccgatatcatggcaaacagaaatcactgtgcatggaaggttttagactttgggaggttcccacagggctctgatctaagtgactgcagttctagctcccagacctagaatgttgttcctctccctcctctttttttttttttttttttcccctagtaaggtctcactgtgtagctctggctgcctagaactgtgctgaccaggctggtctctgtctcctgaatgctggcattaaaggcgtgtgttaccaagcccaggaaccctctctaacatgcatgctcatctgtgggttactttgagaactctgctctgcctttccttctagagtagttgctgtgcataagctccaagcttcttcaccattctgtcttattcatgtaggaaatctgtcctcagccacctcccaccccactgtttgttgatatactgagcatggaacccagggcctccagtgaaagggtgtgtgttgtagctaagcaggaggtcagtgcactgtgagagggacagctccgtgggtgtcccccagggaggagctctccctgccttacctactgctctgctcttaggaagacctagtcaggctgcctcaaccagggccattatctgcctggcctcattagagcagcaaactgaggcttcagctgacctgcctggggagttgctttatttggaaactgtaattggctgtggttccaagtgaacaccttgaaacaagtcccagttcttctgaaactgcttctctccattcagttttttgcttttgtttttgtctatttgcagtgctaggagctgaaccctgggcctcatttgtcctatacaaatgtgccccactgagctacaactctagcccctttccaaaagctagggttcagcgccatccccagcactgctgagctgcctttgatcctttctcacattttattttggggtagacaaggggcactggcatcaaaacaaccaacagaagaagtcagggtttggggtgctgtagaagcagctggatacacaggataagcaggagaagcagctggatacgcaggataagcaggataagcagctggatacgcaggatgggcctaaaggaggcaaggatgagaggcttctgcttggaaagactgtggggaagacaggagagagcaatagctgaagaggtgctgtgggcatcagacctgatgacgtcagggtttctgttggaggtggggcctgacatatctgttcttctcacatacacacactgcaggagtggaggccagcttgctcccctcagctggtgaagattttcacacaggctcttccttcccccacttcaggcatgaagaacattcataaacaccatctgtatctgggagtggcatgagcaaatgccagcgagggcttcctacgtcacattccctgtctgtcactgtcagggttgggtattctcaaccaagtagatcaggtcacatggtcccttttttttttttttttttttttgagatagggtttgtagaccaggctggcctcgaactcagaaatccgcctgcctctgcctcccaagtgctgggattaaaggcgtgcgccaccaccgcctggctggtcacacgttcttaacgcacggaacctccctggctcttgagtaccatagtgcattcagggatggagcggcgttaggagaaatctgcaggcataaatatggtttgtgttaaaacacttttcctaaataaatgcagaagactaaaagttcatactaattcatgataagaaattgaacatattagaattctgagattttcacccctggaagagctgtccagcagagcaggtcagcagcatcagtacatctcggaggaggaggaggaggccctcactcccagcaccgtggcccttctgtgcctctgcagcaaggcaaacggagtaaaggcctcgggactcaagaagaggaaagcatctcacatttcatagaggagttctgtgtaacttcacttagtccttgcttacaaagattctatgaaggacacctgagcattcccttaaaaagactgtctgatcaggagcctcctgaggctgggtggggcctagcgccccagagcagagcccctgacattgctattatcttgttgtagcttactggcggttttggctgtgtgttagtgtggtctacgaattgtttctcatcttcatccttttccaggtaagcagcttttcttggttgataaaacaagtatagataatagaggaggcttgaatcctcaggccccagggtgctggcaagaagccaggctggaccagcacgggtagacacaaactgtcttaccctccaggctggcccatatggaggagtgtcttagtgtgggtacaggcacaggctgctgccatctttgtatgcaagccgggacagacacaggggagacagctcctctgatgacagacaggtcaagtgcagtagctgccgctttaggaacttgggcctgcctgggacccgggggagctggtgggatttgcagctcaccaggggggtgggaggggaatggagtattgcattatgtgttcactaatggtccactctgcttcagtcactgaattctgagttccatgagtgagtgagtcactagggtttttattgtgctaaatccaccacaccgtctggggcagttatgcagggctgagtccctgtgcatgtacaaacatcctagtagacccagaacagttccgtatctagaaaactcactcagatctctttgatagtctctctgttctactctccagttacctgccatctgtcaagacttgtcttggaacaccccgagggtgttcttgataacccatatcatgtctttgaggtccacccagctgtatcgttggtacagtgtttcttctttcctgagggacatttcaggacccaagaggcatttggtttcccattaggagctgctgtgaatcaagctgctctcaacaatcctgttagggcttgtgggatacaaagttgcatttctctcctagacaggcccattgtggtctcactggtctcatcacacaggcctttaatgtttgaggagctgccagattgcattccagcatggctgtgccatcttgcatcccaccagcgctgacctagaattctgctgctttatgccatctttcagttctgttgtctgagttctgttgtcagagctggatttgctggcggtgaatggaattatatcctaatgggtataaggtgacatctcttgttttgtctttttcctgccagagattcacttgaaaacaccatagcacacctaagtgtctcatctccagggctcctctggactgtataggtcacagactaagctactaacgggctgtcagctctgcaaaggctggtgggtgtctggtaggccaggtggccatggcaatcttccacactttgttcttctctttcttttcttttttaaagatttatttttgttttgttttgtttttttccaagacagggtttctctgtgtagccctggctgtcctgtaactcactttgtagaccaggctggcctcgaactcagaaatccgcctgcctctgcctctgcctcccaagtgctgggatccaaggcatgcgacactacacccggtgatttatctgttttatacaagtacactgttgctgtcttcacacaccagaagagggcatcggattccacaacagatggttgtgagccaccatgtggttgctgggagttgaactcaggatctctagaagagcagtcagtgctcttaaccactgagccacttttccagcccctgttcttctctctcatgattgccccgtgtcagctgatctcctgcatttccaagtgaatgctagactctctttctggctatgtaagagagctggtgaggtttcgttttctttgtttgcaatgctggtggtggaattcagtcctcctgcatgctaggcaaacgctctactactgagccccaccccaaccctagcaggtgagatgttaacagaggtcgaattgatcagtttagaacactgccaccacagtgttagatcttgtggttcatggacttgaggtatctttctatccccttatagccccttaatgacttcctattatactttatagttttcataatgtacattttgtacttgcattgttaaattattcccaagtatttaatttgctaatagggtgtagaaatagtttttgtgttgatgtgtgtcctgtggccttgctaaccttaccagctctagtgcttgtgcaggctttgttgttgtctagcccctgccatctgcaccaggatgctgccacacttccttacagtctgctgtttcccactcttgcctgactcccctagctgggccttccggaggctgatcacaagcatggacctccttacctggttctggaccttatcggagtatccagcctttctgcgaggtgcaatctgagctctgacttttctcagaagccttcaccgagcgggagctgttttggttctggtgcagctggcttctggttttcattattccgtgttagactttttgattttgtgagatgcgttttctacattaagtaagatgattgtgtgagtttttcctttattgatgatggtatttgcaccaaataatttttaaaatgtggtttatttgggatgttggtttggtctggttttttttttttttttttttaaagatttatttatttattatatgtaagtacactgtagctatcttcagacactccagaagagggagtcagatctcgttacagatggctgtgagccaccatgtggttgctgggatttgaactctggaccttaccagtcgggtgctcttacccactgagccatctcaccagcctcctggttttgaaacagggtcttgttgtatagcccaggctggccctgagcttgctgtacatatacttaagtcctcctgcttctgcctccccgagtgttgctgtcagaggtgtgcattgcaatgcctggcatgattttcttcttggaagctatgggcattcctgagaggaggtggtggtgtctaaccctgtctggagtctggatccagcctcctaggattctgcccaggatctttgcatccttattcatgagatactttcttagattgccttccttgaactgttttttttttcctctgtcttcggcattggagttcattaggatttgtctgctgtatttcttaggatttggccggatttaagatataagcagtctgtcagtggggcttctccctggtaagactaaccctgaccgtggagaggctgctaggcttccctcatacaggcctttaactgcctgtgtctgtctgctctcttgaaggaagtttctatgtgctatccatgtccgggtaggagccaggacttggggttcactatctcagggttgtgtatctatgtattatggagttcctcttgaggaaaacctgtctctatccaaccatgtgttaagtgtctaataatttgttcttatcagcatgactcaaagttatttgttcaggttgtatactcaaatactgcttttatgtttttgctgaagttctttagaccctagcactctcctttagtttctgtcttgtttgacacatccccttctttaagggttcttggttttttatgtgtttgactcagactatagatgttccagttgtgtgtacctcctgctttgagccctggagtcagccttttccctagggccctgttcagttcctgaaggacagatgctcgtcttaagagactgcagtctgggaactggatttgccagtcaggtgtccaggtactcagctacagagtgtacaacccgttaccgtgatcatatcggttctagcatctgtcttgaaagtccccctgcagtgtagcgacttcccttctgccctccatcgagtgccacggcatcatggggctctgcatggcgatcagaagcaccatgtgttttgcagatagtttaaaactaagaacaggtgggtacctttgagcctaaacttgtgtcaaacctagacctcatcttctctgacgtctgaggcctttggggcctaagccggaaggtggcttcaggaacattcgtgcttcagcatgtcctcaagtcttgctggtttgtgtccaggacacagggcattaacaagatggccacctgtggaatctgcaccagggacaggtgaaccctgactttcagaccaagggctagactcccagctggccagcctgattcatctctggtcctgtcctgcttgtttctgcccctctgctagacatccatttcccatggtctctaggcctttgaggcttctctttgtcctggcttgagatttgctccaagggtcccctcctcttttgtgtccagaaatgtttaatccaccaaggggacagagctttaccaactgctgcatatccagaaagatggacttgtgcttgaccgagtggacatggccctgcagcatggggggaaggcagcagtatagggctgcctcttctggatcgggatctagtccaatatccactggagagaggatggtaggggctggcatttgtgccctgatggcttactggggctcaaggcatgctcagctctccagccctagctggagtggaagagctgctgtccctgtaacatactgaccaagctagaggtcacactacagaccactctatccaggctgccttgctaagcctcaccacactaatggctctgctttgcagacagtccaggatggccgacagtttctgaagtatgtggatcccaggctgggagtcccattgccagagagggactacgggggcaactgcctcatctatgatgctgacaacaagactgaccctttccacaacatctgggtatgggtgttctcaactgcagggcttcagcagcccaggacctcccttggttttatgggatcaggcagggtgccctgtaagactgtccatgcctcctgcttttcttcagactcctacagggcagagtaggcctgtgaccttgttcatgtcagatgagggtccatcagaggggcatcctggtctctgttgccagtgtggtcatctgaagcagcacacttgccaggccctggcttggcatcagcctggagggttgtgaggggaggggaatgaccctgggcctctgcacagcaggaggttatatggtccctgaagacttgcccaagataccacaggggaggagactgcctgatggtaggggtgcctgaggtggggcctgggcctcagggtcgcatccttgttacctacaggacaagctggatggctttgttcctgcacacttcattggctggtatctgaaggtagggtaacaccctggttctgtctagttccccttttgccatgttcccagccatttgggtccacaaatggtccgcaggtgggtgggccctggtgcagaagcactgagccaccctggagaatatgtaagataccagagacttgcagtttctcaggaggccttacgtgtagtgctgatcctgctcttcagatctacgccctgttcctagcactgtggccggttaggaaaagggagtgagggaaatggcaaggcaggaagcccaggacagcctggccccagatgcacccccacaatggtgctgcctgtccgtcccaacccatggcttgaaccagacctcctgttagagctcaatgccaagtcttggggccccttcatgttgtctgtaaaccttcaagttagaacggtagctgttcatctgctacgtttacggggggacctgctgaggctgggggcggaagtcagggattgtgtttgaggggtgctgtctgtagggaaggagtggcaaagcctgacgggcgctgtctggccctcagacgctcatgatccgtgactggtggatgtgcatgatcatcagtgtgatgttcgagttcctggagtacagcctggagcaccagctgcccaacttcagcgagtgctggtgggaccatgtaggtgcagcgggcaaggcacagcctgggtgggccccgccgtcatctcaggccccgtggttaattcctctcctttcctgacccagtggatcatggacgtcctcgtctgcaacgggctgggcatctactgtggcatgaagaccctcgagtggctgtccctgaagacatataagtggcagggcctctggaacattccaacctacaagtacatcttgggagttatagaagggaaccacagagcattgggcccgcaaggacaaggccttgctacttgggagggtggcaagcaaaacattagagtggtagagagtgactgctagtcctccatctggctccctggcttgcttctctcaagaggctgtgggcctgatctatccacctctcctacagcctaggttgtccttagacttgctctgtactctagaatgactctcgcccccaactcccgggagtcataatgtgtacccctatgccaagtttctctgctacctataagatttaagaaagaaaaattgtacctgaaatggtggtatatgtctttagaggccactgcttggtaagctgaggcaggagaattccttgagtacagaagttcaagtttagtctaggcaatccagggagacttctctccccccaccccccaaaaaaaaaaaaacacgcacacacacaggaaaagtgggagctgaggatatagctcagttggtagagtgcttacctaccacactcaaagccctgggttcaatacccaaaaccacgtgatccaaatgttctggaatcccacatttgctgctgttgtaaaagcagaccagaagttcagtcattctcaagtatatagtaagcttgaggccagctagccttagcttacatgagatcgtatttcaacaaatgaaagtaaaaattagcaaggcatagtgacacacatacctttaatcccagataggcaggtaaatctgtatgaattggaggccagcctggtctacatagtaagaccttgtcccaaacaatcaaaagcaggctgtatcctgagacttgggagacagaggcgggtaggtagatttcttgagttcaaggacagcctggtctacatagcaaattccaggacaaccaaagctacacaacagagagaccatgtatcagaaaacaaaaaacagacaaacaaacaaaacagaaaaggacagaggagcaatgctagatagtcccagcactaggcaggaagagggcgagaggatggagatgcaggtccttagcaccacaggaaacaagcctccgctcctgtctgggagcctcagcaatgtgtatggccccctctgaagtggctgtgtgggattttgaacagggcagagccttgtatctgctgggcaaagcaacaggcactggctcctgggttctggctctagctctgtgacctgaataaagctggttgactggccatgtcctcaaggctgctggctctctggttcccaggggcaagatgaagaggattgcctttcagttcacgccttacagctgggtacgctttgagtggaagccagcctccagcctgcaccgctggctggccgtgtgtggcatcatcctggtggtaagtcccagcagcctggtgactgggtatccatgcaacaccagtggttggttctgggactgatgaactgaccttcttccgtcccctagttcctgctggcagagctgaacaccttctacctgaagtttgtgctatggatgccccctgaacactacctggtccttctgaggctggtcttcttcgtgaacgtgggtggtgtggccatgcgtgagatctacgacttcatggatgaattgtgagggctgccgtagggcctagggggtgggatgccagagcctgggagccccaagggccccaaatgcccttgtgctgaacaagccaggcagctgccgcctctctgcaggaagccccacaggaagctgggccagcaggcctggctggtggcagccatcacagtcacagagcttctcatcgtggtgaagtatgacccgcacacactcaccctgtcactgcccttctacatctcccagtgctggactcttggctccatcctggtgcttacatggactgtctggcgcttcttcctgcggtgagtgggagtgggaccccagaccatcggttcactgtgagtggtgtctgtccccctctttggttgaatactgacaaggctctatccattccctacccttgccttgcctgatggctctatctgccctggcccgtgtactctctgtgagtctctggttctgcctggcagatgcaggtgcttgaggtgacctgtcctgcctatagctgaccctctacttgctattgctagaattatagcacatgtagcctcttgtagaacgaaggtagccaggtgtctgtggggcctatgctggggctgctgcaggaacaggtggtgaggtagctctgctgccccacagggacatcaccatgaggtacaaggagacccggcgacagaagcagcagagtcaccaggccagagccgtcaacaaccgggatgggcaccctgggccagatgatgacctgctagggactggaactgcagaagaagaggggaccaccaatgacggtgtgactgctgaggaggggacctcagccgcgtcatgagcctcaccctcgtcactggccttgtgccaaggggctgtcccatttctcccttcctcgtgctccctgcttcagaggcaggggtggggggggcatccacactccaggaggggcacctgagaatacatgtttgtgtgcaggtaggtgtatgcacatattggctcctgacactactttggggccatgagctgaacagtgagcctggaacttgctctagagcaagagtcctttctacctggtcaacaaaggccctggtccatggtctcccttgtgctcaatctcagcaccggctaggggaggtatcttggtatctcggtactctttctccactctttatggggtaggcagaagccccatgagaccctgtggtcccacccacttacagcagcataagtgaaggatatcataataccaacatgtctgcaaagtggtgggtctagagtcagcactgagccatttcctttggagccttcctttaaccacgcaggactataaactgaatggtgtatacatgacagtcacagattggccttttgcggccagagagcccaacttggagacctgtaccccaggtgccagggtgctgtcaccatggctcccttgagcaaatggaacaaataaagtgatgatgaaggtgcatagcctctggctgccctttgccccgtgctctatgccttgcagaggaggggagtgtgtgtgtctgtctgtctgtctcctgggcagctacccgtctactacattgtttctcactgggtgtggggctggtgatcgctgaagaataaccacgagaaatgactgtgagccttgctttacggtcacagccattgggaatgcagtagcaaaccatttgtctgccaacaagttcaattttcccacgaatgcaaatgtgcaagtcatgcccttagcttactaaggcaacgggtcgtgtctttggatttttgagccagggttttgctgcatagttcagactggcacaggcctcggtgtccaacccaagcttgcttcaagttcttagcagcccagcttcagcttcccacattctggtttgtgccactatgtttaactaaaagttctttttaaatttttaaatttttttcttaattatgtctgtacatgagtgcagatggcaatagaggaggccaatcagaccccctggggctgaagttagaggtgtccttagcccctgtccacccccatgtacctccgttgttttcctccaactctctggctgctgtgaccactgctgtagtgatgcaggcagtacaggtatctgacactgactgattcagcttgggttttgtgtgtatggtagtgcaattgctgggccatcccatagttccattttttacatctttgaggaatcccatactcctttccatactgtactaactgcacatttctaccagctgtaagtttgctcatctctctgcgtcctcacactttgcagcggtctccctgcctctacttcccgagtggtggaattagaagactgagcaaccaattttaactctgaccagtatttgttatctttttggttttgtttcttcgagtcagggtttctttgtgtaacggccctggccgtcatggaactcactccagaccagactggcctcaaactcagagattgcctccaagccgtgccccaccaccacctgattcttttttctttcttttcttttcttttcttcccttttcttttctaaactacttaaaatgttttaaagattttcctttatgagaagtgtttgcctggatgtgtgcatgtgcaccacatgagtgcctgtggccagatgtctttgggtctcctggaagtggagtaaagaagatagtccagagctgtgctgggaacagagcctctataggagcagcaagtgctcttctcacagagacatctccacagccccatgcccgtggtgtctctctttcctgacagccattctcatgaggtaaggtgacaccttactgggtttgatttgcagttcccaggtgaccaatggcaacaggcattttcctacctggctttgtcttaaagctgtatctgtttagatgtattgctcatttttaatcaggttacttataaatcctggttaaaacaacaaaagttggttgttgtagaaattctttttttttttttttttttttttttttttatttattattatatgtaagtacattgtagctgtcttcagacacaccagaagagggagtcagatcttgttacggatggttgtgagccaccatgtggttgctgggatttgaactctggaccttcggaagagcagtaagagcagtcgggtgctcttacccactgagccatctcaccagccctgttgtagaaattcttaagcccagtctgaggtttctacgctgcctttgaccatttagtttccggttcaaagacacacaacttctgttatttacaataagcattaaacaggacaagagctgggcagatatctaccctctatgttattaaaatctattttctatcgataactccgagttattaattactgtgtttcatctgggctgctcttaacacccaactgaccagccttcaaggccatgttttcttgactccaaactcatggtgactttttcttcttcctcaccctcctctcccttggggtcctctcctgattcctccaggcccaggaaccctaaaacctgcttgtgtctcttctgcccaactattggctgttgccatctttatttaccaaccagaaataacttgaaggcaaggtcacatactgtcacttgagactccattcagactttgttgtctctggggcaaccaagtcttggggtccctcccttaccattataatacacagcaaaagaccagatctcaacagttgatggtcatggtggtttatgcctgtgattgcagcactccaagtaatttaggcagggctactgtaacgttaaggccagcctgggtgatggtggaataccttgcctgtcagtcagcattgcctgacagcacatgcttttgatcccaacattcagcaaaaggaggctgatctcttaagagacaaaccagggctacacagagaacctatctttaggaaaaataataaatgacctttttctgactgactttctgcagaagagagtctgccccatggctatgtatgtgcaccaataaacacagtcccttctgctaaagggggcagatatatatatatgggggtggggaactagagagatgactaagcaccaggcagttagcttgctcttacagaggacctggtttctgttcccagcaccacacggctgtaactcagttccagaggattggacactcccccgctttattgggtatgaacatactgcacagacataaatgtttgcagaacacccaacacataaaaagtaaatttgcacacgcctttaatcccagtacttgagagacaaagaacaggcagatctctgtggattcaagggcagcctagtctacttagcaggtgtgtgttcagctaaggctacataatgagaccctgtctgataagtaagataaaaagaaataataaaaataaaccttgccaggcagtggtggtgcacgtctttaatcccagcacttgggaggcagaggcaggtggatttctgagttccaggccagcctggtttacagagtgagtttcacgacagccagagctacacagagaaaccctgtccagatgaaacataggaagtaataactcaagagttatcgatagaaaatagattttaataacatagagggtagatatctgcccagctcttgtcctgtttaatgcttattgtaaataacagaagttgtgtgtctttgaaccggaaactaaatggtcaaaggcagcgtagaaaccccagactgggcttaagaatttctacaacaaccaacttttgttgttttaaccaggatttataagaaaaaccaaaaaaattaaaaagaaaaaagaaaatacaccttaaactcaaaaaaaaaaaaaaaaaagcaaaccccttagctttcatttttgccacatcacacagccagtctcttgtcgacttttgtgtgaccacccttctcttaagtgcttttagtcatggaaattagtttggcaatttcactttgaagatttcaaccttctataatttggggtttttagactttaaagattttgctctcttgtggtttgctttgttttcaacccttctgtactgggaagagctttaccactgggtcttagcccagtcctcctgggacttcagctttgggaatgtatctttcaaagtcatgcttgactgttgcaagccgaggtcctcctcactcagactcctcagtgtgggcaggaggaagatttcacctctgaaaatcactttaaggcctaccctggagcaaggtgtaatggtgcacagctcctggcaacccctctacactgtctgtagtcccagtacttggcagtaggtattcaaggctggccaaggctacagtagcaagaccctgggttttttttttgttgtttttgtttttcgagacagggtttctctgtgtagccttggctgtcctggaactcactctgtagaccaggctggcctcgaactcagaaatccacctgcctctgcctcccaagtgcacctgcctccgcctcccaagtgctgggattaaaggcgtgtatcaccactgcccagcttaagagcctggtgttttaaggccatctttgagactgagtaaggactgctgggctgagtctatctatgaactgccctctacacaggaagcagtcatggcatcataggtccatagcagagctacaccaacccacaaagaacgacaaggacctttcttgccatcaaagtgttttaatagttataaagtgtcttaaagttttctactgaagtaagaccacagtgcttattgccggtcaacacaaggacacccagagccagagatcctgctggctgcccctggggctggattgatgtgtccagaggaacatcaggaaatgatcctcagggaaggcctttcctcctccagggcccgaagctgttcttccacctcatttgtccagtaaatgtcatacaggctgtacacaggcaagcagagaaaagtgagttgaggtgcccaccttcctgacaaccctctgagccccggcagccccagtacttacacgagctgctgaagggtgcagctgggctgtttgaggctctccagcagttgcaggacacctgggccccccatgcagttgttactgaggtccagttccctcaggctgcggttggccagcaggacattggcaaggctgctgcaaccactatttgtcacatcacagtctcccaacctggatggaaagggcagagctgttccccacatccgcgatttagcaggaaggcagcccctccatacttcatgcttccctcaggtggataaaatagaactctagcttcccctgagagggaacggtgcacagcctcagagggcatatccatgtctcttagcaccaggagcctggctaggccaaaagcctgtgcaccaaggccaaactacatcaggatgcacatagaaagtgacacggtagacaggtttccagactgagggagattggggtacaggccaaaggagtaagtgagcaggtctagtacccataccaatcagagggaacttccccgaggtactagagagtacaaggtacatgtaggcccggagacaagaagctgctatggattgattggctccctgaggtatagctggaatttgcagaaccccacctgtaggtgaatatagcaggccccaagcctcataggagagaacccacactcctttcatcaagacttgcagagcatcccacaaccaagatgctatttcctggacaggagagactccaggctgttagccctgtggtgtcccatccagaatgacaaagtcaggatgtgctgccacagaagggtaaatggtaaaggacaagacattaagagtgacatgatgctctaaaaacttaaaaaaatgagaggagggattggattgtcctcccttaaaacccaaggactgactcctggacttaaaacccaaggactgactcctggactttgtagagagaaaggacaagaaagcacattaataaaaaaagcgctggatgtggtggagcacacctttaatcccagcgctcgggaggcagaggcaggtggatttctgagttcgaggccagcctggtctacaaagtgagttccaggacagccagggctatacagagaaactctgtctcgaaaaaccaaaaaaaaaaaaaaagaagaagaagaaaaaaaaatcacattaattgcccaggccaagacccacataaagacaaatcaataacccagagcacaatgggtagaaaatctcagggctgctcaagagggctgggcttacttgccgccaaatccaacaacctgaatcccatgcctggaaccccacggtagaaaaacaattgcaaattatcttctgacttccacatggtgtatacacatgtgggggtaaatatacacgtggacaaaaatgtaaaataattttaaagtctgccaaagagccaggtgtggtggtgcaggcctttgaatcccagcacttgggaggcagatgcaggcagatctctgtgagctcaaggccaacctggtctacaaaagctagtccaggacagccagggctcagttataccaagaaaccctatcttggaaaaccaaaacatctccctgaaccagaaagaaatgggagaaatagtaccctaggttctacatctagctcactgaccaggatacacaagagtactggaaactcatctaatacagaacgcatgctctgaagctagaacgtgactaaggaaatgagttggaggccagcctgttcacagtgagtactagggctacacagaccccatttcaatggagctctgcttacctctgcagcctacttaccaaagctcacgcagcactgtatctggctggctcagggccttgcaaagctcctggactccctcgtctcccagtgggttgctgctcatttgcagctccaacagagaacggcttttggtcaacacggagcagaagtagggacaggaggcagctgtgaggctacaggtctttatcctgtgggaacagaaaggctggaaccagttcttccaaggagcccttcccttgaaggtccattaaagggacccaggtggctgacacccactcccttccccttcccttccccgcagcatctgtttatctacctcaatctaatgctgtcctcttcctgatcccgtcttccagggtacaccagcatcttccaaacctcactctactctaggctttctgtcttttctgtcctagatataccttagccccactcaggccctcaccacagtgactccagctgacagccaggctctaataggctctcacacagcagccgggcaccctcatccttcagctcattggaagcaaggctgagttccttcaggctctgcttggctctgaggacacggcacaggtccttgcagccctctgcagtgatatcacattcccagagcctgtgggataacaacattattcacgaatgtccctcattccaccatgtcttccatccctatgaaaagagactgggaaccaactcaccacagagtcctgagcttacagctgggaagcagcagtcctgggcacagtgctgcaatgcctgcattacctagcttgttgctgctcaagtccagttcctgtagcgaagctttggaggccacaacatcgcacagatccttgcagttggctgctgtgataccacagttctccagcctggagacataggatacggtaaaaggagaactggtgcctggcccgaccccttagcctctgtggcctagtacatacttgagtgactccagttgacaggcagagtccttcaggccctggcacagaatacggacaccaggttcatggaggtcgttgttgctcaatactagctccttaaagtcagctttcaccctgagcactgaagccaggggctcgcagctggtagctgtgaggttacagtattccaacctgggggcaggcacatcaaaaggattaaggataggtctagaagtgcagtatcagggagacgtaggggtgctggaatcttatttcccagttgcttccttagaccttatctggttattcaggcacagtgaatacctagagctgccaggctcatatggacactagcattgctcagggaaaactgtcactgaaaagagccctaccaacatgagcgaggttctcccagacccagcagataaacaaattcccattggagaagtgtcttcagctcatctgggatcacactggacagaatctagccgaccccaccagcatcagctcctcatctcaggctagggcagctaccagcccttagcaaaggggaggcccttaggtcttaggaatcccctccaaggttctcatctactgtgctgatgtgaagcttcctggctgggctctgggtcatgggttgcaaagagctcagacccggacaaggtatacactcactgaagcttctcaagacggcactgggggtcctgaagtccttcacagagcagcttcaggcctgcgtcccccatagggttatcattgagatgtagctcacgcagggtagacaaagagcgcagcatgccaggcaggatcccacagccagcctccgtcaagccgcagttctgaaggctgaagcacatgccgccagcagcggtcgtgaacaggttcctatcacatctcgcagggttaggtactgcttctctagatgggcctccagaccaaaggaggccagtatggctcagccagacttttactagggactgggaccgggaacaatgccataatatagcctgtcccagcactacacaattcactgatgtcctggctaaagctgcggtgcctatcactacaagctgtccacacctccccaacctctcagtggcttttgacatcacagctgcctgtctgccccaagttctgccctggataggctgggctgagcccctgggcttacctcagcttctggatcttacaagtgggattctgcaggccctggagcaccagacccacaccgccatcacccagttcattggtgcgaaggctgagctctgtcagggcagggttggcttggactgctgagctgatgtctttgcaccgcacttcagtgaggccacagtcatccagcctgcaaacagtactgtgtcagcacggcgctggcctcagacccaaccgtcagtctcacaaaacagctggaagacccatccagagccgaggaattcaaatatgggttataactacaatgcttaaacttgaaacaggctccaagtcagcctgggctacatgtggaagaaagctgtctcaaaagcaagagctggaattgcctgcctagcttgtacaaagctccagcacttcgaggtggggtggccagggtaggagtggatgttgacagtatgcagaggaactcagacctggtcagagctgcagcagcatgagtacataatgaatcatagcagaggatgactcagtcacgaccacatggggccaccgtacacccagaacaccatgtgactgaccacacctagagtgtgtccatactctccgaaaagcacatgaccaccgtgaaaatcactgactagccagggtatctagactcaaaactcaggttacaagaggaagtggaactctgcagaagggtctaatgagatgatcagtaaagtcatgtgggatcctcagcgatcagaatgggggaaagtcacagggcaaatctgggaatctatgtctgcctagaatgccaggcagcatggcaaaatgggagatggttataggaagctgatggagggctgagggtgcctaaataaccctctgactctgctacgaacctaaaactgtctcaggaaagatgaagaagaagcaggcatctatgtgcagcctgtaaacctaagtccccaagcactgtaacggacgagtaaggagggttgcaactccttttctcagccagaaggaaaagctgagcaataagggttggaaatgc

SEQ ID NO: 993 - DNA, 1422 bp, Mus musculus
atgcggaggggcgagcgcagagtcgccggaggctcgggatctgagtctccgctgctcaagggccgccgcagcaccgagtctgaagtctacgacgatggcactaacaccttcttttggcgtgcccacactttaactgtgctgttcatcctcacctgtgcgctgggctacgtgactctcctagaagaaacccctcaggatacagcctacaacaccaagagaggtattgtggccagtattttggttttcttatgttttggagtcacacaagctaaagacgggccattttccagacctcatccagcttactggcggttttggctgtgtgttagtgtggtctacgaattgtttctcatcttcatccttttccagacagtccaggatggccgacagtttctgaagtatgtggatcccaggctgggagtcccattgccagagagggactacgggggcaactgcctcatctatgatgctgacaacaagactgaccctttccacaacatctgggacaagctggatggctttgttcctgcacacttcattggctggtatctgaagacgctcatgatccgtgactggtggatgtgcatgatcatcagtgtgatgttcgagttcctggagtacagcctggagcaccagctgcccaacttcagcgagtgctggtgggaccattggatcatggacgtcctcgtctgcaacgggctgggcatctactgtggcatgaagaccctcgagtggctgtccctgaagacatataagtggcagggcctctggaacattccaacctacaagggcaagatgaagaggattgcctttcagttcacgccttacagctgggtacgctttgagtggaagccagcctccagcctgcaccgctggctggccgtgtgtggcatcatcctggtgttcctgctggcagagctgaacaccttctacctgaagtttgtgctatggatgccccctgaacactacctggtccttctgaggctggtcttcttcgtgaacgtgggtggtgtggccatgcgtgagatctacgacttcatggatgaattgaagccccacaggaagctgggccagcaggcctggctggtggcagccatcacagtcacagagcttctcatcgtggtgaagtatgacccgcacacactcaccctgtcactgcccttctacatctcccagtgctggactcttggctccatcctggtgcttacatggactgtctggcgcttcttcctgcgggacatcaccatgaggtacaaggagacccggcgacagaagcagcagagtcaccaggccagagccgtcaacaaccgggatgggcaccctgggccagatgatgacctgctagggactggaactgcagaagaagaggggaccaccaatgacggtgtgactgctgaggaggggacctcagccgcgtcatga

SEQ ID NO: 994 - protein, 473 aa, Mus musculus
MRRGERRVAGGSGSESPLLKGRRSTESEVYDDGTNTFFWRAHTLTVLFILTCALGYVTLLEETPQDTAYNTKRGIVASILVFLCFGVTQAKDGPFSRPHPAYWRFWLCVSVVYELFLIFILFQTVQDGRQFLKYVDPRLGVPLPERDYGGNCLIYDADNKTDPFHNIWDKLDGFVPAHFIGWYLKTLMIRDWWMCMIISVMFEFLEYSLEHQLPNFSECWWDHWIMDVLVCNGLGIYCGMKTLEWLSLKTYKWQGLWNIPTYKGKMKRIAFQFTPYSWVRFEWKPASSLHRWLAVCGIILVFLLAELNTFYLKFVLWMPPEHYLVLLRLVFFVNVGGVAMREIYDFMDELKPHRKLGQQAWLVAAITVTELLIVVKYDPHTLTLSLPFYISQCWTLGSILVLTWTVWRFFLRDITMRYKETRRQKQQSHQARAVNNRDGHPGPDDDLLGTGTAEEEGTTNDGVTAEEGTSAAS

SEQ ID NO: 995 - DNA, 63660 bp, Homo sapiens
  misc_feature (1)...(63660): n = A,T,C or G
tcctcttgcctcagcttccggagtagccgggaccacaggcatgcgccaccaggcccggctgcaactgtcttttttgaaggactgatgctctcacttccaacaaaccaggtgctgcttctcccaacccaacccctggccagccccaagtctctcctctaacccccagcatgggaggaaggggctggcagaggggaccctgagctcaggctaaggggcatcaggtgctgggctgagcagccagggtgtcagacctggatgtggagggccgaggagagccctgggcggagatggagcaagaggccgccggcgcagcccacacgtggaggccctggcaggccgagagggaggctggtttcactccacacctcaccactgcctcctccctgggccgaccaggtgctgacctgcccaggtgttggccctggccccaggtgacctcttcactggcagaggggagaaaggatgtctttctacgtgttcacctgcactccctcccccagaatcggaatccagcagcagcagtcagcgcccacccccagaatcggaatccagcagcagcagtcggcccccacctgtgctgggcggggtccttggggagcagagagcccacagcccgccggccactctgcagctcccaaccctggggcagcctgcctggtgcccacagcccgctcccccttaggggccagctgcaaggcaaagctgccaggtctggggtcctcagcagcagcccccgcctcggtgggcaggccctctccatctcgtgttcaggactctggtagaggttcctggccccacacactagctgagagcccagccctggtgccctcagaatcccgggctggagggaggaacgccgcccgcctccagcacttccaacccccagcgtgccccaggagtccaggaggcagcttagctgagccgggcggtcaccctcgcctgaccgggcagcctgcagggaccccccccacacacacaggcgccttccaggtggggctggcggggggctggggccgggggccccaggtgtgggcgtggctgggggccttgaaggtgtggacccttttgagcgcaggactcacctgcatgctggctgtggccggagttccagctggggtttggcggccaggagagtggctgccagcggcgggtgctcctacctgacttccgcgtggggctcgcccctccctcctcctcctccagcgtcctgcagctgccgcgcctgggtgtagtcggggcggagccagcatccaggccaggagagtaccccagcccctggagcctgggacaccttcctggagcccagatggcgggtcaggggccagaggggaattcctaggctggagttcccgggaagggggtttccactgtgagatgggtctcatgacacctggtcctagggggaagcaggatggcacagagcccctgacagagccagcaccaacgcccccacttgccttgcctctctcacccccgctcacacatccccatgttccctccaaaagcatcccaccccaggccatnnnnnnnnnnnnnnnnnnnnnnnnnnnnnnnnnnnnnnnnnnnnnnnnnnnnnnnnnnnnnnnnnnnnnnnnnnnnnnnnnnnnnnnnnnnnnnnnnnnnnnnnnnnnnnnnnnnnnnnnnnnnnnnnnnnnnnnnnnnnnnnnnnnnnnnnnnnnnnnnnnnnnnnnnnnnnnnnnnnnnnnnnnnnnnnnnnnnnnnnnnnnnnnnnnnnnnnnnnnnnnnnnnnnnnnnnnnnnnnnnnnnnnnnnnnnnnnnnnnnnnnnnnnnnnnnnnnnnnnnnnnnnnnnnnnnnnnnnnnnnnnnnnnnnnnnnnnnnnnnnnnnnnnnnnnnnnnnnnnnnnnnnnnnnnnnnnnnnnnnnnnnnnnnnnnnnnnnnnnnnnnnnnnnnnnnnnnnnnnnnnnnnnnnnnnnnnnnnnnnnnnnnnnnnnnnnnnnnnnnnnnnnnnnnnnnnnnnnnnnnnnnnnnnnnnnnnnnnnnnnnnnnnnnnnnnnnnnnnnnnnnnnnnnnnnnnnnnnnnnnnnnnnnnnnnnnnnnnnnnnnnnnnnnnnnnnnnnnnnnnnnnnnnnnnnnnnnnnnnnnnnnnnnnnnnnnnnnnnnnnnnnnnnnnnnnnnnnnnnnnnnnnnnnnnnnnnnnnnnnnnnnnnnnnnnnnnnnnnnnnnnnnnnnnnnnnnnnnnnnnnnnnnnnnnnnnnnnnnnnnnnnnnnnnnnnnnnnnnnnnnnnnnnnnnnnnnnnnnnnnnnnnnnnnnnnnnnnnnnnnnnnnnnnnnnnnnnnnnnnnnnnnnnnnnnnnnnnnnnnnnnnnnnnnnnnnnnnnnnnnnnnnnnnnnnnnnnnnnnnnnnnnnnnnnnnnnnnnnnnnnnnnnnnnnnnnnnnnnnnnnnnnnnnnnnnnnnnnnnnnnnnnnnnnnnnnnnnnnnnnnnnnnnnnnnnnnnnnnnnnnnnnnnnnnnnnnnnnnnnnnnnnnnnnnnnnnnnnnnnnnnnnnnnnnnnnnnnnnnnnnnnnnnnnnnnnnnnnnnnnnnnnnnnnnnnnnnnnnnnnnnnnnnnnnnnnnnnnnnnnnnnnnnnnnnnnnnnnnnnnnnnnnnnnnnnnnnnnnnnnnnnnnnnnnnnnnnnnnnnnnnnnnnnnnnnnnnnnnnnnnnnnnnnnnnnnnnnnnnnnnnnnnnnnnnnnnnnnnnnnnnnnnnnnnnnnnnnnnnnnnnnnnnnnnnnnnnnnnnnnnnnnnnnnnnnnnnnnnnnnnnnnnnnnnnnnnnnnnnnnnnnnnnnnnnnnnnnnnnnnnnnnnnnnnnnnnnnnnnnnnnnnnnnnnnnnnnnnnnnnnnnnnnnnnnnnnnnnnnnnnnnnnnnnnnnnnnnnnnnnnnnnnnnnnnnnnnnnnnnnnnnnnnnnnnnnnnnnnnnnnnnnnnnnnnnnnnnnnnnnnnnnnnnnnnnnnnnnnnnnnnnnnnnnnnnnnnnnnnnnnnnnnnnnnnnnnnnnnnnnnnnnnnnnnnnnnnnnnnnnnnnnnnnnnnnnnnnnnnnnnnnnnnnnnnnnnnnnnnnnnnnnnnnnnnnnnnnnnnnnnnnnnnnnnnnnnnnnnnnnnnnnnnnnnnnnnnnnnnnnnnnnnnnnnnnnnnnnnnnnnnnnnnnnnnnnnnnnnnnnnnnnnnnnnnnnnnnnnnnnnnnnnnnnnnnnnnnnnnnnnnnnnnnnnnnnnnnnnnnnnnnnnnnnnnnnnnnnnnnnnnnnnnnnnnnnnnnnnnnnnnnnnnnnnnnnnnnnnnnnnnnnnnnnnnnnnnnnnnnnnnnnnnnnnnnnnnnnnnnnnnnnnnnnnnnnnnnnnnnnnnnnnnnnnnnnnnnnnnnnnnnnnnnnnnnnnnnnnnnnnnnnnnnnnnnnnnnnnnnnnnnnnnnnnnnnnnnnnnnnnnnnnnnnnnnnnnnnnnnnnnnnnnnnnnnnnnnnnnnnnnnnnnnnnnnnnnnnnnnnnnnnnnnnnnnnnnnnnnnnnnnnnnnnnnnnnnnnnnnnnnnnnnnnnnnnnnnnnnnnnnnnnnnnnnnnnnnnnnnnnnnnnnnnnnnnnnnnnnnnnnnnnnnnnnnnnnnnnnnnnnnnnnnnnnnnnnnnnnnnnnnnnnnnnnnnnnnnnnnnnnnnnnnnnnnnnnnnnnnnnnnnnnnnnnnnnnnnnnnnnnnnnnnnnnnnnnnnnnnnnnnnnnnnnnnnnnnnnnnnnnnnnnnnnnnnnnnnnnnnnnnnnnnnnnnnnnnnnnnnnnnnnnnnnnnnnnnnnnnnnnnnnnnnnnnnnnnnnnnnnnnnnnnnnnnnnnnnnnnnnnnnnnnnnnnnnnnnnnnnnnnnnnnnnnnnnnnnnnnnnnnnnnnnnnnnnnnnnnnnnnnnnnnnnnnnnnnnnnnnnnnnnnnnnnnnnnnnnnnnnnnnnnnnnnnnnnnnnnnnnnnnnnnnnnnnnnnnnnnnnnnnnnnnnnnnnnnnnnnnnnnnnnnnnnnnnnnnnnnnnnnnnnnnnnnnnnnnnnnnnnnnnnnnnnnnnnnnnnnnnnnnnnnnnnnnnnnnnnnnnnnnnnnnnnnnnnnnnnnnnnnnnnnnnnnnnnnnnnnnnnnnnnnnnnnnnnnnnnnnnnnnnnnnnnnnnnnnnnnnnnnnnnnnnnnnnnnnnnnnnnnnnnnnnnnnnnnnnnnnnnnnnnnnnnnnnnnnnnnnnnnnnnnnnnnnnnnnnnnnnnnnnnnnnnnnnnnnnnnnnnnnnnnnnnnnnnnnnnnnnnnnnnnnnnnnnnnnnnnnnnnnnnnnnnnnnnnnnnnnnnnnnnnnnnnnnnnnnnnnnnnnnnnnnnnnnnnnnnnnnnnnnnnnnnnnnnnnnnnnnnnnnnnnnnnnnnnnnnnnnnnnnnnnnnnnnnnnnnnnnnnnnnnnnnnnnnnnnnnnnnnnnnnnnnnnnnnnnnnnnnnnnnnnnnnnnnnnnnnnnnnnnnnnnnnnnnnnnnnnnnnnnnnnnnnnnnnnnnnnnnnnnnnnnnnnnnnnnnnnnnnnnnnnnnnnnnnnnnnnnnnnnnnnnnnnnnnnnnnnnnnnnnnnnnnnnnnnnnnnnnnnnnnnnnnnnnnnnnnnnnnnnnnnnnnnnnnnnnnnnnnnnnnnnnnnnnnnnnnnnnnnnnnnnnnnnnnnnnnnnnnnnnnnnnnnnnnnnnnnnnnnnnnnnnnnnnnnnnnnnnnnnnnnnnnnnnnnnnnnnnnnnnnnnnnnnnnnnnnnnnnnnnnnnnnnnnnnnnnnnnnnnnnnnnnnnnnnnnnnnnnnnnnnnnnnnnnnnnnnnnnnnnnnnnnnnnnnnnnnnnnnnnnnnnnnnnnnnnnnnnnnnnnnnnnnnnnnnnnnnnnnnnnnnnnnnnnnnnnnnnnnnnnnnnnnnnnnnnnnnnnnnnnnnnnnnnnnnnnnnnnnnnnnnnnnnnnnnnnnnnnnnnnnnnnnnnnnnnnnnnnnnnnnnnnnnnnnnnnnnnnnnnnnnnnnnnnnnnnnnnnnnnnnnnnnnnnnnnnnnnnnnnnnnnnnnnnnnnnnnnnnnnnnnnnnnnnnnnnnnnnnnnnnnnnnnnnnnnnnnnnnnnnnnnnnnnnnnnnnnnnnnnnnnnnnnnnnnnnnnnnnnnnnnnnnnnnnnnnnnnnnnnnnnnnnnnnnnnnnnnnnnnnnnnnnnnnnnnnnnnnnnnnnnnnnnnnnnnnnnnnnnnnnnnnnnnnnnnnnnnnnnnnnnnnnnnnnnnnnnnnnnnnnnnnnnnnnnnnnnnnnnnnnnnnnnnnnnnnnnnnnnnnnnnnnnnnnnnnnnnnnnnnnnnnnnnnnnnnnnnnnnnnnnnnnnnnnnnnnnnnnnnnnnnnnnnnnnnnnnnnnnnnnnnnnnnnnnnnnnnnnnnnnnnnnnnnnnnnnnnnnnnnnnnnnnnnnnnnnnnnnnnnnnnnnnnnnnnnnnnnnnnnnnnnnnnnnnnnnnnnnnnnnnnnnnnnnnnnnnnnnnnnnnnnnnnnnnnnnnnnnnnnnnnnnnnnnnnnnnnnnnnnnnnnnnnnnnnnnnnnnnnnnnnnnnnnnnnnnnnnnnnnnnnnnnnnnnnnnnnnnnnnnnnnnnnnnnnnnnnnnnnnnnnnnnnnnnnnnnnnnnnnnnnnnnnnnnnnnnnnnnnnnnnnnnnnnnnnnnnnnnnnnnnnnnnnnnnnnnnnnnnnnnnnnnnnnnnnnnnnnnnnnnnnnnnnnnnnnnnnnnnnnnnnnnnnnnnnnnnnnnnnnnnnnnnnnnnnnnnnnnnnnnnnnnnnnnnnnnnnnnnnnnnnnnnnnnnnnnnnnnnnnnnnnnnnnnnnnnnnnnnnnnnnnnnnnnnnnnnnnnnnnnnnnnnnnnnnnnnnnnnnnnnnnnnnnnnnnnnnnnnnnnnnnnnnnnnnnnnnnnnnnnnnnnnnnnnnnnnnnnnnnnnnnnnnnnnnnnnnnnnnnnnnnnnnnnnnnnnnnnnnnnnnnnnnnnnnnnnnnnnnnnnnnnnnnnnnnnnnnnnnnnnnnnnnnnnnnnnnnnnnnnnnnnnnnnnnnnnnnnnnnnnnnnnnnnnnnnnnnnnnnnnnnnnnnnnnnnnnnnnnnnnnnnnnnnnnnnnnnnnnnnnnnnnnnnnnnnnnnnnnnnnnnnnnnnnnnnnnnnnnnnnnnnnnnnnnnnnnnnnnnnnnnnnnnnnnnnnnnnnnnnnnnnnnnnnnnnnnnnnnnnnnnnnnnnnnnnnnnnnnnnnnnnnnnnnnnnnnnnnnnnnnnnnnnnnnnnnnnnnnnnnnnnnnnnnnnnnnnnnnnnnnnnnnnnnnnnnnnnnnnnnnnnnnnnnnnnnnnnnnnnnnnnnnnnnnnnnnnnnnnnnnnnnnnnnnnnnnnnnnnnnnnnnnnnnnnnnnnnnnnnnnnnnnnnnnnnnnnnnnnnnnnnnnnnnnnnnnnnnnnnnnnnnnnnnnnnnnnnnnnnnnnnnnnnnnnnnnnnnnnnnnnnnnnnnnnnnnnnnnnnnnnnnnnnnnnnnnnnnnnnnnnnnnnnnnnnnnnnnnnnnnnnnnnnnnnnnnnnnnnnnnnnnnnnnnnnnnnnnnnnnnnnnnnnnnnnnnnnnnnnnnnnnnnnnnnnnnnnnnnnnnnnnnnnnnnnnnnnnnnnnnnnnnnnnnnnnnnnnnnnnnnnnnnnnnnnnnnnnnnnnnnnnnnnnnnnnnnnnnnnnnnnnnnnnnnnnnnnnnnnnnnnnnnnnnnnnnnnnnnnnnnnnnnnnnnnnnnnnnnnnnnnnnnnnnnnnnnnnnnnnnnnnnnnnnnnnnnnnnnnnnnnnnnnnnnnnnnnnnnnnnnnnnnnnnnnnnnnnnnnnnnnnnnnnnnnnnnnnnnnnnnnnnnnnnnnnnnnnnnnnnnnnnnnnnnnnnnnnnnnnnnnnnnnnnnnnnnnnnnnnnnnnnnnnnnnnnnnnnnnnnnnnnnnnnnnnnnnnnnnnnnnnnnnnnnnnnnnnnnnnnnnnnnnnnnnnnnnnnnnnnnnnnnnnnnnnnnnnnnnnnnnnnnnnnnnnnnnnnnnnnnnnnnnnnnnnnnnnnnnnnnnnnnnnnnnnnnnnnnnnnnnnnnnnnnnnnnnnnnnnnnnnnnnnnnnnnnnnnnnnnnnnnnnnnnnnnnnnnnnnnnnnnnnnnnnnnnnnnnnnnnnnnnnnnnnnnnnnnnnnnnnnnnnnnnnnnnnnnnnnnnnnnnnnnnnnnnnnnnnnnnnnnnnnnnnnnnnnnnnnnnnnnnnnnnnnnnnnnnnnnnnnnnnnnnnnnnnnnnnnnnnnnnnnnnnnnnnnnnnnnnnnnnnnnnnnnnnnnnnnnnnnnnnnnnnnnnnnnnnnnnnnnnnnnnnnnnnnnnnnnnnnnnnnnnnnnnnnnnnnnnnnnnnnnnnnnnnnnnnnnnnnnnnnnnnnnnnnnnnnnnnnnnnnnnnnnnnnnnnnnnnnnnnnnnnnnnnnnnnnnnnnnnnnnnnnnnnnnnnnnnnnnnnnnnnnnnnnnnnnnnnnnnnnnnnnnnnnnnnnnnnnnnnnnnnnnnnnnnnnnnnnnnnnnnnnnnnnnnnnnnnnncgggcgtgatggcgggcgcctttaatcccagctactccggagctgaggcaggagaatcgcttgaacccgagaggcggaggttgcagtgagccgagatcacgccactgcactccaggcctgggtgacagagtgagactacgcttaaaaaaaaaaaaatcacaatagttagcatttacaaagcgttgggaattctacttggcacgtggccagagctccgtagtgatgggcaacgaacacgtggtctgcgcgcccggggccgcgcggtctggcggggccgcgcggtctagatcacgctactccgggtcccaaggccccgccctcaggccccgcccacagaccatgtcctcggccccgcccctcacgcgcccttgggccccgcccccgagccgacaggaacgagcgtcattgcgaggcggcctcgcgcgcagcttccttggggccagggaccccagtggggccggtacatctccccgccccggcctctgcaccctggagggacggcaggagggctctctgtgcagtttgagagaacacccatacgcaggaaatgaccccaacgccaccgagagggcgcctggaatgtgagcgccacctgctgggatgggaagaggtctgggaggggacctgaaggatggttcacagggaaccaggcctgtcgggtgattgctggaaagatggcatggacgggagctggctgctctggccactcagccgaccccagctggacgcggccagggcctggggcagggggccaggcctggggaggcccaacagcacgccccctggagccagcgcctcccgcactgcccagcctgtgtgtcaggagctggggtgaaggtcccatcacagtcaggccccatccctgctgggcgtggctgtgcaggagccccgcaaatatgtttatatatttagtatgtgagttatatttcaataaagctgatatgagatatacttcacatatcatgcagttcacccattcaactcgtttcgagtggacagttgagtggtttttaggacattcacagataggagctgaggtcaatattacagcactttcatcgccccgaaagaaacctgctaccctttgtagtcgctccttattaccccttccccagcccccggtgaaaactcatctaatttctgtcttcatagatttgcatttcctggacatttcatacaaatggatcacataatgcgtagtctcctgtgactggcttctttcacctagcattttttttttttttttttgagacggagtctcgctctgtcgcccaggatggagtgcagtggcacaatctcggctcactgcaacctccacctcccggatttaagggattctcccacctcagcctcccgagtagctaggattacaagcgcccgccacaatgccagggcaatttttgtatttttagtaaagatggggtgtcaccactttgcctaggctggtctcgaactcctgacctcaagtcatccgcccgccttggcctcccaaagtgctgggatgacaggcgtgcgccgccgcgcccggcctgcctagcataatgttttcaaggtccagctgtgctgtagcatgcgcatgcttcgctcctctatggctaataacatgccgctattatcaaaatgctgcaactaggagcgctagtgtgtaaatttggcgtggacacttgtttccaggtttgaggagctgccacattgcttttcagagtggctcaggagctaatttttttgcagggtaccatgtcaacaatttgggtcaactaaaatcagcgtgtccgcaccattttcgcccgcccaatttcacgcgatcctgcgaaagaatgacccagaccggtccgggcgcggtggctcgcgcctgtaatcccagcactttgggaggccgaggcggcagatcacaaggtcaggagttcgagattggcctggccaacatagtgaaaccccgtctctactaaaaatacaaaaattagccgggcgtggtggcgggcgcctgtaatcccagctactcgggaagcttgagacagaagaatcgtttgaatccgagaggcggaggttgcagtgagccgggatcgcgccattgcactccagctcgggcggcagtgcgagactccgtctcaaaaaggaatgacccgggtcgcatggggtgaagggtcgggaagcgccccaaaaggagaacggggctgggctccgggatccgtcggcgaggaaggggcgaaggggtggagggactcgggccaggccgccggggatgtctgtggttacctccaagctctggaggccttggcgagacccgcgccatccgcagcttggttcctgcgacctcagccgcagggcggtccggctccggtttcccagcaaccaggcgtcatccttcccagcaagcactgcgtccaacccgcgacgtcggaccacaaggcccagcatgccccgcgcggactacaagccccacaatgcaccgcacaccctttactggccggccccgcgctgctctcctaagaccccgcgggccagcgccgcgaccccttcccagcgctcctcgcgctgtgtgcggcgcgtcctctcgccggtgacccggtgtgcgtggggtcgaggcgccgggcggagtggctccgggccgaaacgccatgcggaggggcgagcgcagggacgccggaggtccgcggcccgagtccccggtgcccgcgggcagggcctcgctggaggagccgcctgacgggccgtctgccggccaagccaccgggccgggcgagggccgccgcagcaccgagtccgaggtctacgacgacggcaccaacaccttcttctggtgagggcagtgggcggccgcggggcggcgagggtgccctcgacctgggggttccggcaccgctggcctgggggtccccggcagcgccctctcgccgtcttggagtccaggactgtggccgggggtttgagggtgtggcagcaccgccccccgggtcccggggagcggccggaccgagctcccgacgccgggtcgggcggagggcggcgctgtaggtgggggagaccctgggcagaccctccctgcggccgctttgcgtctctctcgccgccctccccacccctgcccgccttggctctgaccgcgcggttctgcgatccagaccccttccccgccacccgcctccagcgtcaccccagaaacgctttctctgtcctgctgtcgaagcttcacctgtgtcccccgtcattctgcctgtggttgctcctcagtgcttgcggctgcacgaaatcatcttgtgtgtcgcgcccgaccccacgtggcgatcgtgttgattagcagagtgttgtgcgtgcttcaggaatgtagtcggtgttcgtcgaatccaggctctgtttctctcctcagttgcccctagcggggccagcgcctcctccctgcacaactcagccctagctacaccttggggtccccctgtccgccactctgcctttaatgggggtggaaaaggaagaggcccccgggagcagctggagtgtggcactctgtgtccagacaggctccaggtgccgctcctactcccgacagctgcgaccctgggctggccctttgccgatgctcctctgtgagaaggatcaagccgtcgacctgaaagcaggcttcgtgagaggagggtttggctcttcttgactgcaaggtgcccagttcccatcctgtggaaggcccgggggcacaggggcagtagaggtggggtcagccccaggaaaacgtgtgggagacaggcgcctgcggccagcagtggaaggaaggctttatggacgcttccaagagaaccatgctgtgggatggtcggagagcaaatctgaggggcgaggagggcctgatggaggagtaagggacttgtcaggggaaggcgccaccacagacagggacttaaccggtcctggcctgtcaccgcagccgaagctctggagagagactgtccaagtggtgggaaagcaggttagggtggaggaggccccacgcagggtcttccgtgaggtgtgggcagctgctgttgcagggagggcatccgagctctcctttggggagatgagtgtaccgggtggctgcggggccctcgggagggagaggagatggggtgcctgccacgtggaccctctggcttccgggccctgtggacatcaggcctctccatcaggtgccctgccacaccccttcaggctgtcctcccgcagcacagctggggaccaccggagtctctgaggtcctggagcaaggagaccagactggctcttctgaggtcccggagcaagaagaccagacgggctcctctgacatcccggagcaaggagaacagacgggctcctctgaggtcccggagcgaggagaccagactggctcttcttgtttctcatttggccgttcagcacattgtggggacccctactgcctgtcagttaccgttctacgggacatagcagagaactaaacaagaagcttagattctggtgcaggcatggaacttcagaaggctcaaaatgtgctggctgggtgctgagtgtggcaggagccagggggcacatgcaagcctgcgcagcccacccagtaccagggaagcaggagcagcagcccaaaggtaggagggggccggtctctttagaagcccagaccagtggtccctgcccacaaggggtgtttgggacacagacggctgggcgcagcagagcttgcctgtcaggaggccaagggggtcaggagggctctccaggagcgggtgcagcggggctggctggtccaggtacctccttcctgggtcttctgggtgggtggctctggctctggctttcccctcgaccctgtccctgtagagacgcatggggcaggttcttgctgtgcctcctcccttccctgtgcagaggaaggagcttcacgcttctgggtggcaggtaactcaatgcctgcctggtgagaattcattacctgcagagcctcacactgacctcctgagtccacctgcactgacttgctgtgctggcatttttttaactctaattttgtgttttagagagttttactttttattttttattcatttttatttatttatttatttttaatagagggtccccctgtgttgcccaggctggtcttcaactcctggcctcaagtgatccttccgcctcagcctcccagattgctgagattacaggcatgcaccaccacatccagccagggcgttcattttcaaggatgggtgcacttcctcgggccagtgacggcggccatgtgtgaattttgtttctctgtgactgcttgtcagccatagggatagggcgtgcggttcgattcagggcttgactggccctgggagcacgaggctgagctctccttctctggattcattcagggtagcaaggacaattatggggaacatccagaggaaaacgtttagatccacagactccgagaagccctgtgcgaagatgtggcagctcatgcggtctggaaattgtttgggagaacacttggggaccccttaccctggcgaggtgcctgtgaacgttgccgcctgtctgtgggagacgctgaagcagcttcggatgaccacacttgctaaccagttcccgagctgggggccactgtgatgttctgagagtttttattgtatgcttgtgtcttggaatggggtgcctcaaatgagccttctcagtgacctgaggactttatgtgtgaggtgacctctgaccttcagataccccaggtttctggaagatgcctttctccatcatcctggatcggggctttcccagctttgcctacacctgggaggcgcgagtagccagatgaagtctttctggtcttgctggtcagagccagaagggccagtgcccggtccaggagcctctcgcaggccttgggctgcccatccaggcgtggcctttccttggccctttggacgacgacgccgcgttttcctcttggtctcggcctccctgcccaccatgagagtggacatgagagtgaccatctccaaggaggcagctgggtcttttccactccccatggcagggagccagctgtcttcacgccctcaccctagtgaagtggctgaattgccaggattgatcacagctctgttctgtgtctgatcacaggacatacaccgtcctgcagagtctgcaggcgggtgggaggagccattgaacagacctggcgtcctgggagggacacggaattcttcccttgagagtctcatgctatcttgagcggcactctgtcacttccaagatgtgtagacgtcgtgctgcgtgtaggacaaggactggagctcactaatacggaccttactttccaggagcgttggatttgagcagctctgagatgtgtcctcctgcagggctgctgtgcctggtgccctttctctgggtcccttaccctctgcctcccttcctgttgggtcctcttcattcccatttctgcttccccagggccaggagggtgctgggcactcggtggccacctcaatgacagtgtgcacatttacctgaaggggcgaagggttacctttatatttcaggtaatctctgtgttttggggaaatggaaagatggtgttgggttagggttgatcaatgatcagcgtttccctgggctacacaaggagtgagtgttgggttggtggccactttagaaaccacaggaaggtctctgtcgtggaaagtcgtattaaaggagtcaagttttacgcctgtaatcccagcactttgggaggccgaggcaggtggatcacgaggtcaggagtttaagaccagcctggccaatatggtgaaacccggtctctactaaaaatacaaaaattagctgggtgtggtggcgggcgcctgtaatcccagctgctcgggaggctgaggcaggagaatcgcttgaacctgggaggcagagatcgcgccagtgtcctccagcctgggtgacagagcaagactccatctcaaaaagaaaaaaagaagtcaagtttcaattttaacttgtgttagtgtgtgatcctgtctttgtgtgctgtggaacttggtgctggtgggacacaggctgctcaccccatcccttgagctttgcgtttattcctgggattctgcatgtgaatgggagcctgtgctgtatctgggagatgctgactgggttgcaggcacgtccgagggtcagggtggggccgagtgcagcctcctcctccagtgggcctgtgtgtggagtggtggcattctgggtgtccctgaggcctggtcgtttccatcttcttcctgagcccacatggagatgacgaggggtttcctgctggtctcttgcagaacagggttgagtggtgtcctcacgttgatctagcttctgggtctcccattctgcatgtgagcaggttgatgggctgttgtctcttccacggttagcctcccttaggctggggctccttcacccctcttttcttagagacattactgcccagagtgagaacccctcacgtggggtggccgtgtggttccaagacagggtcctgtggaggccctgttagcttccccactggaggcctccctcacagcaggctcctgtcccggcatctgcactccagccaggcagagtcctgctcccgtgcacaccacaccctgtctgtctgtgctgtgggcccttggcggggttctgggtgtctggagccccttgaccttgttcctcctacaaggtgacctcgtcaggaagccccaggatgagactgtccctggctcctccaaaggtcacttcagacatgtgcaccctttggagaggtccctgctgtttctcagaactgctggggatggaggctgagcccgagagtgcttgctcctcgcgctcccttcttgctatggtctccggagatgcctcccaggccacgagccctcctggcgtggttttactgggacctggctttgcaacaaaaatagttgttttaacctccctaaccactcccatccctcttttgtttttctctataacgtgtagggtttcttagctctcctgtattggtctcactccactggaaggaaggctcaggaacgcaggctgtgtcttctcccgggtgtggctggggcgggggctcagggaatggctgtgatggcccagtgtccaggaggctccgggccccaccccccgccttgctgcatgaccttcacagtgtcacttaccggccctgacttgcctgcgggcaccacgcacacggcatgaaggtgccctggcccggggcacggacacagccagagccaccgcgctcctggctgtcatcacgtcgttggctttgcgatctaaacctgcttgttgttttggtttttctttctttctgttttctttcattctttttttttttttttttttgagacagaatctcactctgtcacccaggctggagtgcagggatgtgatctcagcttactgcggtccccgactcctgggccgaagtaatctcccctcaccctccctcttcccaagtagctgggaccagacatgcgccaccacatccagttaatttttttttttttttggtagaaatagggtctcactatgtttcccgagctggtctccaactcctgggctcaagtgatcctcctgcctcagcctcccaaagctctggaattacaggtgtgagccacggtacctgcccccaaacactcctgactcttcttatcctaaccggggtcatcttactctcctcaccgaaatctgatgtcacctgtatggaggaaagggtgggcctcatggaggggcaggccagggacaaggggactcctgggccccagctgagcccagcccgtttcccctcaagggctgtctccaggaggacacgttctgtaagtgtagtgttcagcagagggtgagtttctgggtcgccgaatccaggcacccttaggaatgggggcctaagagggccttctgacgtgggttctctgctgtgattgtgggcaggtctctcagtactgaagggccccacggtgtggagctcagcaggaaggctgaggttccctgcggtttcctcatggcttaggactcaaatgcaaatgtatctaaagaaaaaggtggttgatagtcacaatgaaacttttatttacctctggttgtcttaaatgcctagtattgtaaaatatggcagaagaattcactttcatgcctgtaatcccaacactttgggaggccaaggtgggcagatcccttgagttcatgagtttgagaccagcctggaaaacatggcaagaccccgtctctacaaaaaatacaaaaaaatccaacctgacccacatggcaagaccccatctgcacaaaaaatacagaaagttccagcctggagcctccacctgcagtcctgcagctccaccctggctcttcatgaaatcggctaagtccaggtgtgggtgcgttcagtgcagcacccacgtgcaggtgacacgcccatgcaccgccacaaccacgctcacaccagaacattccatcatccggaaggcccgtgtctccgctccagtctgcttttcgtggatgcaaactcatttccttgagtcgtgtgtgggtgacagcagatgggaggtttcttttgtgcctggcgtctgtagcgtgtttttctttttctttttttatcttttgagacgggatctcacgatgttcatgatgttgccccggctggtcttgagctcctggcccaaaacagtcctcctgcctgggcctcccaaggggcgtgtctttgagatctatccacgttgaggtcgttgccagcagcacattcctctgagtgctgagccatgctccgctggtcggagggaccacagtgtttcctccactgatagagttttggtttgtttcccgttttaggttattatacctgaaacatctgcatgtaagtctttgactggacctgtgttttcatctgtctcaggcccacgtttgggagtgtgtctttgactggacctgtgttttcatctgtctcaggcccacgtttgggagtatgtggctggctggatagcagacgtagcataggcctcacttttctgtgccgttttgcagtcccacctgcagtgcgtgagcatcttgctccgagacctcaccagcactctgcattgtgatgttcttaatttcagccgttccagcagatgtgcactgatgctgtgtcgtggcttggatttgtgatgcttttaatttcagccgttccagcggatgtgtactgatgtgtcctggcttggatttgctttcacggtgaccagtgctgctcctcgtttgttcatgtgcttattggccatttgtatgttttccttgtgaagtgtctgttcaattttttgcctattttttcattaaattgtttattgagctgtatgagttctttataaattctggataaaaagtattttttttcttttttttttttgagattgagtctcgctctgtcgcccaggctggagtgcagtggcgcgatctcggctcactgcaggctccgcctcccgggttcacgccattctcctgcctcagcctcccgagtagctgggactacaggcgcccacccaccacacccggctaattttttgtatttttagtagagatggggtttcaccgtgttagccaggatggtctcgatctcctgacctcgtgatccgcccgcctcggcctcccaaagtgctgggattataggcgtgagccaccgcgcctggcctgatttttttttttttttttttttttgagacagatcttgctctgtctcccaggctagagtgcagtggcacaatcatcctagcgcactgcagcctcaacctgggcttaagcgaatctgccacctcccgagtagctgggactacaggtgcctgccaccacgcctggctaattttttatagagatggggtctcactgtgttacccagtctggtcctgaacgcctgggctcaagcaatcctcttgtctcagcctcccaaagcgttgggactacagacgcgtgcagcctacaaagttttatcagatatatgtattgtgaatattttctcccagtttgtgacttgccttttcatttctttagggcacaaatagtttacatttcatggaggcaagtcctgggcaacatgctttaagtgcattgttcacttaattttcatgatgtccttggaagtcagaagcttccccatttagatatgaggaaactgaggcacggaggggtgcatcatctctccaaggacacactccagtggatgtaggacctgggttagacgtgaggacacactccggtgaatgtaggacctgggttagacgtgaggggacactccggtggatgtcggacctgggttagacgtgaggacacactccggtggatgtcggacctgggttagacgtgaggacacactccggtggatgtcggacctgggttagacgtgaggacacactccggtggatgtcggacctgggttagacgtgaggacacactccggtggatgtcggacctgggttagacgtgaggacacactccggtggatgtcggacctgggttagacgtgaggacacactccggtggatgtaggacctgggttagacgtgaggacacactccagtggatgtaggacctgggttagacgtgaggacacactccggtggatgtcggacctgggttagacgtgaggacacactccggtggatgtaggacctgggttagacgtgaggacacactctggtggatgtaggacctgggttagacatgaggaaactgaggcacagaggggtgcatcatctctccgaggacacactccgatggatgtaggaactaggtctctgcctccatttgcagatggtcatgcagagggggtctcaggcgagtgtctggcacaggcagtggctggggtctggtggcccccagttctgatactaggctggttgtgggcttttccaccagcgatgggacaggacaagactgcaaagggagcgccctgcctcctcctcccacgtctgggctctgacaggccagaggacgggcagacccacggctcgtggctcactccagctagcagcggtcactctgcaggcctctgctcaggccccttctcagctcttggtgtcttgggctgctgcactgaatctcagatgttatttcatgaacccaaagagttgttgtctcggcttgtcttgcgcagtgaaaagcgcgtgttttacgtgtccagttgctcttaatagcagatacctgccctggacgccagtggcagcatgtgccctctgagcagcggccttcagcttcccaggaacacggggctcttcctgtccagcctcctgggggctggtctcagccctgactggccagcagacgcagggtcatctcggagttacccagctagggactcgcagccagttgctggttgggagttggagagtggagtttaagccctctccttgacgtagagaggatttggggcctgttacgtgagtatttagcaatgctgcccaagctctgacaccatgcttatgcgtttttggatttcaggcgagcccacaccttaaccgtgctcttcatcctcacctgtacgcttggctatgtgacgctgctggaggaaacacctcaggacacggcctacaacaccaagaggtaagctgccctctcgtcctgccttctgaaactgccctgtgccccgtgtggtgggtgtggcacccttactgctcgggctgccgggggctcagaaggccttcaccagagggctgcgtggggccgccggcctctcccttgagtgtgtctgatgtgcagactccagggctgcccttggtgctgcgtggcgttcccggtcagcccccgtcgcctgtcactgggagccaggagtctgtgtcatctccacgtgaccggcagcctgtgctgcgtttcctctgagttttgcatgttgaggttggaacgagctgcagcagctacagggctgagcccttgagtttgggcgtctccgggggtgaggttcctgcggtggccgcgtgctggttccgttagccagcggggctcttgcacggacaggggccgacacggaccgcagaccatctggtcagcagccaagcgagtaaactcgtcttctcaggtttatctccacaggcaggcaggctagaccttgggtgtgtcctctgcctgaattccatggattctgacgccagtctcagaagtgcgtgtggaagagaagctggttttagagcctgtgaatcagtcttgagttttctgtgcctgactctcctctcgcgttgctcttccgacgcgcgcacagggtgtgtctgcccagggctgcctcctgcccagcaaggctgctgacaccatcagggcctggccccacttgctccggcgggatggtgggaggaagccggagcagggtctgagaccagcagcaggatggggacagaggtggaaggaggcattggaggcctgttggtgtcggggccacaagttggctctggttggcgggagccctggggtttgtaggacttagctgtccctacagctcttgggccagcacttcattttgtaaagcaagagtctcgctatcttcgtgactgttgggtggggtgatgggtgggcatggtgtgaacgtcatcacgcttgcacgggcgttggtggccctgtttgcccactgatttgacaccagccctgtgggctctagaacacaagcatgcccagtgccctgtctgtaggggagcggatgctttagaatcacgcacagcagacctcataactgagtccatctccctgggggcagtggggcatttctggttagaaattactgttgaggtgcctggacccaggactctgcagcctgctccccagatgagctcaccctccatcctcacctgggaggcgcaggtggcctctcctgtcctggtctccctaccctgctcctggctgcatgctctgtgggttctctcccaccttgctgtcatccctctcccagtcagctttgctggcccttccccctttttctgagcctgaggtgccagcttgctcccaggcctggcctggccagtgcctcccgtgctccaggcccagctcgctccttctccctttcttaggcagtcccagcgggggtcacgtgcagaacctgcaggcccggtgtgcactgtgtaactaggctccagaaatagatgagggagcatgtgccgtgcctggggcccctgtggaggggccacctggggacgctggacctgtggctctggaggcagtgaggcagtgggcaggagccccgtgtgtgcctagagggagctttcaaggaggacttggtctttcttgaattcatccatcagcacctggctaggagggtctgtggcatctgccgggcacagcagggtaggtggattaggaagcaggaccgggtctcacctcaagtgtcccacatggcaagaattgtcaagagcaggagtgcagggggtgtcttgggagcactccccgaaagcattcaccaggcccccaccaggcgcatcacaaagcctcaccaccccaagccaggccctgccctcccaggcctggttcctatgggaagcactaggtgacccagacccagaggggccaggagcttagacccctgagggggcagcagtggtgggcacgtcccccacttcacccagcactggcctctcctgagtggcccccgacgtgagaggctgggttctgccatcctgtcctctccagcagggagcccctgcgtgtgttcattgagaggggccaggagacgggaattcacggggccctgggcactcttctctgaggttctgttctggggacactaaacgcgctcccaactcacattctctttccccctcaccctctttgagggcacaaaagaagccacctgtccttctctgctgctggcacctagaacctgctctgggctccttcctggaaggctcggctgccccaggtcaccctggcactgaccgtggctctgtggctccttccagtgaaattgccgtggtgcacctgtcctgagtccattctcatggcctggacccgcactgctgcacaccagaagcccagctcctgggcagccaccctacctgcccctacgcagggtgtccacacagagggtgtccgcacacagggtgcccacacacagggtgtccccacacagggtgtccagaaggctgtgggggctggtttacttttaatactagaattatctgatgtcctcaagggtagattttcttatatagaaaataccttctaggccaggcgcggtggctcacgcctgtcatcccagcacttgggaggctgaggcgggcannnnnnnnnnnnnnnnnnnnnnnnnnnnnnnnnnnnnnnnnnnnnnnnnnnnnatggagtctcgctctgtaccccaggctggagtgcagtggtgtgatctcggctcaccgcaagctccgtctcccgggttcacgccattctcctgcctcagcctcccgagtagctgggaatacagggcccaccaccatgcccagacagtttttgtatttttagtggagacggggtttcaccgtgttagccaggttggaattttttttttttttttggtcaatgttgaccaggttggcctcgaacgtgtagcctcgcctccccaagcgccagaacaaacagcctgagccactgcagctcccagccttatttttttgttttcagacagactctcgctctgttgtccaggctggagtgcagtggcacaatcctggttcgctgcaggctccacctcccgggttcccgccattctcctgcctcagcctcccgagtagctgggactacaggtgcccgccaccatgcccggttaattttttgtatttttagtagagacggggtttcaccgtgttagccaggatggtctcgatctcctgacttcgtgatccgcccgcctcagcctcccaaagtgctgggattacaggcatgagccaccatgcctggccagccttatttttaaaaattaatatttatgttattaaagttaaaaagttataaaactagtgtgtctttattcagcttgctgtcattgttctttttatggatctaacaggttccccaccttaggggatgattttctttttcttttttttttctttttttggagacagggtcgtgctctgttgcccaggctggagtgcagtggcgtgatggcccactgcaaccttcacctcccaggttcaatcagttcttgtgcctcatcctctgtggtagctgggactatagccgtgcaccgccacgccccactaatttttttatattttggtagagacaggtttcaccatgttgcccaggctggttttgaactcctgagcacagacagtacacccgcctcagcctcccaaattgctaggattacaggcgtgagccactgcgcccggccccgttttgcttttcttgagtcaacgttattgacctataatttactataatctgtgtctgattcacgcgtacggctgatgagttttaacagactcagagccccgtgtgcccaccactgcatgggggtgcgaaagtgttcactgttccctgcgctcagagtgcctcaccccggctcgggcagtgcggaggcatctcccctgcgctcagagtgcctcaccccggctcgggcagtgccagtgcatctgcctgggtgagagcagggtctgtgctgccggccccggcttcctgtgaacgcagttgctcctccggcctggcctctcccgctggagggcagcttcgcggcatccttgctgtgcctgccggtgggctcactggggagcttccgttgcgtggacacggcaccgttcactgatctgcctgtatgggggtgaccctgggggagagtccagctttcctcaccagtccattacatttttatcccattttaaacttagtaaattaaacctcttcacacattttactcaataaaatacatgtaacatatataaatgtaatacacttaaaatataaatatccttacttgtaatacatataaaacataatgcatataaatatactcacagtgctgaagaataacaaagttggacacagaaactacacaatttcaagacttcctgtcaaaaatgcaccgaaataccgagcccagaaacaggcgcgcacgactgcaggcagccgatccttgacaaaggaacaaaggcaagtccatggcgaagggatggccttttcaacactggcgctagagcaacagaacatccacgtgcaaatctagacacagacctgacacttctcacaaaacctaattctaaatggattctagataagcctaaatgtgaaatgagaagctataaaacttctctttttgtttttgagacagggtcttgctctgtcacccacactggagtgcagtggcgcagtcacagctcactgtagcctccaactcctggcctccagcaatcctcctgcctcagcctcccaaggagctaggactaccggtgtgcaccaccacacccagctactttttaaaattttttgtagagataaagtctcactgtgttgcccaggctggtctcaaacccctgctttggcctcccaaactgctgggattacagatgtgagctatcatgcccaggcataattataaaacatctgagctatcatgctcagccacaattataaaacatcttggagaaatcacaggagaaagtatagtgaccttgggtttggtgataataaaataccagtagcacaatccatgaaaataaaaacttgatcaattggacttcattacaattaaaattgtctgctgggtgtggtggttcatgcccttaatcctagcactttggaaggccaatctaggaggattgcttgaggtcacaagtttgagaccagcctgggcaacatagtgaggaccaccccccccccatctctactaaaaattaggaaaagataaattggctaattgtggtagtacatgcctgtggttccaggtactcaggagaccgaggcgagaggattgcttgaacccaggaggtctaggctgcagtgagctatggtagcaccactgcactccagcctaggcgacagagtgagaccttgaaaaaattaaaatttctgctttgtaaaagacactgttaagggaacgaaaaggtgagccacaagctgttgaaaatgtttacaaaacacctatctgataaagtacttgtattcaaaatatgcaaagaactcttaaagctcaagaagaagaaaaacaggctgggcagggtggctcacacttgtaatcccagcactttgggaggttgaggcagaaggattgcttgaggccaagaattccagaccagcctgtgtaacatggtctattagtctgttttcatactgctataaagaaatacccaagactgggtaatttacaaaagaaagaggttcatcgactcacagttccgaattgctggggaggcctcaggaaacgtacaatcactgtggaaggcaaaaggggaagcaggcaccttcctcacaaaggcggcaggagagactgagaacgggcacaggaaaaactgccactcttttttttttttttttttttttgagacagagtattgctctgttgcccaggctggagtgcagtggcacgatcttggggctcactgcaacctccgcttcctgggttcaagcgaatctcctgcttcagcctcccgagtagctgggactacaggcatgcgccacctcgcctggctaatttttgtattttttaatagagacgaggtttcaccatgttggccaggttggtctgaaactcctggcctcaagtgatccgcccacctcggcctcccaaagtgctgagattacaggtgtgagccaccgcgcacggccaaaactgccgcttctaaaaccatcagctctcgtgagactccctcactacatgagaacagcatgggggaaccgcccccataacccagtcacttccctccctccacacgtggggattacaattcaagatgagatttgggtggggacacagcgaaaccgtgtcacatggcaaaaccccgtctctacaaaaaatacaaaaattagccaggcgtggtggtgcacacctgcagttccagctactcaggagtctgaggtgggaggatcccttgagcccgggaggtcaaggctgcagtgagccaagatcacaccactgcactccagcctaggcaacagagcaagaccctctctttcaaacacaaacctgggtgacacccactcggaaggctaaggcaggagaatcacttgaacccaggaggcagaagttgcagtgagctgagatggcaccactgtactccagcctgggcaacagagcgacaccctgtctcaaaaaaaaaaaaaaaaaagaaatgaagtactacaaataaagtgagccgtcaccacagctgaatataaggcctcaccgtaggtgaccgcagggacatggccagctgtggtgacagcactctcacggaggatgtgttataaaaggctgtccccatcacgacaagaggaaacacaggagccggcgtgaacaccagctgtctcaccagatctgtcttccaggtcttcctcctcagacgccccctcgtcttctccgtctgtgccatctccatgctcgctgtcactgtcgtccccagagtccccactgctgccccacgctgctttcttctagacaccagggtgagacacaggccgcagggcggcgtcaagaccatgcagcagagagcaggttgctttgcacaggcatagaggcgtcaggagcacctnnnnnnnnnnnnnnnnnnnncaggaactggaaacagggagacgccactgcatacccgacggagcagctaaaaccttaaaaaccgacagtaccaacgcttccaggaactctcacccattgctggtgggaatacaaaaggctaaagccgctttagaagacagtttcacagactctcacagaactaaatataaatatattcttgggctggacgtggtggttcacgcctgtcatcccagcactttgggaggctgaggcaggtggatcacgaggtcaggagatcaagacaagcctagccaacatagtgaaaccccgtctctactaaaaatgcaaaaaattagcctggcatggtggcaggcacctataatcccagctactcgggaggccaggaggcggaggttgcagtgagccgagatcgcaacattgcactccagcccgggcaacagtgcgagactctgtctcaaaaaatatagatatagatatagatagatagatagattcttaccatgcaatctagcagttttgctcctgaatatttatccaactgaattgaaaacttatgtccacataaaaacctgcatgcaggccaggcatggtggctcacgcttataatcccagcagtttgggaggctgaggcaggaggatcgcttgagcccaggagttcaagaccagcctgggcaacatactgagaccccatctctaccaaactaaaaaacttagccgagtgtcacagcacacacacatggtcccacctgtcaagaggctgagtgggatctcaagcccggaaggcagaggttgcagcgagctgtgattgagccactgcactgcagcctgggcaacagggtgagaccccatctctaaaagatagtaatgagcattaagccactgcgaccgggaggaaccttaaatacatgtttctataaatacacattcctaagtgagaggagccagttgagaaggccgcgcactgtgatttcagctcgatgaccttctggaagaggcaatatgatgtggtagtgaaaacatcagttgtttcccggggaaaggggagagtggatagtagaatgcagcattcgtatggcagtgaggccactctgtgtggcaccatcctggttggtacatgacactgcgtttgtccgaacctgtagaactggacaacacgagcagaccgtgtgcagattttaaacattcattgaggagatgggggtcccggcggggaaggccgactgacaagaatcttaactactgcagatgcattccgtgaccttcctgaagggtgttcagaggaaggtgctgagtaactttggaaatgagcagtgtctataaggccagaggcaaaaggaatggcacagacgctgctctagtcgataaagttttgctgcacagaggtgctgactggcagctctgtcactgtggtgtgtatgatggctgtgggaggggagtctctggataatcagagaaggaggggagtctctgggtaatcagagggaggaggaggggagtctctgggtaattggaggaggggagtctctgggtaatcggaggaggggagtctgggtaatcggaggaggggagtctctgagatggaggggagtctctgaataattggagaaggaggggagtctctgggtaatcggagggaggaggggagtctctgggtaatcggagaaagaggggagtctctgggtaatcggagggaggaggaggggagtctctgggtaatcggaaggaggaggaggggagtctctgggtaatcggaaggaggaggagggcagtctctgggtaatcagagggaggaggaggggagtctctgggtaatcggagggaggaggaggggagtctctgggtaatcggaaggaggaggaggggagtctctgggtaattggaaggaggaggagggcagtctctgggtaatcagagggaggaggaggggagtctctgggtaatcggaaggaggaggagaggagtctctgggtaatcggaaggaggaggagggcagtctctgggtaatcggagggaggaggaggggagtctctgggtaatcggagggaggaggagggcagtctctgggtaatcggagggaggaggaggggagtctctgggtaatcggagggaggaggaggggagtctccgggggagtctctgggtactcggaggaggagggcagtctctgggtaatcggagggaggaggagggcagtctctgggtaatcggagggaggaggaggggagtctctgggtaatcggagggaggaggaggggagtctccgggtaatcagagggacgagggttggagtggccgctgtgattggtgggtttaccattgcacgtttagcccagaaaagacaaagatggttaaacagtgtgtgcgcagtggttaatggatacacacagatctgttgctgtacaagcttgagggggcctagaaccagctatgccttgcagcagtgaagcacacccagggcccaagattccctgggtccctaatgggcccttacaagtccaacgggggcccagggggcttcttgaagggagaaaaatgggcctggaatttcccaagcaccccggggggccagggaaaaatgggcccccaggaatccaagccttggaaacccttgggcaaggtttctccacgaaaaaggtggaaggggaagctttcttggtaaaaaaccaaaaaaaccccccccaccagaggtccaccgggggaatatgggcggtctccccccagatgggaaaaaggagagccccttcccccaatggggggcgcaaaagggagaggccacccccaaaaaatttaattttaaggggtggggttttttaagaaaattttttaaccccccagcgaggttggggaaaaaattaaaaacccttttcccacggagagccccccatttaaagggaataattataggggggatatgggggggtaaaaataaaaaccggggagggggaacacaaaggaaaccaaaccccttttccttgtggggaaaagaggttttttcggttaaatagggaggggaaaaaacccccccctttttccaagaaaacttggcggggaaactctcccgggcaaccccttgtgggccctgtcccgtgggggaaacctgacctcccttttcttggcgggggccaaaccccaaagggcccctgggaaggaagannnnnnnnnnnnnnnnnnnncctggttggtacatgacactgcgtttgtccgaacctgtagaactggacaacacgagcagaccgtgtgcagattttaaacattcattgaggagatgggggtcccggcggggaaggccgactgacaagaatcttaactactgcagatgcattccgtgaccttcctgaagggtgttcagaggaaggtgctgagtaactttggaaatgagcagtgtctataaggccagaggcaaaaggaatggcacagacgctgctctagtcgataaagttttgctgcacagaggtgctgactggcagctctgtcactgtggtgtgtatgatggctgtgggaggggagtctctggataatcagagaaggaggggagtctctgggtaatcagagggaggaggaggggagtctctgggtaattggaggaggggagtctctgggtaatcggaggaggaggaggggagtctctgggtaattggaaggaggaggaggggagtctctgaataatcagagggagaaggaggggagtctctgggtaatcggagggaggaggggagtctctgggtaatcggagaaagaggggagtctctgggtaatcggagggaggaggaggggagtctctgggtaatcggagggaggaggagggcagtctctgggtaatcggagggaggaggaggggagtctctgggtaatcggagggaggaggaggggagtctccgggggagtctctgggtactcggaggaggagggcagtctctgggtaatcggagggaggaggagggcagtctctgggtaatcggagggaggaggaggggagtctctgggtaatcggagggaggaggaggggagtctccgggtaatcagagggacgaggttggagtggccgctgtgatggtggattaccattgcacgtttagcccagaagagacaaagatggttaaacagtgtgtgcgcagtggttaatggatacacacagatcttgttgctgtacaagctgagggggcctagaaccagctatgcttgcagcagtgagcacacccaggcccagatcctggttcctagtgccctccagtccacggggccagggctctgaggagaaatggctgattccagcaccggggcaggaaatgcccaggatcagctgatcctggcagttccagaaagtgaggagctctgtaaacaaaaccccacagtcacgggattgcgtcccagtgaaagagcctcccagtggccaaagagcaacaaaataataaagtagtattagaatataacccagagtagaaaataaacatccacgagcccatagtgatataagtgattgagtaaataaacagagggaacaagaccaaccttccctgcagaaggttttcagtaaatgaggtagatccccccattccaggagctggcgtgagctcccggcaccgctgtgcgctgcgcgtggtgacctgacctccttcctgggcgtgcagcacggagagggcagtgggaggaggacgctgcagccgaggtgcccgcagacacccccaagcccagtggtcaggtcagcatgcactggtcatgttcatggcgtggccgacggggaggctgctgccccatcctcccaaccccgacgaccccagcccggccatgcagaggcatagtcgaccatctcactaaggaacattccacagaattcctgaccaggcctcctccaaaccatccaggtcatcagagacaaggagagtctgagaaaccgtcccagcctcggggagcctgaagagacagaacgagtagatgccatgtggcttccaggaagagattgttgggggcggggcagggggaaggacatcaggggagagcgaaggaagtgtaggcctcagcagctgtgtggcagcactggcttatttattttttattttttatgtttattttattttattttttgagacagagtatcactgtgtcacccaggctggagtgtagtggcgtgatctcggctcactgcaacctccgcctctcgggttcaagtgattctcctgcctcagcctcccgagtagctgggattacaggtgcctgccaccacatctggctaatttgtgtatttttagtagagatggggtttcaccatgttggtcaggctggtctcgaactcctgaccttgtgatccgcctgcctcagcctcccaaagtgctgggattacaggcgtgagccaccgcacccagccagcaccggcttattaatggtgagatgttaatgggaaaactgggcctgtgagatatgggagcttttactatttttacaataattctgtaaatctaaaaccattctaaaattaaaaatttatttttaaaatgcaatatatttgttttccttttaaagcacttccctcattcttacccaacgggacacaccttctcaagtacttaagtaattcttttttttttttttttttgagactgagtcttgctgtcacccaggctggagtgcagtggcgcgatctcagctcactgcaacctctacctcccagattcaagtgattctcctacttcagcctcccgagtagctgggattacaggcgtctgccaccacacctggctaatttcttatatttttagtagagacaggagtttcatgtcggccaggctggtctcgaactcctgacctttaatgatccacctacctcagcctcccaaagtgctaagattacaggtgtgaaccactgtgcccggcaagtaattcttatgaacaaattagccttataaagttgtcataaacattatgtgatgtgtggccaggttagagtcctgtgtgacccggtctgagctggcctctgggcagcatgccgtgtgggggctgccacaagctgattcagggagcaccggcctggggtgacgcacgcctgtcgggcggagggcggcctggggtgacacggatggtggcctgggatgacacgcgcctgtcaggcggagggcggcctggggtgacacgcacctgtctggtggatggcggcctggggtgacgcgcgcctgtcgggcggatggtggcctggggtgacgtggatggcggcctggggtgacgcagatggtggcctggggtgacgcggatggcggcctggggtgacgcagatggtggcctggggtgacgtggatggcggcctggggtgacgcggatggtggcctggggtgacgcggatggtggcctggggtgacgcgcacctgtctggtggatggcggcctggggtgacgcgcacctgtcgggcagatggtggcctggggtgacgtggatggcggcctggggtgatgcagatggcggcctggggtgacgcggatggcggcctggggtgacgcggatggcggcctggggtgatgcgcgcctgtcgggcggatggtggcctggggtaacgcggatggcggcctggggtgacacagatggtagcctggggtgacgcggatggcggcctggggtgacgtgcgcctgcaccgggagcagcttcccttggccagtgcccatgttcctcttttcatttttatcttttctggggagggtagggggacgttttactgtctttccactgaatgttatgaccctccccacgccccttggaggcacagctgaggtggggcctatgtctggctccagggggccctgaaaggtactttttacacctcccacccctcagcactgagagacctcgggaggggtaccggtgacagggacgcgggccccaccttgctgaacccagcagcgagggcatctctgcctctgtccctggaggctgacagcggtagtgtgggagctggggcctgggtggagaccgggtcagaaactcaggtttcgcctgggtgggccatgaatgtcctgccgagggtgagaccctcagggctctgggtggagagcagcacctgcccagaaccagtagacccttgtcccggctgcaccaggggccagcgaccttgtgccctcctccatcctgcaagcctcgggcggtgcttggcctcacctgcctctgtctactcaggactttgaggccaggcactcctgcaggcagagaggggaatttctgagactgaagttgttactgggtattttttaacagcgctgtcttaaaaaatagatagcgtgtctctgtggccccgtctattcttgcggccacacgaacgtgcgtgtgtgtgtgcagcttccctcacggcagccaaaacccagaggccgcccagcgtgcgaacacgccaaggtgtgactgtcggcacggcactgccgagccgtgggagggactgggtggtgcagcggccagtggatctcagaccctgagctgagcacgactggagaggatgggcgcatccgagcgtctgcagagcacagagcgcgtccgcagagcgggtccacaccttgggtgcagcgagcggatgtgagcagtgtgcctgtgaccagggctgtctgcacatccgccggcctaagctgctgctcaccgaaacccactgggactctggctgaggccggccccaaggagctttgccgaggagggagcaccttgcccctgcccagagcggtccctcgcatcctccttcccgtgaacctgcatctttggttgcagttacagctctcacgcttccatcttatgaatcacaggagtcccgtttgttttggatgagttgacaccaaaaagacacaggagctctctagagacacttcctgggggtcctgccgcgttggagcagggaggcagtagctcctgacgccttccctcctacgtgggctttgtgatcactgatggtcacatgcggggcattcggtggcctctgtgtagagccagtgtcttcctgatgtgacactgggaaccaccagcagcccaagcacagggaccttctcctggccactgggcgggctgcaaatgtgagggcgaatgttgggtgcagggtggtggaggtagctgggccttccctgccgcggaggaggcaaatgtgagcgcgaatgtccagcccagggtggtggaggtagctgggccttccctgccgcggaggcggcaaatgtgagggcgaatgtccggcccagggtggtggaggtagctgggctttccccgcggcggagtcgcccagctctgcccgaggccccttcctcccgccccagcatcaggggctgttccacaatgggtgtctgggggtccctgcagcctcccacctccctcctgggagaagcctgcacacactgaggggctgtttgttctttatttgcagaggtattgtggccagtattttggttttcttatgttttggagtcacacaagctaaagacgggccattttccagacctcatccaggtaacttgccatttccttttccgtgtgcccctgtggcatttctgttctgagcggccactctgtgtctgtgctgctgggtgtgagtgtcctgtcctcccctccgcctggcccctccccgaggcctccgaggccacttcccacatggacaagggcgtggggttctgagctggccgtgtgctcctcctccaaccaccgagggtctctccaggccttctctggccctttcactcttccctgtccagggctctccagcccttctcttcctgcttctgcctcctctttccacagaccagagtggccgagggctccagatggggctatgaggccgggggcaggtgggtgagggcaccagatggggctgtgaggccagggactgtgggctctaggtgggactctgagaccagagggggcgggggtgggtgagggcgccagatggggctgtgaggccatgggcgggtgggtgagggctccagatggggctgtgaggccatgggcgggtgggtgagggctccagatggagctgtgaggtgccgcccaccccctgcccttgaagtggttgcccagcgcactctgcctcagccaccaccccaccttatggccctgagttctaacaaaccctcgtgggccagagcatcccgccaatctcagtgtactctgtcccccaagtcccaccccaggaaggcgggctcaggcttctgtagggtcggttgtttcccctgagtggccacacgaagtaattagaaacattttctgtttcaacaggagtatgtattatagaaaatttcgaaaatacaaagatacttaaaaataaagctacccacaaataataaccactgttaaattttcacgtgtttgtgatacggacatattcacttgtttgtgtatacggacatattcacgtgtttgtgtgtgcggacatattcacacgttcgtgtacggacatattcacgcgtttatgatacggacataatcatgtctttgtgtatatggacatgttcacgcgtttgtgatacggacatattcacgagtttgtgtgatacggacatattcacgtgtttgtgtgatacggacattcacgcgtttgtgtgatatggacacattcacgtgtttgtgtgtgggacatattcacgcgtttgtgtgatacggacatattcacgcgtttgtgatacggacatattcacacgtttgtgtgatacggccatattcacgcgtttgtgatacggacatattcacacgtttgtgtgatgcggacatattcacgcgtttgtgtgatacggacatattcacgcgtttgtgatacggccatattcacgcgtttgtgtgatacggccatattcacgcgtttgtgtgatacggacattcacgcgtttgtgtgtaggacatattcacatatttgtgtgtatggacatattcacgcgtttgtgatacagacatattcacgcatttgtgtgtacagacattcacgcgtttgtgtgatacggatatattcacgcatttgtgatacagacatattcacgcgtttgtgtgatacggccatattcacgtgtttgtgtgatacggacattcacgcgtttgtgtgtaggacatattcacgcgtttgtgtgtacagacatattcacagcctcgaaagagtggaatcctgaacacgtggctttgtgcattctccacttcaggttcaacgactttagtcatttccttactaatttttaaaatgactttaatcatttaggtttaaatgactttagtcatttccttactaattttttaacacccgaaattttaatgactgcttgtttgctgtcattagaatgtactacatttaactaacttatttaagccataatattgtatatttagagagtttccagttttattttaataaactaggctgtggtgaattttttcacgtatgctctgtgtaaatatctgattattcatttaataaaatgtcccagaagtgagtattgaattaaagggcatacacagtttaagcctgtgatatgtgttataaaattggcctccaggagagcagtgtctgccccagggtcagtgccatggtggtgagtgaagctcccccacccacagaggccctgagcagggagccgtccggtgacccaagcaggctggtcttgctggccccttccttgcccagggccttgagagagggctccttgagtgcctggcaggccactctgctggctgacagctgtgtgggaagggcccagggccctgtctgcccagccggctgagcacagacggtcttgcctccaaggggtttggattcctcagcagagccgtggaaggtgcagtgatggtgagaaactgcccgtcacacagtgaaaagcctggcgccgtgacggtgagaaactgcccgtcacacagtgaaaggcctggcgcggtgatggtgagaaacttcccggcacacagtgaaaagcctggtgcagttacgtgcttgttgggtggatttggagggaagaaaagctgccggaagctcaacccatggccgtccttgcttggagatgcaccaaatccctcctgggtggcggcatcactggggactgggacgcagccgtgagtgggacagactggtcagcaggcagcagcttgtcctggcatgtgacccctggcacagggagagactcccgggagaccctcagctctgagcagtcaggagctctggcgcaggtcacctggcgggatgtggagcatctgggcctgaaggtcttggcgcttccaaaagctccggccgcggcgtctcttgagttgtggctcgtcccctcccactgggcaggactgggggttcctggggtgttcagtttttagtctgagctctgctctacctttcttctgtccgtttagtttgcttggcataaattccatattactttgccaatcttcgatttattgacggggaagcctgtcctggagccaccttcttccacgcgtcttgttaacttgggggccggcagggagccctcaactctctgcagtcacaacacattgaagtggacaagtgatgagtcctgtgcagcggaggctctgggtggggggcagggagaagggctttctccagaaaggtggtccctgtgggctctgcccaccttcacactcccctgggtctggcccaggaatgcccagtccggcagctgtagccgtagccattagtgactgggcctcatgaggaggagtggaaatgggcccagcccggccatctggggtgctgctttctttggaaacttgagttggctgcagctctgagggaggtggaacgttctgggccactgaggagggcatccctcctgtgtgaacggcattttcttcctggctccctctgaaggctgtgtcagccacagcatttccagggctgctgaggctgcctgtctgtctttcccctctggtgtgatgtttagaaagacaaatgagtgctggggcctggggggtggccctggggtcagggaggtgctggagctgctccgggaagcgacccaggaatgcagaccaagggcctgctgggtattccggggcggcagcctggtgctggtcgggtgggaagcgtgagtggggagaggagtccgagatgccacctttctgatctggggagctggggccttccccaacaggagaaacatgagaaagattcgacttggcagtgcggggagggaagttagtactggtcgtggtgacctgtggcccgctcagaacatgatggtttcatgggtgtagctgtcccctcagagagcgcctgcaggccgggcacctgctccgaaggcgtccccttcagttggcgagcccttgtggggcgagggctgccccgagttaatttcaccacgagcccctcaaactcttgggccactgggaagtttccaggttcttcttatcccaaggcgtgaggaagaagtttgtgatctcagtcgtctgtcttgggtcccagacctccctgtgcagcttttcctaagaacgccagggcgtttgtatttcctgccaatgatggcggcttttcatgagccacgggggccgtcttcccctgagtacgtcggggcctcctgcgtttagtccgaaaacctcacgtctgcacgtcttgccgtgagctgctcggagccgtgggaagtcaggaattgagggatggtttcatgttagaagtctgttaatgtaactcatcacatcaacatgaaaaaattgatccccttaaatgcagaaaaacaaaaattcacattcatccatgacaaaaacttaacatactggaattgaaagatttttttaacatgataaaaagtatcctagcctgggcaacatgtcgaaaccctatctctacaaaaaaaaaaaaaatacaaaaattagctggatgtggtggcacgtacctgtggtcccagctactcaggaggctcaggtaggaggattgcttgagcccaggaggcagaggttgcagtgcaacaagattgcactccagcctgggcaacagagccaggaccttgtctcaaaaaaaaaaagtggccagccacagtagctcacacctgtaatcccagcactttgggaggctgaggcgggtggaccatctgaggtcaggagttcgagaccagcctggccaacatggtgaaaccctgtcccgactgaaaatacaaaaattagccgggtgtgctggacacctgtgagcccagctactcgggaggctgaggcaggagaatcacttgaacctggaggtgaaggttgcagtgagctgagattgcaccactgcactccagcctgggcgacagactccatctaaaaaaaaaaggtatccaccaaaaacctactccaaacttaacggcgcaagtttagaagcatcactcgtaaacacaaggcagggatgtgtgctgactgcttctgtgcaacaatttatgggcaaaagatttgagtactggaatggaaaaaatgaagaaaaaaaattcacttttcagagagaaattgtgcctaattctgagttacagctttctttataaaggctctcccaggggcctgtgaagggcccagaagagacactgggtgtgaaggagccaggagccggcctggggctgagcggggccgtggaggcctggaccgggcgcactaacgttctgtcgtctgtctttgtagcttactggaggttttggctctgcgtgagtgtggtctacgagctgtttctcatctttatactcttccaggtaagctgtttttctgggttggatacctgggaacttaggtgacagtgtggccccaggcatggtgacaaaggaggccttgcccacacagccctcgagtgatgggaggaagcagggctagacccccacaaagtaggccgagctgcggggggtctccaggagcatctgtgcggcccttgagtgatggggggcagcaaagctagaccttcaaaacgtaggccgagctgcggggggcctccaggagcatctgctggtggggcgctgactgtggccatttagcagggccacacttaaggagggcagggccagtggtgcaggcacagaagagggcagggccagtggtgcagctgccagggtggctttgcccacagctgtcgtatctgagtgctggtggggactgggcgtgaagggagccgcaagtcaggtcctgcgatgcaggccagcgtctgcatggccggggcaaatctgggcctcagaggggaccccagcgccaagagggacggggtctttgtttttgtgttttgtggttgaccagtgtgactgtgtgtgcttcttccccatcctgaccacattctgcaagacgagcagggtgcaggtgggagacgcagctcctttgtaaatcctgggtcaggctgtgttgctgctgcaaatgcctactttattaatactctttgttctgtttaacttagtgtaaacacacatttttggggctgtcttcagcttacaaaggactttattattcccaatcttaaaactccatcagtgcatgatgagattttttatcatcgtggcaaaattgacttttctgaggcagtgtacattctgtgaattttagcatttgtgtagacttctagaaacacaattaggacgcacaagaattccactggccctaaaactcctttgtgttaccccttggtagtcatacccggccctgacccctgacagctggtgagggttcgcttctgtctcttctagaatggaatcgtggggtgggcagcctcttcccaccctgcacagtgcctctgaggttcacccaggatcatgcggtgggcagcctcttcccgccctgcacagtgcctctgaggttcacccaggatcatgcggtgtgcagcctcttcccgccctgcacagtgcctctgaggttcacccaggatcatgcggtgggcagcctcttcccgccctgcacagtgcctctgaggttcacccaggatcatgcggtgggcagcctcttcccgccctgcacagtgcctctgaggttcacccaggatcatgcggtgggcagcctcttcccgccctgcacagtgcctctgaggttcacccaggatcatgcggtgggcagcctcttcccgccctgcacagtgcctctgaggttcatccaggttgcatgtgtcttcctgcgctcctctttcttttactatttattttttgagacgacgtcttactctgtcacccaggctggagtgcagtggtgtgatctcagctcactgtagcctccacctcccgggttcaagtgattctcctgcctcagcctcccaagtagctgggattacaggcacctgccaccatgcgccactaatttattgtatttttagtttcatcttgttggccaggctggtcttgaactcctgacctcaaatgatccgcctgcattgacagggcacggtggctcatgcctgtaaacccagcactttgggaggctgaggtgggcggatcacaaggtcaggagatggagaccatcctggctaacacggtgaaaccccgtctctactgaaaaatactaaaaaattagccgggcgtggtggcgggcgcctgtagtcccagctgctcgggaggctgaggcaagtgaatggcctgaacccgggaggcagagcttgcagtgagccgagatcacgccactgcactccagcctgggcaacagagcgagactccgcctcaaaaaaaaaaaaaaaagatctgcctgccttggcctcccaaagtgcggggattccaggtgtgagccaccacgcgcggcctgggctcctctttctcggcagtgacagtttctcaggccccttgtttttggtgagctggacggtttcgaggattggtcatgatctagtagaatatccctcaagtgacatttgcaattgggaagtgtgagttcacccagtttgttctttttcaagatggttttgaatcatctgggtctcttgcgtttccaaatgaatgtgagggtcaccctttccattcctgtgaaaagaacaggtggaattttttatggggattgcatcgaatctgcaagtctgttttgggagtagtgtcatcctgacaatattaactccgtcagtccttgaagatgggatggctttccatttatttaggtctttaatttcttccaacaatgtgttacagttttcagagtttaagttttgtacttcctttattacatttactccaattattttgttcattgtgtgctcttgtaagtggaactgttttaattttacttttgcattgctcgttactcatgtatggaaatgtagctcatttttgtgtactgatcttgcgtcctgcaaccgtgctgaactgattagctctaatagttgtggtgttttggggtagactcttaagaatattctatattcaagattatgtcatctacaaatagagatagttttacctgttcctttccaatctagatgtcttttatttcttttcttttttttttttttagactgagttttgctcttgttgcccaggctggagtgcagtggtgtgatcttggctcaccgcaacctccgcctcccaggttcaagcaattcccctgcctcagcctcccgagtagctgggattacaggcatgcaccaccatgcccagctaattttttttttttaatttttagtagagacagggtttctccatgttgaggctggtcttgaactcctgacctcaggtgatccgcccaccttggcctcccaaagtgctgggattatgggcatgagccaccgtgcccggccgatgtcttttacttctttgcgtagctgccctgcccagaacctccagctcaatgtttcctagaataggcaaggatgggctttttttttttttttttgagacggagtcttgctctgtcgcccaggctggagtgcagtggcacgatcttggcttactgcaagctccgcctcccaggttctagcgattctcgtgcctcaccctccgtagtagctgggattacaggaacatgctaccacacccgactaattttgtatttttagtagagtcggggtttcaccgtgttggccaggctggtctcagaactcctggtctcaagtgagccaccgcacctgactaattttttaactttctgtggagatgaggtttcgccatgttggccaggctggtctcaaactcctgagctcaagcggtctgacccctttggcctcccaaagtgctgggagtataagcatgagccactgtgcctggccagatggacattcttatctgattcctgatcttaggggaaaagcatccagtctttatcccactgagtgtgttagctgtgagtttttcatagatctccttaccgagtggagaaagttctgtgagttttttgtagatctccctaccgagtgcagaaagttctgtgagtttttcgtagatctccctaccgagtggagaaggttctgtgagtttttcgtagatctccctaccgagtggagaagtttctgtgagtttttcgtagatctccctaccgagtgcagaaagttctgtgagtttttcgtagatctccctaccgagtggagaaggttctgtgagtttttcgtagatctccctaccgagtgcagaaagttctgtgagtttttcgtagatctccctaccgagtgcagaaagttctgtgagtttttcgtagatctccctaccgagtggagaaggttctgtgagtttttcgtagatctccctactgaggggagaaggttctgtgagtttttcgtagatctcccttactgagtggagaaagttctagtatattcctagttggttgagtgtttttatcatgaaaagttgttagatttttgttaaatgatttttcgcatcaagtgagatgatcatatgggtgtttttccccctttgttaatatgatgaattacattgattgattttcttatcctgaaccaaccttacattcctgggataaatcctgctgggtcccagggtgtgcctttttacatactgctggacttgctttcctagcattttatctaagatttttgcatccatatttgtaagaggtactgtcctttaattttcctggaatgtcttgttctggctttggcaccagggtttgtgaggatgtctgacgttttctcagtatttgtctggggtgaaggcgcgcactggcaccatcaccatgacgtatccctggcgctgtggaccttgactgcctggcgagatgtgtctgtcaggctttccactgtcaatccatagtgcattctccacaaggaggtcactggtgcagcctgcatggagggaggggagtttcgttgccccccttggtgtgtggcgtctgcacgttgccaggaattcttgtgcatgggagagatcctgcttctctaccattagttattccatcatgtatttatttatatcagtgtggacgtacagatacttgtcttacacttgcatatttatttcagcgctgctctatttatcgtggtgcccaaattcttttgccaaaaggagtttccacgtggttcctgtattgctttcacacaccctcacggagttcttggcttttcgttttgtttttctgaggacatcctgacttcctagcactgcgggatgctccaggctcctcctgtccactccccaccctggtcctggaatcagccccttctccaagagccttgggtccttactgaatattaggaactgaggcctgggtgttgggtgggctgcgtggtcctgggtgccatagctcacagaggacgggcatgtgtgcactcactgtgtgtgcaggcgtctgtaaacacagccagtgcaggggtgcgtgtgtgctgtgtgcgcaggagagtgtaaacagtgcacgggcgcgtgtgtgctcactgcgcaggcatctgtaaatagtgcatgggcgtgtgtgctcactgcgcaggcatctgtaaacagtgcatgggcatgtgtgctcactgtgtgcacaggcgtctgtaaactgcacgggcgtgtgtgctgtgtgtgtgcaggcgagcgtaaacagtgcacggatgcgtgtgctcaccgtgtgcgcaggcgagtgtaagtgcacgggtgtgtgtgctgtgcgcaggcgagtgtaaactgcacgggcgcgtgtgctcaccgtgtgcgcaggcgagtgtaaacagtgcacgggtgcgtgtgctcactgtgcgcaggcgtctgtaaacagtgcacgggcgtgtgtgtgctcactgcgcaggcgagtgtaaactgcacgggcgcgtgtgtgctcactgtgtgcgcaggcgagcgtaaactgcacgggcacgtgtgctcactgcgcaggcgagcgtaaacagtgcacgggcgcgtgtgtgctcactgtgtgcgcaggcgagtgtaaactgcacgggcacgtgtgcttactgtgcacaggcgagtgtaaacagtgcacgggcgcgtgtgctcactgtgtgcgcaggcgagtgtaagtgcacgggcgtgtgtgctcactgcgcaggcgagtgtaaactgcacaggcgcgtgtgtgctcactgtgcgcaggcgagtgtaaactgcacgggcgcgtgtgtgctcactgcgcaggcgagtttaaacagtgcacgggcgcgtgtgtgctcactgtgtgcgcaggcgagtgtaagtgcacgagcgcgtgtgtgctcactgcgcaggcgtctgtaaacagtgcatgggcatgtgtgctgtgtgtgtgcaggcgaccgtaaacagtgcacggacgcgtgtgtgctcaccgtgtgcgcaggcgagtgtaaacagtgcacgggtgtgtgtgctcactgtgcaggcgagtgtaaactgcacaggcgcgtgtgctcaccgtgtgcgcaggcgagtgtaaacagtgcacgggcgcgtgtgctcaccgtgtgcgcaggcgtgtaaactgcacgggcgcgtgtgctcactgcgcaggcgagtgtaaacagtgcacgggcgcgtgtgtgctcactgtgcgcaggcgagtttaaacagcgcacgggcgcgtgtgtgctcactgcgcaggcgagtgtaaactgcacgggcgcgtgtgctcactgcgcaggcgagcgtaaacagtgcacgggcgcgcgtgtgctcaccgtgcgcgcaggcgagcgtaaacagtgcacgggcgcgcgtgtgctcaccgtgcgcgcaggcgagcgtaagcagtgcacgggcgcgcgtgctcaccgtgcgcgcaggcgagtgtaaacagtgcacgggcgtgtgtgttcaccgtgtgcacaggcgagtgtaaacacagctggtgccctggtgcgtgtgtgctgtgagcacaggtgtctgtaaatgatgtaaacctcccttgacgtcaggcccaaaagcctgccttgccctaaggtcaagaggtgtatctggctgatgccagcgtctgggtgaggaaagagcaggttccacaagggcgactcctgtgagggtgttggcctgagcgcgcatgcggggaggggtcggggtgggggcggcgcgccgcagtaactcagggccccatcccgctcccgtctgtccagcggtcctagacccccatgtcctgaagcgcacctgtgcccacctggccccggggagcacaggtgtggagatggggtgtcgtgctgggggttcttccccacgcgctgccccaccannnnnnnnnnnnnnnnnnnntgtgctcaccgtgtgcgcaggcgagtgtaaacagtgcacgggtgtgtgtgctcactgtgcaggcgagtgtaaactgcacaggcgcgtgtgctcaccgtgtgcgcaggcgagtgtaaacagtgcacgggcgcgtgtgctcaccgtgtgcgcaggcgtgtaaactgcacgggcgcgtgtgctcactgcgcaggcgagtgtaaacagtgcacgggcgcgtgtgtgctcactgtgcgcaggcgagtttaaacagcgcacgggcgcgtgtgtgctcactgcgcaggcgagtgtaaactgcacgggcgcgtgtgctcactgcgcaggcgagcgtaaacagtgcacgggcgcgcgtgtgctcaccgtgcgcgcaggcgagcgtaaacagtgcacgggcgcgcgtgtgctcaccgtgcgcgcaggcgagcgtaaacagtgcacgggcgcgcgtgtgctcaccgtgcgcgcaggcgagcgtaaacagtgcacgggcgcgcgtgtgctcaccgtgcgcgcaggcgagcgtaaacagtgcacgggcgcgcgtgtgctcaccgtgcgcgcaggcgagcgtaagcagtgcacgggcgcgcgtgctcaccgtgtgcgcaggcgagtgtaaacagtgcacgggcgtgtgtgttcaccgtgtgcgcaggcgagtgtaaacacagctggtgccctggtgcgtgtgtgctgtgagcacaggtgtctgtaaatgatgtaaacctcccttgacgtcaggcccaaaagcctgccttgccctaaggtcaagaggtgtatctggctgatgccagcgtctgggtgaggaaagagcaggttccacaagggcgactcctgtgagggtgttggcctgagcgcgcatgcggggaggggtcggggtgggggcggcgcgccgcagtaactcagggccccatcccgctcccgtctgtccagcggtcctagacccccatgtcctgaagcgcacctgtgcccacctggccccggggagcgcaggtgtggagatggggtgtcgtgcctgggggttccttccccacgcgctgccccaccaggatttccctggggtggggagggctgctgagacagggcgctgccctcctccagggtgactgagatgcagtttacaaccatgatctcctggccgggcgtggtggctcacggctgtaatcccagctctttgggaggccgaagtgggcggatcacgaggtcaggagatcaagaccatcctggctagcacggtgaaaccccgtctctactaaaaatacaaaaaaaaaatactagccgggcgtggtggcgggcgcctgtagtcccagctactcgggaggctgaggcaggagaatggcgtgaacccaggaggcggagcttgcagtgagcccagttcacgccactgcattccagcctgggcgacagagcgagactccatctcaaaaaaataaaataaataaacaaccatgatctcccgtttcaagttgccaccactaactgtagccccgctgacgggggcactggccttgcagactgtccaggacggccggcagtttctaaagtatgttgaccccaagctgggagtcccactgccagagagagactacgggggaaactgcctcatctacgacccagacaatgagactgacccctttcacaacatctgggtaagacgccgggggccctgaggcgagcccctccccaggtgtggccccgtgccggaccaggcgccatccacgctcctgcctcgcacccctcagcccacacttggggtctcctggtgcagagatgtgctgaggccctgtccgtctggatggtgctcatggtgggcagggggcccctgctctctaggctgtcgtggacgtggtctccacaggccacggcagcacctgtgagtccctggccttcttcccggggtctggcaggtgctgctcaggtgtgggctgatctgccggtgtggggagtgggggtggctgtgccccagggtcaagggtcataccctgtcgcccacaggacaagttggatggctttgttcccgcgcactttcttggctggtacctgaaggtacggcacctcctcttcccggcctccccgccccggttctgaggcctgccgtgggctctggaccgtttctgtccatggagttgagctcagggtgctctgagtgtggtgggagggtgtcgcactgcagccacccagaggttcgagaagccgtggggctcccggacctcccagaagccctgatcctggtcgggtccccgctccgtcctcagggtcggggcggtggaaagaggcggcagggcaggaagtcccgcccctgcctgggcttgggcactgccccatcccacttctgagggaccctgtgctacctatggggctaagagcagtgcctgcttgaccctgcagcccaccctggcagagtttggtgtcaggccccgggcacggggatgctgccttgtttgctgacagtcgtacatcgaggctgctggaggggcagccacccaccccacgctcaccctgagacctcactgggggccctgccagtgctgtcgactccaagaatgctgccagccggggtgggggctgcacgcacccgtgggcagggccgggcgtggcctgcgtcccatactctggctgccagccgggtgggggctgcacgcacccgtgggcagggccgggcgtggccggcgtcccatactctggctgccagccggggtgggggctgcacgcacccgtgggcagggccgggtgtggccggcgtcccatactctggctgaccctggcgcccacagaccctgatgatccgagactggtggatgtgcatgatcatcagcgtgatgttcgagttcctggagtacagcctggagcaccagctgcccaacttcagcgagtgctggtgggatcacgtaggtgccagcacagcccccggggcagtcggtgcaggctgaggggcattctcggaacccctgtgcccagcgcggcccctggaccccctcattctccccggggggcagtgggtgcaggctgaggggcattctcggttcccctgtgctcttccggggtcctcctcggggggctcgttacccctcacccctgcaacgagtgctggcccctccctgcagtggatcatggacgtgctcgtctgcaacgggctgggcatctactgcggcatgaagacccttgagtggctgtccctgaagacgtacaagtggcagggcctctggaacattccgacctacaagtacgtcgtgggggctgcgagggcagggccgggtgggggttacctggaggcagcctcagcgtccgtgctccagcagaccccgagcaccaggcccgtccagtgtgcggctcaggaggggtgaccgtggggctttgcctcctggaacctccctctgacctggtgtcactcaagcccggccgcccctcacagtggccatggcgtctgacccacgtacctccctcctcaatccctggccggcctggcgcaggggctgtgggatcattccgtgcttctccctcccttggttgctttggttatgaaatagttgcaggtactttgtcattatgactttggaatttaaaaaagaaacagaagtctaaggaaaggcctgggggacgggggtctcccctcctgcctgtgggtgccccggctctgcctggctctgcagacatggctagctcacggcaccgtggagcgccctctgaggcgctgcagccactgctcaagctggaagagactgaacagcagagggccgtggagaagcagggcttgtagctgggtggccagacctcggagaacagccgggcagcagctgggtaaccaggaacagagtctgtggcccgatggcacagggcggggcggggtgaccaagagcagagctcgtccgatggcacagggcggggccgggtgaccaggaacagtctgttgcccgatggcacagggcagggttcggtgggctgccttcctcaggctgccggctctgtggttcccaggggcaagatgaagaggatcgccttccagttcacgccgtacagctgggttcgcttcgagtggaagccggcctccagcctgcgtcgctggctggccgtgtgcggcatcatcctggtggtaaggccgggctgcctcgcgacggcgcggcgggcggggggccagagctggtgctcaccctctcctcccctagttcctgttggcagaactgaacacgttctacctgaagtttgtgctgtggatgcccccggagcactacctggtcctcctgcggctcgtcttcttcgtgaacgtgggtggcgtggccatgcgtgagatctacgacttcatggatgacccgtgagggctgcggcagtccgggtggagacacccccggggggcaggggccggagggctggggagcagagcctgggaggccggagcctgggcaagtccgcctggaggaccctgcggggcccgggacgctgaaccccctgctgcccctgcaggaagccccacaagaagctgggcccgcaggcctggctggtggcggccatcacggccacggagctgctcatcgtggtgaagtacgacccccacacgctcaccctgtccctgcccttctacatctcccagtgctggaccctcggctccgtcctggcgctcacctggaccgtctggcgcttcttcctgcggtgagtcagggcagggcgcgtatgttctgaaggagggccgctgtccgggtcccttggcacaggcactgtgggagtttggtgtcgttggtgtctcactgtccctgcttcaaccctctggccgcctctgcgggaggcgcctttcctgacccagccctcggggccttcgctctgcactgacagatccaggctcctcagggctccagtctgccacggctgccgtcccagggccagggtacccggcacccacccagtccattccggacctccacagggactaggtgccagctgtccatggggcctgcagtggggctggtgtgggggcaggtggtgacgctgcatcccgctccccagggacatcacattgaggtacaaggagacccggtggcagaagtggcagaacaaggatgaccagggcagcaccgtcggcaacggggaccagcacccactggggctggacgaagacctgctggggcctggggtggccgagggcgagggagcaccaactccaaactgacctgggccgtggctgcctcgtgagcctcccagagcccaggcctccgtggcctcctcctgtgtgagtcccaccaggagccacgtgcccggccttgccctcaaggttttttgcttttctcctgtgcacctggcgaggctgaaggcgaggggtggaggaggccccagcacagcctcatctccatgtgtacacgtgtgtacgtgtgtatgcgtgtgtgtacgcgtgtgtacgcgcgtgtgtacacatgcgtggccgcctgtggtgtgcacgtgtgctctgggctccgaggcttctccagagctgggagctggctggcgtggcaagggcatgctctggggcagtgtgtccctcaggaaccagggtcctccctcccctttctgcctggtcagccccgtggcctctggcccaccaagctccctgtcacccagccatggtgtggtccaggcagggacatctcggtaccctttctgcactccgtgggccctgggtgcgctgaggcctggaggcgtctacactggctccacatccacttcccccgcagctcgtgtgggcgctcgtccacaaacactccgtggctgagaggcagcggatccaggcagcgatgctgagccacctcctccgagccttcctttcacacagaccaccccggaggacacgtggatgatggggtcagagatcactgagctgcccctcaagggggcctggaacccgggtgctggggtcatgctgcctccgtggctccaaggtgagggtcatcttcacgagcaaagagaaccaataaagtgacaacgaacgtctgaggcttccagccctccccccagctccccgtgtcctgctttggggtccagtgcagccctccagcctgccctcatgcccagtgcccacttggggaaaaccacacagaggacaggaggcactcagcctctgcacctgagcaaagacttggcgcctgccccgccccaccccccagagagagcaggtgccagatgcagcccctctcccattctccaggagggtccaggtggcacccaccctctgctgcgcttgtccaagggctggcggccactgggcagtggacacaggattcctggggtactgtgtttgtcccaggctggcagacactgggcagtggacacaggattcctggggtgctgtgtttgtcccaggctggcagacactgggcagtggacacaggattcctggggtgctgtgtttgtcccaggctggcagacactgggcagtggacacaggattcctggggaggggcagccgccttctcgggccactatttttatgtttttttttctttttctttccttcctttttgtggagaacggggtctcgctatattgcccaggcagatctcgaactcctgggttcaagtgatcctcctgcctctgcctccctgagagctgggattacaggcgtgagccaccatgcccagcttgagccactatttttttgagatggagtctcactctgtcagccaggctggagtgcagtggcgtgatcttggctcactgcaacctctgcctcctaggttcaagtaattctgcctcagcctcccaagtagctgggattacaggcgcatgccaccatgcccggctaattttagtacttttagtacagatggggtttcaccatgttggccaggctggtcttgaactcccaacctcaggtgatccacccgccttggcctcccgaagtgctgggattacaggcgtgagccaccgcgcccagccaggccactatttctaaaactttaccatgaaaattttcaaacacaaatggagagaaaaggggttccctgagccctgttcctagctggagggggtagtaaggggtgttgatggctgattggacacagcctggggggactccgggagccatttgcacccacacccccgggtctgcctcggggccccgggcgtcaaaaagctttacttttagtatttttccttgactacttttggggaaaatttcaagccctctaagtcaagggctgtaatgtggagcacacacaagagcagcctctggggctcagcaggaagacgtccggtgtggccaccgcgcctagcagtcctctttccagtcacggccactcacagctttggcctccgtggccctgcacggatgagttcttccagctgccctgccctgcgtgctgcaggacacatggggccttagcattctgctctttgcaggtggcagctttgatcgctcaggaggaactgccacctgatctccccactgcaggggcccccactccccccctcacgcgctgcgggtcctgtcactccacccacgctgtccatccccgctgatgctctgagccaggtggtagcaggtgggggtggcgccccgctcacggtcaccgtctgctcttcccgaggggggcgaggcagggcttgtgattaaagtcctgtgttccggcgcccgtgtcccaaaggcagcccctgggagcccttccggcagcaactcaaccccagacagcgcccaggggctctggttcctcacgcgctgagatgctccggactcaccttgggcatctctcgccccaggcctggcgtcacccatttccccaaggagctctgttccccactggaggtcatagttaagaaactaagatcctgggtcactttattttacttatttatttttgagacggagtctcactctgtcgccctggttggagtacactggcgtgagctcagctcactgcaacctccacctcccaggttcaagcgattctcatgcctcagcctcccgagtacctgggattacaggcatgcgccaccatacccagctaatttttgtatttttagtatagatgggttttcaccgtgttggccaggctggtctccaactcctgacctcaagtgatccgcccacctcagcttcccaaagtgctgggattacaggcatgagccaccgcgcccagcccctgggtcactttaaagggctttatagccaggtgcaatggctcacacctgtaatacccgcactttgggaggccaagaccaaacaccagcctcggcaacatggcaagaccctgtccctacaaaaagtacaaaaattagccaggtgtggtggtgcatgcctgtagtcctagctacctgggaggctgaggtgggaggacggtttgagtcccagaggtccaggctgtagtgagccaagattgcgccactgcactccagcctgggcaagagagagaccctgtccaaaagagggggattgccaggcagcttctttgcaatgaacttgtagttgctgactcagcatcggacctttgaaagctggtgagcgtccccctcttggcttggcagggcagggcaccccgggctggcccaccttggtcagctgtccacccgtgggcaagatgggctgccccatcatcccacacagagctggggcgagcactgggctccgggcaggaacccgggccgcgctgggccgcgctgggctgggctgggctgggctgggctgggctgggctgggctggggggcagtcagggcagtgctgggggctcctgaggctccggggtggaagctgcgggagcagctgggcctgcaggcagctcccagcaggcgtcaccctgcacgggcaacagagccaaggggcatccctccaccctgggcagggcctgccctgtgctccccagtgtgggtgggtgcagctcaggggacccagctgagcacagccagggccttgggctgcttccctggtgcggggtcccttaggcagggagagaagccaagtggggtggtgtcgtctccaatgccagcgcctcgcaaggaccccaggaaggacaagagcctctcctgccaagaaagtgctttaatgattataaagtgtccaaaatatactggcagaaataagcggatctgagcgtttctcttcaaacctaggatatgcagggtgagagcatggcaggggctggtgggccccagggttgcctcgaggccggtcgtccagggagagcagcagcaggaagagcctcaggagatgaccctcagggatggcttgtccttctccagggcctgcagccggtcctccatctcctcagaccagtaaatgtcgtacaggctgcacacaggccagaagggaggcatgggcccgtgtcctcccccacccccgccttcctccctgggcagccctggccgcaccacccgcccagcgcgtgcacatacaccagctgctccaggaggcagcccggctgccggacgctctccaccagctgcaggatgccggcgtcccccaggcagttgttgctgaggtccagctcacgcaggctgtggttggccaacagggttgcggcgaggctgctgcagctgctgtcactcacatcgcagtcggccaacctgggtgaagcagggcgggggtcagggtgccgggcgtgcctggcaccgcactgaccggcagagcaggcctgggcctggggggcgcgacggacacctgtgctcggcaactcaggaccctcaggtggggccgtccccaaggctcaccgtccctgtggccctgggcaggttccccaccacggacaaggaaggcacagacaagcgaggcacaagcagcctcactcgcctgagatcttctgcagggaggagaaaggacaggagagagatgtcgtccacccagagagccacacccacccccttgtcacctcgacaccgtctggctgcgtgggcttcaaaggagaagccagccagagactgaggagcagctgtggggaaacgagggtatggagggtaccaagacaagaacagagtggacaacagactttaggctccagagagagacaagagaacgggtcagacaaaagaggatgggatagagaagacccaacacccacttcccggggtggagccgccacaggccggacagcagggccaaggagttgcactggacctctccaaggtgggggccagggaagctgcaggacccccaccctgtgagtggctcagggggaacaagtctgcagtgaccaggacccaaggttcctctccacatctggaacacccacaaggtcctggcagccaggatggtgtcccctggcagggaactgaaaatcccccatcaggaggaagccctcgagaaacgcagccatgactcggcctgcagggctcactgtccagggctcccgggcctcactctgcacctggtgcccagcccaggatgaccagccacccacggaaagcccctggcgagaggcacacgggaaacagcaaacaaaagacaaaacactgagggtggaaattcagtagactggctggtaaatgagaacatctcccaaaaataaaacaaaacatcgaaaagaaaatttggagaacataattagagggtcactccacaagacatcaggacaggctcatgggcacaccaaaaaagaaacataagaaaggagagagaaaaaaatcaccaaaggtatattttcttagtagaaccaagtatccagcacaaagaaccaagacccccatcaaggccaagcacatggaacccctaacacagtgaacaaagagagcttgaaaagctgccaacgagaaaaagcagatcgtgcacacaaggtcacagtggctcacgcctgtaatcgcagcactttgggaggctgaggcaggctcatcacttgaggtcaatagttcaagaccagcctgcccaacatggtgaaaccccatctctactaaaaatacaaaaattaggccaggcgtggtggctcacgcctgtaatcccagcaatttaggaggccgaggcaggcggatcacgaggtcaggatatcaagaccatactggctaacacggtgaaaccccatctctactaaaagtacaaaaaattagcctggtgtggtgacgggcgcctgtggtcccagctactcgggaggttgagacaggagaatggcatgaacttgggaggcggagcttgcagtgagccaagatcgcaccactgcactccagcctgggcgacagagcaagactctctcaaaaaaacaaacaaaataaaattagccgggcataatggtgcatgctatacccggctaaatgatccaaggacagaacaggggcacaagaccccaaaaattacctcctgcaaaaccttttcttagaaagctgcaaaagaacgtgctttaacaaagaaaacaaatctggaaaaacatcctgacacaggcggggttcccgcaagggagaaaggtgggcggggcttccaggaagatggaccacagggtggccaggtaggctgcagctccgtgaagctctcaggcttcatgaaacatgacctctgactttcagagttaaaatgagaactaagccagagtggtgccgccagcccgcctttcccagtacatgaacatgcaccctcactctcgcccatgtgctcacactcacatggacactcgtgctcactctcgcccatgtgccacactcacgtgctcactcgcccatgtgctcacactcacatggacactcatgctcactctcacccatgtgctcacacacggacactcgtgctcactctcacccatgtgctcacgtactctcgcccatgtgctcacacacggacactcatgctcactctcgcccatgtgctcacacacggacactcgtgctcattcttgcccatgtgctcacacacggaccctcgtgctcactctcacgtgctcacacacggacactcgtgctcactcacccatgtgctcacactcggacactcgtgctctcacccatgtgctcacacacggacactcatgctctctcgcccatgtgctcacacacactcgtgctccctctcgcccatgtgctcacactcacacggacactcgtgctcattcttgcccatgtgctcacacacggaccctcgtgctcactctcacgtgctcacacacggacactcgtgctcattcttgcccatgtgctcacacactgaccctcgtgctcactctcacgtgctcacacacggacactcgtgctctcacccatgtgctcacacacacgtgctcacccatgtgctcacacacggacactcgtgctcattcttgcccatgtgctcacacacggaccctcgtgctcactcacgtgctcacacggacacgtgctcactctcacatgctcacggacacccatgctcacactcatatgctcacacacgtgctcacactcgcctcacccatgtgtgctcacatacacacggacactcgtgctcacacagatactcgtgcactctcgcccttgtgtgcacacacgggcatatgatctcccaaatgtgcatactcgtgtccctcacacactcaccagagcacccgcagcacagagccaggctggcccaggccctggcacagctcccgcacgcccgcatcctccagcctgttgttgcttatctgtagctccaggagaaacctgttctgggccagcactgagctgaagtgggagcagcaggcggctgtgaagctgcaggacttcaccctgtggacacagacaggactgacgcctggcaggggcccaggctggcccacagctgcgactggcccttcccctgaaggccccacgtggacctgagcaaaaacatctgacagcctcccagcaagtgggcacctacacctggtccttggccccaagcactgttcccatcaaaccacaggctgctccctggcctatgcattctgaaggtcggagctgagcccagcagcttccctggagtcgctcactcctcccctggtctcctcggtcaccctggccctctcttgggcgacagggccctgccccgacagccacactcaccacagcgactccagctggcagccaggttccagcagggtctcacacagcagtcgggcaccctcatcccccagctcgttgccggccaggctgagctccttcaggctctccttggccctgaggacacggcacagatccccgcagcccttggcagtgatgccacactcccagatcctgcaggacatggaccaccacagactttcctcagcaccgtctcatggcctgagatgagcccaggggcgggggagagctctgaggacggcccgccgcccgaccctccgggaaggaggcctcgcggagatgactcaccacagggtcctgagcctggagctggggtggagcagccctgggcacagctccgccatgcccacatcacccagcttgttgctgcccagggccagctcccgcagcgaggccttggaggccacaatgccgcacaggtcccggcagttgtctgatgtcacaccgcagctctccagcctggggacacgggtcacacgtgaggcagcacgggaccccccctagcccacaccccgcacccccccaaggcccagtgcctacttgagcgcctccagctggcagggggagtccttcaggccctggcacagcacacggacgccagcctcattgatgtcgttgttgctaaccgtgagctccttgaagtccggcttggccctgagcacggaggccaggggctcgcagctggcagccgagaggctgcaatactccagcctgggggacagcagagctcagcaccacacaggaatgtgcaccagccaagggtgtgataccagggagcacggggtgtgctggtgtctcatctcccctcagtcttctgcctgggcatcaggtgtcagtgctgagggacccccacagactcatccagaggcccgggcctctgtggacaccggcattccttctggaaacccctcaccccctcccggacctcagactttggggcccaaccaggcccgggagaaagaaaccagcctctggagggcagggccacctgcacgtcccaggctgtggtcaactcacaatggccgggtcccccacacacactgaggcggtgagtggaacctgactcacggccaggcatctgttcccaccgtcgggtcctggggcagctgtgccttgcaaaggacaactggatggggagggagggtgatgacagatccccccagccccagcatcatggggagaggagagcaccacaaggccccagacccagcatcatggggaaaggagagcaccacaaggcccctgtgacctgagtcccctcctcacggctcctggcaggcgatgttctatgtagggggctggctgggggacaggcagcggccagcatgggccctggggcaggacacaaactcactgcagcttttccaggcggcactgggggtccaggagtccttcgcagagcagctgcaggcccgcatcccccaagaggttgtcgctgaggtgcagctcctgcagggtgggcagggtgcgtagtgtgctggacaggaccccgcagccggcccccgtcaggcagcagttctggaggctggagcatacctggctgtcagcagggctcccctgagccaagctgccacgcccttcgcctgccagagcccagagcccggagcagcactcttcaggcggcaggtctatacctgctccttccctggacggggctctggggtctggggtctccaggccgagtgaaggagggcacgcatgtggctcgacccagggaaaccttgtctgcagacacacctttcagtgggggtctgtggtgatgctggaaggctagggatggcgggcagggccagatcttgggtgcgggggctgggataaggcaggaagggccctgtcccccccgctgtgagaccgccaggcctgtgtgcctctggctgatgttggaaatgtctgctgccactgcctgtccacctgcagctgcccacgcgcccctggcggctctgtcccctgctgccgggctaccaaagcagactgcaccaggccagaggcagtgccaggccccgcctcacctcagcttctggatcttgcaggagggggtctgcaggccctggagcacgcaatgcacgccgacatcgcccagctcgttgctgcgcaggttgagctctgccagtgcagggttgactcgaagtgcagagctgatgtccttgcaccgtgcttccgtgaggccacagtcgtccagcctgtgagcagaccccagggtcatgtggaccacgcagacagcactggcctcagcctccaccaccaccccacgtgcaggttacaacctatcagtgggcccagaagacagcaaggcaagtcacacaagacatttcagaaatgaaacaaaaaggaggaactgttccatgaaagttttgtttaagatgctcgcacgtggccaggcgcggtggctcacgcctgtaatcccagcactttgggaggccgaggcaggcagatcacctgaggtcgggagttcaagaccaacctgaccaacatggagaaaccccgtctttactaaaaatacaaaagtagccgggcgtggtggcgcatgcccataatcccagctactcgggaggctgaggcaggaggatcacttgagcccaggaggttgaggccgcataagccatgagggagccactccagcctgggtgacagagcaatgccctgtctctaaaaataaaaagaatttaaagtatctctcgaaggcactgatcagtcacaggaggaaaggcagtggcgtcacagtggagagggtggcagacggcgcctgtgacaggacgctcctggcaggccccacggcatctccctgcattcctgccaaaactgtaggacttcaaccacaagaaaccaccagacaagccccaacagaggacgtcctgcaggagcctggccagaccctcagaccaccaagaacccagagagacgaggggacagtcacagacgggagagggctaaggagacagagggctgagggccacgcaatcctggaccagtgaggaagacgaaaagggcagggcggaaaagcagaccctgcctggaggtgctgggccagagctagc

SEQ ID NO: 996 - DNA, 1999 bp, Homo sapiens
acaatgcaccgcacaccctttactggccggccccgcgctgctctcctaagaccccgcgggccagcgccgcgaccccttcccagcgctcctcgcgctgtgtgcggcgcgtcctctcgccggtgacccggtgtgcgtggggtcgaggcgccgggcggagtggctccgggccgaaacgccatgcggaggggcgagcgcagggacgccggaggtccgcggcccgagtccccggtgcccgcgggcagggcctcgctggaggagccgcctgacgggccgtctgccggccaagccaccgggccgggcgagggccgccgcagcaccgagtccgaggtctacgacgacggcaccaacaccttcttctggcgagcccacaccttaaccgtgctcttcatcctcacctgtacgcttggctatgtgacgctgctggaggaaacacctcaggacacggcctacaacaccaagagaggtattgtggccagtattttggttttcttatgttttggagtcacacaagctaaagacgggccattttccagacctcatccagcttactggaggttttggctctgcgtgagtgtggtctacgagctgtttctcatctttatactcttccagactgtccaggacggccggcagtttctaaagtatgttgaccccaagctgggagtcccactgccagagagagactacgggggaaactgcctcatctacgacccagacaatgagactgacccctttcacaacatctgggacaagttggatggctttgttcccgcgcactttcttggctggtacctgaagaccctgatgatccgagactggtggatgtgcatgatcatcagcgtgatgttcgagttcctggagtacagcctggagcaccagctgcccaacttcagcgagtgctggtgggatcactggatcatggacgtgctcgtctgcaacgggctgggcatctactgcggcatgaagacccttgagtggctgtccctgaagacgtacaagtggcagggcctctggaacattccgacctacaagggcaagatgaagaggatcgccttccagttcacgccgtacagctgggttcgcttcgagtggaagccggcctccagcctgcgtcgctggctggccgtgtgcggcatcatcctggtgttcctgttggcagaactgaacacgttctacctgaagtttgtgctgtggatgcccccggagcactacctggtcctcctgcggctcgtcttcttcgtgaacgtgggtggcgtggccatgcgtgagatctacgacttcatggatgacccgaagccccacaagaagctgggcccgcaggcctggctggtggcggccatcacggccacggagctgctcatcgtggtgaagtacgacccccacacgctcaccctgtccctgcccttctacatctcccagtgctggaccctcggctccgtcctggcgctcacctggaccgtctggcgcttcttcctgcgggacatcacattgaggtacaaggagacccggtggcagaagtggcagaacaaggatgaccagggcagcaccgtcggcaacggggaccagcacccactggggctggacgaagacctgctggggcctggggtggccgagggcgagggagcaccaactccaaactgacctgggccgtggctgcctcgtgagcctcccagagcccaggcctccgtggcctcctcctgtgtgagtcccaccaggagccacgtgcccggccttgccctcaagctcgtgtgggcgctcgtccacaaacactccgtggctgagaggcagcggatccaggcagcgatgctgagccacctcctccgagccttcctttcacacagaccaccccggaggacacgtggatgatggggtcagagatcactgagctgcccctcaagggggcctggaacccgggtgctggggtcatgctgcctccgtggctccaaggtgagggtcatcttcacgagcaaagagaaccaataaagtgacaacgaacgtc

SEQ ID NO: 997 - protein, 487 aa, Homo sapiens
MRRGERRDAGGPRPESPVPAGRASLEEPPDGPSAGQATGPGEGRRSTESEVYDDGTNTFFWRAHTLTVLFILTCTLGYVTLLEETPQDTAYNTKRGIVASILVFLCFGVTQAKDGPFSRPHPAYWRFWLCVSVVYELFLIFILFQTVQDGRQFLKYVDPKLGVPLPERDYGGNCLIYDPDNETDPFHNIWDKLDGFVPAHFLGWYLKTLMIRDWWMCMIISVMFEFLEYSLEHQLPNFSECWWDHWIMDVLVCNGLGIYCGMKTLEWLSLKTYKWQGLWNIPTYKGKMKRIAFQFTPYSWVRFEWKPASSLRRWLAVCGIILVFLLAELNTFYLKFVLWMPPEHYLVLLRLVFFVNVGGVAMREIYDFMDDPKPHKKLGPQAWLVAAITATELLIVVKYDPHTLTLSLPFYISQCWTLGSVLALTWTVWRFFLRDITLRYKETRWQKWQNKDDQGSTVGNGDQHPLGLDEDLLGPGVAEGEGAPTPN

SEQ ID NO: 998 - DNA, 2457 bp, Homo sapiens
acaatgcaccgcacaccctttactggccggccccgcgctgctctcctaagaccccgcgggccagcgccgcgaccccttcccagcgctcctcgcgctgtgtgcggcgcgtcctctcgccggtgacccggtgtgcgtggggtcgaggcgccgggcggagtggctccgggccgaaacgccatgcggaggggcgagcgcagggacgccggaggtccgcggcccgagtccccggtgcccgcgggcagggcctcgctggaggagccgcctgacgggccgtctgccggccaagccaccgggccgggcgagggccgccgcagcaccgagtccgaggtctacgacgacggcaccaacaccttcttctggcgagcccacaccttaaccgtgctcttcatcctcacctgtacgcttggctatgtgacgctgctggaggaaacacctcaggacacggcctacaacaccaagagaggtattgtggccagtattttggttttcttatgttttggagtcacacaagctaaagacgggccattttccagacctcatccagcttactggaggttttggctctgcgtgagtgtggtctacgagctgtttctcatctttatactcttccagactgtccaggacggccggcagtttctaaagtatgttgaccccaagctgggagtcccactgccagagagagactacgggggaaactgcctcatctacgacccagacaatgagactgacccctttcacaacatctgggacaagttggatggctttgttcccgcgcactttcttggctggtacctgaagaccctgatgatccgagactggtggatgtgcatgatcatcagcgtgatgttcgagttcctggagtacagcctggagcaccagctgcccaacttcagcgagtgctggtgggatcactggatcatggacgtgctcgtctgcaacgggctgggcatctactgcggcatgaagacccttgagtggctgtccctgaagacgtacaagtggcagggcctctggaacattccgacctacaagggcaagatgaagaggatcgccttccagttcacgccgtacagctgggttcgcttcgagtggaagccggcctccagcctgcgtcgctggctggccgtgtgcggcatcatcctggtgttcctgttggcagaactgaacacgttctacctgaagtttgtgctgtggatgcccccggagcactacctggtcctcctgcggctcgtcttcttcgtgaacgtgggtggcgtggccatgcgtgagatctacgacttcatggatgacccgaagccccacaagaagctgggcccgcaggcctggctggtggcggccatcacggccacggagctgctcatcgtggtgaagtacgacccccacacgctcaccctgtccctgcccttctacatctcccagtgctggaccctcggctccgtcctggcgctcacctggaccgtctggcgcttcttcctgcgggacatcacattgaggtacaaggagacccggtggcagaagtggcagaacaaggatgaccagggcagcaccgtcggcaacggggaccagcacccactggggctggacgaagacctgctggggcctggggtggccgagggcgagggagcaccaactccaaactgacctgggccgtggctgcctcgtgagcctcccagagcccaggcctccgtggcctcctcctgtgtgagtcccaccaggagccacgtgcccggccttgccctcaaggttttttgcttttctcctgtgcacctggcgaggctgaaggcgaggggtggaggaggccccagcacagcctcatctccatgtgtacacgtgtgtacgtgtgtatgcgtgtgtgtacgcgtgtgtacgcgcgtgtgtacacatgcgtggccgcctgtggtgtgcacgtgtgctctgggctccgaggcttctccagagctgggagctggctggcgtggcaagggcatgctctggggcagtgtgtccctcaggaaccagggtcctccctcccctttctgcctggtcagccccgtggcctctggcccaccaagctccctgtcacccagccatggtgtggtccaggcagggacatctcggtaccctttctgcactccgtgggccctgggtgcgctgaggcctggaggcgtctacactggctccacatccacttcccccgcagctcgtgtgggcgctcgtccacaaacactccgtggctgagaggcagcggatccaggcagcgatgctgagccacctcctccgagccttcctttcacacagaccaccccggaggacacgtggatgatggggtcagagatcactgagctgcccctcaagggggcctggaacccgggtgctggggtcatgctgcctccgtggctccaaggtgagggtcatcttcacgagcaaagagaaccaataaagtgacaacgaacgtctgaggcttccagccctcccccc

SEQ ID NO: 999 - protein, 487 aa, Homo sapiens; identical to SEQ ID NO: 997

SEQ ID NO: 1000 - DNA, 1980 bp, Homo sapiens
acaatgcaccgcacaccctttactggccggccccgcgctgctctcctaagaccccgcgggccagcgccgcgaccccttcccagcgctcctcgcgctgtgtgcggcgcgtcctctcgccggtgacccggtgtgcgtggggtcgaggcgccgggcggagtggctccgggccgaaacgccatgcggaggggcgagcgcagggacgccggaggtccgcggcccgagtccccggtgcccgcgggcagggcctcgctggaggagccgcctgacgggccgtctgccggccaagccaccgggccgggcgagggccgccgcagcaccgagtccgaggtctacgacgacggcaccaacaccttcttctggcgagcccacaccttaaccgtgctcttcatcctcacctgtacgcttggctatgtgacgctgctggaggaaacacctcaggacacggcctacaacaccaagagaggtattgtggccagtattttggttttcttatgttttggagtcacacaagctaaagacgggccattttccagacctcatccagcttactggaggttttggctctgcgtgagtgtggtctacgagctgtttctcatctttatactcttccagactgtccaggacggccggcagtttctaaagtatgttgaccccaagctgggagtcccactgccagagagagactacgggggaaactgcctcatctacgacccagacaatgagactgacccctttcacaacatctgggacaagttggatggctttgttcccgcgcactttcttggctggtacctgaagaccctgatgatccgagactggtggatgtgcatgatcatcagcgtgatgttcgagttcctggagtacagcctggagcaccagctgcccaacttcagcgagtgctggtgggatcactggatcatggacgtgctcgtctgcaacgggctgggcatctactgcggcatgaagacccttgagtggctgtccctgaagacgtacaagtggcagggcctctggaacattccgacctacaagggcaagatgaagaggatcgccttccagttcacgccgtacagctgggttcgcttcgagtggaagccggcctccagcctgcgtcgctggctggccgtgtgcggcatcatcctggtgttcctgttggcagaactgaacacgttctacctgaagtttgtgctgtggatgcccccggagcactacctggtcctcctgcggctcgtcttcttcgtgaacgtgggtggcgtggccatgcgtgagatctacgacttcatggatgacccgaagccccacaagaagctgggcccgcaggcctggctggtggcggccatcacggccacggagctgctcatcgtggtgaagtacgacccccacacgctcaccctgtccctgcccttctacatctcccagtgctggaccctcggctccgtcctggcgctcacctggaccgtctggcgcttcttcctgcgggacatcacattgaggtacaaggagacccggtggcagaagtggcagaacaaggatgaccagggcagcaccgtcggcaacggggaccagcacccactggggctggacgaagacctgctggggcctggggtggccgagggcgagggagcaccaactccaaactgacctgggccgtggctgcctcgtgagcctcccagagcccaggcctccgtggcctcctcctgtctcgtgtgggcgctcgtccacaaacactccgtggctgagaggcagcggatccaggcagcgatgctgagccacctcctccgagccttcctttcacacagaccaccccggaggacacgtggatgatggggtcagagatcactgagctgcccctcaagggggcctggaacccgggtgctggggtcatgctgcctccgtggctccaaggtgagggtcatcttcacgagcaaagagaaccaataaagtgacaacgaacgtctgaggcttccagccctcccccca

SEQ ID NO: 1001 - protein, 487 aa, Homo sapiens; identical to SEQ ID NO: 997

SEQ ID NO: 1002 - DNA, 80969 bp, Mus musculus
  misc_feature (1)...(80969): n = A,T,C or G
atcatccgagccgagtctgtagaggaggaaggtatgtgcgtgcccccagagcttcacgcagcgacgggccacaccggctgagaaatctgtgccctgtctttcctctcccatcatggtagttgcctgcagtgttggaaaataagcccaggctaatccccccagtaaccacccgggtacagtgaagtgacaagtctgagacagctgtgtgctctcgtgcctcaggcctccctgcacaccaggagaattcacgtggtcttaactctagagctggccaaagccctacgttctctgtaacttaacatcactgttctagagtccatagtgtcccatcatcctctaatccacacacctcagaatggggtctctgtaatcctgtctgtggtaaagagtcacttgtccttcggtcctggtacagagagcgctgcttatacatagtgaaataagtaaatacacagattaatacacaaaatgaattgttttaaatcatgtgaaataattttcaaatagagtactttaagttgttcaattattcatcacttcaaaatgatagattccttccccaaatcagtactggagtactgtacgatatttagtactcagtgctcagtactagagccttgtgcatgctaggctctagtactcagtactgagtactaaatattgtactctgccagtgagccatatccacagtcctttcggcttcctattttgagaccaggtcttaccaaactgcccaggttggccttgaactcactccataacccaggcagtcaagaattcacgatccccctgcctcagctgccccaagtagctgttccacatgcctggcatgcgaacacattttctttgactgcaaagacccttgttttttaggacgcactgcaggtcgtggtcgagtctcagcacttatatggtagatttccagaggaaacagttatctttaaaactctctatggtttctaggattcaaaactgagttttctttaaagagcgttttctcagttcttagctgtaaagctaagaaccctcgctgaattcttcgtgtaactctaaatcagaattctgtatcctctgagtctccctgagtgtaagaggactgtctcaccttggttaggaagcactcagcagacagaccccactgaggggctggccagccactggacacccggtacccatgtcccgccctagaggaggggcggctgtgttccacatcctcagggtcnnnnnnnnnnnnnnnnnnnnccctcccccctcaccatacagtcagctttcagaaggctggcagcccagctggagcttgggcctggacacctgtgaaaagcctgtcctggagaagagctctggtcatgttggccctctagtggcctcttcctgcacatgcctcacccccccccccccacccctccatgtcttgcctgatgaaaagggccccaccttaattccccggaagtacagacttgcagagaacagcttcctgattagtgggctcgggaaagtgtctgccacatctagtcaggtcaggaggcccgtgagccttctggtgctccttcgccatagccatggcccagaaagcttgggtagccagggtgtggttgcgctgctgaccaggtttcacacctggcagctacacgtgctgtttggcatccaactacagggctgcagcccctgtggccaggacagcactgtccctgtggtggtgggggggggtctccatgttgtccgcactaggttcagcctcttggcctacagctggcttgtgtatggttggaaagtgttgggagcaattgcttattgcttacccataaaataagtccttttctgagggctcttcatgggcggcattgccagtccaggaatccagcctttgcctgaggtcatccagtcagctacccccaggggttgccctctgccgctggctgagcagggaggcagcccattggaggctgggcaagccatatgcacacgcttgtgccagatgacagcaccgtctcctgtgagcccgtcctctgagctggcttggtctgcacttctcccagcctgctctttgacgggccttgctcatctgcccattggtgagaaggaagcatgagatacatttaaggctcagaagccaactgtcgaactctgcccatctttccttttcacagaagcagcagaaactgtgggagatgggcagtgcaattccctaagctccgaggaccttccacacaggtatctctgctgacgctggctcccccatgctatgccctttccttgagtgctggacttaccccctctggactctcagctgcaggaagacactcgggtgctattgccttgggtcctacccacctctaggccctcagtgtgccacagcctccaagccccaccccgcccccaccacagaagcatcagtgtaaactgtgagttggtgaacagagctgtgtcctcccagtcatcaagccatgtcacgccggcatggctgtggccagtcttaacactctgtatcttccctttagtccttaggattaaagtcccccaaacttaagattctagaaatcactggaatttctaggaagaaataagcccatgacaaggacttttcacctagtgggaatgcagaatttgggacccacaatcgccacattttcagaaactgtagttctatacataattagaggttagtaatcagtcccactgaggagacagagacagaagggtcaagagttctagactagactaggccacatagtgagaccttgcttccccaaacttaaaccagggcaggggtggtggacttaatcagtaaagtgcttgccacacaggtgtgaggacatgagttcaaccctcagtacccacataaaaaccaggttcagggcacaaacctgtaatcccagcatttggagaggtggaggcaggagaattcctcggggcttgctggccagccagtctagctaaatcagtgggctctgggtaagtcataccatctcataaaataaagtagtgagtgatggaaagactcccaatgtgtggcctccactcacaacatgcatgcacacccagacacaaatgtgcacatgcgtacacataccaccaccaccaacaacaaaataatattcagatgcaactggaaacttgaaagagtgaaagagccatcccttccctatggagtcccatccctatggtcagcaaaggaccatgtctgccctgtgtgcacatctgtgggtgcctgctgtaccatgtctcattccccagcggcccgccaagcatctgacctttcctctctgtggaaatgcccttacctgtctgctgtctccttccccatcagctactaagcacaggaccagtccctgacacacatccacacacatctaatatgtctcccctccacggtcttcctttctgctgttaacagttctcccagagttaaccctgacacccgaaatgttagaatacactaagtggagccttagtagacactaagttgtaaattccctgctctttctgggaattgtgatgaggctggcactcttctgtgcatcagcgtgaccactgggtgtggcctcagtatagcagttcctaaagggtactgtcggatgctgtctggcgtcaggcatctgtggggtgcatcactcccagagaaggggatggcggtgaagaccttcgccatccttcaccctcagcccttctcatgagatctcacagacagacttagaacttttaacgtccaagggggtggtgcagagagcggcctcggctgcatgtctgcatgtaattggattctcaggtgcaggaagacactcctggggtgctattgccttgggtcctacccaccttgaggctgtgtgccacagcctccaagcccctccctccgccccacccccacctaccctgacaggatgtgttgcttcctcagtgactggaatctattccttccctttgcacaggttggctttccagagccgtttgcatattgattgctgcatggtcaccctgtttatgcactcttccttccccctaattcttgtatactgctgggcagctgtcactatgactgcctcagccaggagtagatgtcctggggcccatcaccctaccaccctgtcagtgtgttggaacctcacagtgacaattcatgttttgtccagtgaaccccttcttgtcattctctgtgggaagtgtgacagtagctcatattgtgtaagactgcgtcccagtccctgtctggctgtgactatcgctatgtgggtgtggatagccccgtggctcatgtgccttcctcctgccagcctgtgccagaggaagagaagactgaggcctcatgcaatcaggtggcatcatgtgtgacattcaggccatactgagaggatggcacttgtgacgcagccatgtgtgtggcggctgatagatttcaagggtgtaaacttgaacttgggactcttgcagttgtgcctgggaagacccacagcagacacagtagtgtgtgctcacacatgggtgctataggccactcagcacccccctccccaagtgacttctgtgctcttctctgctctcgattcatgatgcctttccttccagcagtgagcaaggcagccaagaaggcagtgccctggcccgatgggcagccgaccctgccaacacagcatggatagaaagtaagtgccaccagcccaagggccccccaagcacctataggtcctgccagaaggtggcagtgggtttcctttcctggaaacctgaagctttaaattgctttcatgtacttgtgtatagacgtcccctgggactctgaagtggcctcttgctttgcatcgaggttatcacagctctgcgaggagcacttagctaccccccccccagactctccactccttcacccccatttcttcctggtacagactggcttcactgtatggtgggtagctaatgctctgacctgccgccctggtcagccattctctattgagacactgggagaagcttctcgattgggtcgccactagagtgtctttgtctggagctaccctgaggggcaattctgggtcgggggcatgcaggtctggatcccacagtaatttaaaagcggagatgtttttagacagtccaatgtgtttttatttttaaggaagtaaagactatgccttttattatctccttatttctgggtagctctttcatatgactggcccaaaactcaaaccgccttagctgcctccaagatcaagtctcttctggaaagttttgttttgctttaactgtgactaacaggttctagggtgatggtggtggcttttcgggagcagctgactcagacccatcacaagaatccatcagcatcttgttatgtaccaacagtcttattcccagtgtccactgtccagatttcttctgcactcctgtttctgtctgcctgcctgtctgtctgtctgtctctgtttctttcatctgtcagtctctgtctctgtcttggtctctgtttctcttgaatgtctctctgtctatctctgtctgtctgtgtctctgtcttgctctacaaataatttactgctgctcaaaagcatccctagggcttacactacccagccctgtcttgggaggagaaatcttttctggccacaggttgcacaggtgttagtagtgtgtgctagctgccccacaacttcgggagtgcagactacacttggtccccatggtgattggtaacagagctacatgtgggggacagttcctttatagtctgtctcccatgtatttgagtatggtaatatactgtggtcgagtgttcttccacagaaagggtaacacaaatacttctgaaaactaacttcaaaaggccttttctgaagcacatttccacgtgaggcatgtaggcacttcacatattcagatgagcctcaggttataggtggtccagtgtgagcatcttacaccgtatatgacatttttatataacccccccactacacacacacccacccacacacacacacacacacacacccacacacacacacgtcaagaacacttactcacagaacactcaggttcccataacacaggaggaaaacgtccccatgcaatcaaggcatttctggcaagggtggcttctcaccccccccaccccccccccagggtgtgaaccctatacacagcccatcagtgcagcccagtggagtcccgtggcatgtggcaccaatggagtcttttattcctaaggcttgtgtaccacctttgtattccagtgcatcaggacatctgaaccccacaggcttaaacctgttcaaaagagccacagagcagcgatacacagttgtagagtaaacaggcctggaaaccgtgaactccctctcattggtcagatttcgcatcttctgtttagagctgaagctctcattcagagcgtcatcttctggcccagcagcagccgccacctctctgctggaaccctctgaatatctataacatggggaggctaagcttaggacatttacatcacactcgtcagttctggccagttttttaaaaaaacacattttcccttattttgcagatccagaggaagcaatttacgacgacgttccgagggaaaactcggactctgagccaggtttggtcacgtctagaccagagctgtaggtctagtttagcagttctcgttccgggtctagaccagagctgtaggtctagtttagcagttctcgttccgggtctagaccagagctgtaggtctagtttagcagttctcgttccgggtctagaccagagctgtaggtctagtttagcagttctcattccgggtgcaagagcagctagagtgtgcgcgtggtcccctgggcccagcatgcgtgctttctggcctcctgtccttggtgcttgtttcgtatggtgtgactgaatgctggtgtgtgtgctcgttcacagtacctgatgcacagcatgcaactaagacgtgatgcaaatggggacgtgcagagagtcagggcaaggcctctagatctaagggaaaatataaattgttagattgtagagacacaagtctaaagcagggttcgctgaacactggtctagaacttggcagatgtaaatagaaactgcagagcaccggatccccacaaccgtcttaaagcagcaaagggagaagacgccaagaacttcgggaagaagatgccattgggtagtcaggagagggaggcagttcttacagctcccacatccaggcaagcacaatctgtgtagcatgctgcagcagtaagaggcttgggtttgtcctcacggactgcagaaacagtgttagaccccagggaaaggatacagaggcagaaggaagcagcagagcagcgggtacgacagctggcaggcctgtggtgagccgcagggcatcgtcagtcatggcagccgacagtgctggtcggtttgcaggtgggctgactcccagagctatggtcctgtcagggggagccgggccatttccggcagacattggttgctttttgagttcttcgtgatttgtgggtgtgtttggctatgaagggtccgtccggtatgtctatgacgggcatagaagtacattgtttaacttctaaaccagtgggctaaaccaacctggatgtaagtaaggggttataaattaagaagtaaatggcaggtggcatgagggaagattgcagagtgggtcccaacatggtttatattaacattgaggcactataaactccagctgcctgtagaggttttcagattaagcagtaaccccaggcacagagtgtaacaggaaagatatgtgagggacatggacaatgtggaagcaaacatgtggggaagaagtgtgatggtaaccagaataaaggggtagccggtctaaccataagccactagctgttgcactagctggcctttttagccagggtaactaatgtgccattccatggcattcctagagatatgctctcagcagaggcttccgatgcacacatctgagatacagcaggagacaagttccttatgtaactggagcaaggttttaatgaagcccttggcacttttgatgggtgctggctacagaatcaatgtctgtcgcacgctggtgtggctggcttaaggacagctctgaggatatagtttccacgagtgttttcaactacatgcaacgctttaaaattgtgcactatgcttcattcagcttaagtattaacaaatgtccccaaaagagtagcatgcaaaagtcgcttgatgaacattctgttttatttagggttttttattgctgggtttaaaacaaaacaaaaccaaaccaaaacaacaacaacaaaaacccaccatgacccaaatcaacttggggaggaaagggtttatatcagcttaaaactgtcaggtcacgttccatcactgaggaaagacagggaaggagtctgcaggtgaaaacggaagccgattacgtgaaggggagctgcagcctgacttcctctgaatagcttgcttagcctgctttcctagagcacccatgaccacaagcccaggggcggcaccgcccacagtgacatggaccctcccacaccaatcatcaatcaaggaaatgtcccacaaggttcctacaggccagtctcgtcaggagcaatttctcagttgaggttccctcttcccaaatgactctagctgtgttgagctaacattaatctgctatgcagtccaagagaattgataaaaataatatgaacataatttttaaaaggattaaaaatgctatggattattgggtctggtggtgtccagccagcatcctagctactctagagactgaggcaggagaattggaagttcaaggccagcctgagatacagagtgaattcaagtcctgcagaatgagatcaaggcatgatgggtaactagcgtcacccaataataataaagaaaaagggctatatagtgcagtggcagagtgccactcaagcatgcacaaggtcctgggttcaattctgagtgtgacaatgagtgagtgagtgaatgaatgaatgaatgaatgacaattatttagacatttaaaaccgctttacaaaaaatagttgtactattatcttcaaaacgctgtcaaagatgaaattggactgaaaaaaatcacagcatagtttgcctttagtaatcttaaaaccacccaggacagattgacggcagtaaagtgagataatggcctgtgtgcaaaacttcctgagaagtggtgagagcagtcagtgccttggagggcagcagcatcagagggtggcagagagggtgcctggaccagggaaacgtgggaaacagaacccagaaggaagaggagagcctggacaaaccaaaggctagctgggctctgacaagtggcagaagtggactctggtaacatttatagggacagaagcagagaagggaaaggctgattcagcagaggaaacggcagcatctgtctgtacaacagtcaaaactctagatcagtaagcggaaagagtttagtgaggttgcagttctcctgtgagaatcacctggccctgaatcagttgcctgactcagaggcagaggccctgccccagtgtgatacccaggccgctcagcatctggggaggatgtaggagaggtgggcctcccttgggtcccggcttacagagctattcactacttagagagcgacatatcatccttagatcccccatccatcagttgctacctctgggccacttttctacctgcttctcgcctgtgtctctagtctttgcacactcatatacaaaggcctcgctttgtggaaagtttataatggccagcatattgtttagtatattttcatcttatttgctgtagttgtgctgggtccccagggcactttcagatttcagtcactgcccgcatggaagagggtccaccggggagctagagcccttagcagcgtccacgttgttcctgaacagtgttggggcagcctctgtctggtaactcagcaggctcatgaactcaaacttaaatttgctgtcaccttggtctgtgcacccagatgaaatgatttatgatgatgtggagaacggcgaagaaggtggaaacagctccccagagtacgggtggagttccagcgaattcgaaagctatgaggagccaagcgactcggagggcaagaacggaattcccaggtccttcctgcgcagcagtcataaaaagcaagtatgtgcttggtctgttgtgatggacgagtgttctcctgtttacctgggaacaggactgggaaatgtgttctgagccacacgcttccgtggctagtccccagacatccgagtgtagtttggagagcatagggtaccagcgaagtggtctcctatgtgtaagcacaggagggtccagctgttacaccctcataaagtcacttctgcagtactaaccaggctcgccatccaggatctaagatggtaaaagccacgcacgttggcacaagtgtgatcccagcacttgggacattgaagtaggagggcattcgggagatcactgaccacctgcggtattgtatcaggacagctagggctacagagaaagactcccttttccacaaagacaaactttaaaaggaaaacgagtatcactgggcaccaacttgttgcagtctggcagccgcagtccttctgcacagcgagctggccaggccctatggataaggcaggccccagctttgttttgctccgcactgctgacaatgaccaactacattgtgagctggatgaagaccaaggtcagaggagcgacggtgagcggcgaggctgcagcaacccggatcattgttccctggagagaacttcaatttaggggcataaaacgtcttaggttacagtccagggaagaacacggaagccctcaggatgagtgtcctactgaggggcgctcctggccctgacaactgcctgaggtgaatgtggggttctctgtggctggcagggtcacatagtcttgttgctggggtcccctatggccaggtggagaaggatctgttgcgtgtgacaccctcctgttggtggcacttcctatggaagggtgtaagggttgactgtgtacagtcacgtggtgtctgagcacttcctgtgtgaggctggcaggtagccaacctgaggtcctcctctaagacctggttctgcctttgtaacagttaactatcaccttcctcatctgcctgctttccccagagactccagcagcccgaggttgtgggcgggaccacgtttctgtgccactgtagctctgcaagttgtcacctgagaactgtcatttcctctgacttatttcagacccaaggacagaagcatggtgggctttcggtcagactttctccaggaatatttttttgttttttctttttaatgatcaggagtacagctgggatctctccagggatggacctacagttgcagccaggggagcttataatgaagtgataattgtttgcataaagccctattagatactctcaacctaaaacaaggttgtgaaagagtagccgggcagggggagcatcaggggcgcctaggtccctgtgtggcagcaaacacttgagacctgtttgtttgattgacttgggcagatggcatccagtctggcagtgctaatggggctgctctggccgcccttgaggtggactcacagttacggtcaagcctccagaaatgccagcgaggacggcaagtggctcagcagccttttgttgctaggagaagcactggagatgtcggtgggaaacagcctatgagtgtggagtggtgttgaggggtacagagcccatgtctctcgcttggaggccggggctgtggagaggggtctctgtgccgtaggcccgtgtgacacagaagtccatggagattaggctttccagatgaatgtgtatgttaaagaagtaccagctttctattgaacatgattgaaagtgttcttgtcctgtttaacgtgagaccttacccccaggggagaagcggctggctctctgtgtttccggtggtgataagggtaggaagggtggctcggcacactctagccaactcaccagtcagtgtcttccctagagcaaccgcactccggcgcggtcctgaatgccaggttcttcccctcggatgctggcacagaagagccttaagtgtattttgcgtgtgccagctcttgtctcctggagatataagtgaatgatcttacatagatcattctgtacatctactgactttgctcttccctggagcacacgcagcctgcctgccggtggaaggagcacacatccttcttgcatgccttactcacacatgttttacttcaggtcaagcagagcaggtggtggcctccagctagaaggcgccacatccttcacgcaggatagcctctggggacccacagagcccattctgaaaaaagcatatctctttgtgctacagctctctcatgacctaacccgctttaaggcgcactgtgaggaaaagatgagaggcttggtggccagtacggtgggagccatggagattcagcaggcaaagcagaggcaggagcggaaggtagtgtggctcctccttacactctgcagtgagcacgtggtccatagcagaccgcagggtgcgttggactgacgccccgccccgtgcatcccagccagaacagtggttctcaaagcctggcccagggctcccaggctacctgagcatttccagggccatcgttaatgacctctgaacttgttctctcacaagtgcagggaggaagcttccagacgcttgcaatgtgggacgtcacccacagatggagtgtggaatcagcagtgtctgggagattcccaaacatgcgaaataaatatcgatttttggtttggaaaatagaatcacttcttataattgtgttatttaatataaagtgcaatagactgattatcttctaagaatgtatcaatatgagcctggtgtggtgacgcacgcctttaatcccagcacttgggaggcagaggcaggtggatttctgagtttgaggccagcctggtctacagagtgagttccaggacagccaggactacacagagaaaccctgtctcaaaacaaaaacaaaaacaaaaacaaaaacaaaaaacaaaaaaccaaaacccaaacaagcaaaaaagaatgtatcagtataagattttaaattgttaccaattttaacttgaacacaatagattaataaaatacaaaagaaagctatcagggcattcatcgggctccatttccagctccaaacctccagtgaacatgactgtgaagtttaaggggctcctaggccaaaagtttgagaactactgggtttgcatatcttcctcctctgagatgtgttttaaaagggcactgtcaagtaacttttgctgactctccatcctttggtaacgtgagacttattcgtgtgttagatgggatttcacaagagctagagattcttggagccagccctgggcaggcagtggctccactcttcagcatctagacaccaggctttctgaagagctgccttcccgtgaggcacgccactgttcggccagcatctggttggttccccgcagggcagtaagaagacagatgcagatccacgagacagtttgctggttctgggattttcctgcgagccgtgggctctctgctaggtggggtagcatgctgcacaggtccagctcggtccagcttaggaatgtgtggatgattgtggttggcaggtccaaagatgtgagcaagccctaggagcatgaacagtgagagcccagcatcctggttgagccttggatgagcctctttaactagctcccagaatttagtcttttcttccaaacgtggaggcaagctttggggtctagagggccccacctgcccccagtctgcagtcctctgattattctgatgtggccaagtggggctgaggtgcagctgcccatggttgggtcaagaggaatgggaccaggaatggtacctgcagggagctcaaagagccattgacatcccaataggttaaggtcatgtgtgggcagagtcactttaaagttccatctgttagaaaagggatagaaatctgctttggggtgctggattggaagtgtaggccgggggttaattagagctgtgcagaatggtcattgagtagaaagccatatctgcattgggacataagggccttcaggatagactcttctaaacacaaccagtcaagactctcgtcttctggaggaagtggcccagagcaggtagcagagggcaggagctgtaggcttggttgccatggcagcctgctgagggttgaagtgtgcttgctgacaggttggtgagagggttactggttggtttgttcactggcctcttgggctttctctgaaaggacacccagtgcccaatgcaaatgtcttcagtgccagctgtttaaaaagtaagaaatgagatggcatctgtgccaagccacacctggacatctctggcttccatttgaccgctaaatcacagccctggctggaggaaaccagggacagtgaactcaacctgtatgggctgtctttctgatttatgcctccacagagggattggctgtcttcctaacccctgggccagcctcagcccactgtctatccgtgactctgtcttgcccttctgaataactgggtgtagttttacctaggacaaggcaggaaggacccactgtggagaacatccagaagtttgtttgaaggcctgaacatacagttagcccttctgtccttggattaggggcacacaactctctgccactcttcaaaggtccctgtgtttgggaaagatttggggagaaggctttgatgtagcaggaaggtttttgaaacctgccaaggaagggctcgtctttaacaacaaaaaagcagaaagaaagaaaaaaaaaaaaacaaaaaaacaaaagtatcccagaaccacaaacacatatgcactgactataaccaagacgcctcccccaaattgcaaagctcattccaggtaatgtctagacccagactacttgacagtattcttttaaagtaacatcaggtagcactgtgtgggcgatcgcagcgcctgacttttgcttctgttttacagatgcagaagcttatgaaggcagccaaggagggcaccaaagatgggctggagaaaaccaaagctgctgtgaagagaggccgctccttcatcaggaccaggtccttggtctctcaaggtctggggccaatccttgcgtgtagcacgagcctggctccctttccccttcctttatggcaccaactcttgtgaggaggcagcgtggaaagttcctgcacctttcccctcagcagagagactcccactccactcagctgacctgggcccgcccctccataatgaaggatggtttgctctcaaagcccccacatacctgcagagtatggaaactccttggcaagacacgtaaagggctgcacacaacaaaaccagagaattaagggagtcatcgtaattagctgactctgcagctgcctcctcacgagagctgtggtcctcaaccttcccaaagctttaatatagttcctcatttcgtggtgaccttcaaccaaaatgttatttccgatgctattttataactttagttttacatctgctatgaaccataatgtaaatgtctgttttctgatggtctttggtgacccccgtagaaggtcgtttgattcccccagtggggtcatgaccctcagattgaaaacagctgcaccagaggctagtttatgtccccggctgctccaccatggcccttccctatagccctcaggtgctaggaccctctctgtggattcttacttcacccatcccaaattggaccggtgcacgacattgataaacggattggttctcccagctttgctgttcttcatggacctgggttcatgtcaggagggagttatctaccctggggtcacagaatccttccagccggtgaggggagactgactggtatcacgatgcttgagttttcctaaatctcaccgaacattgtggcctgtgtaacactgaatgctgtcatgggctgtaggcgggagatccttcaggtcagggaccaccactcttggggattgagatcccagctaggatccgaaggctggcaaggcctccagggatggatggcagagctctggctccggatgggaacgtgggtaggaaaggggtacagaggctcaaaggtgtgtccctaaaccagctacctgtctccacttcccaagttgccaaatcgtcagcttggcctgaatcaagagttcgtagtcccagatgtccctgagttacctggagagttctttaaaaacaccccatgcttgcgttcccagccatctactcagccacttgggggtttctctgacatagacgatcctgcgcccactgcttccagacactgcacgtagctctgtctggattttaggtgtgggttcagttttggcttaaacttttcttccttgtgctgggaatggaacgcagggcctcaaacatgtcgacacgcactggccactgagctgtgctcccagcactggccactgagctgtgctcccagctttagtttatagcttctgtgcttttcttagaccacagtggggggaggggaagtcaggaagttaataaggaggtcccaccctgctgcttttctgtttctgtgtagtgctatctaatttttagaaactaaatgatctatttctactcttctgcttggctacctgatatctctgaagttgaacttcaaaaacctcaaatactggcacttctttttacccttgtggaagaatttcatattgggtctgataaaaatttcaatttaataatagccaggtgggaagtaaatatttggacttgaaatacttgcacaaaagatttattttatttttaaaatgtagcttacatgctataatgccataaaaactgaaatttaatgtgaaacccatgcattttctcccccccccccccagatcacaggtgttattttgaagaagagcagaatttgttcattgacgtggactgcaagcacccggaggctgtcctcaccccaatgcccgagggcttgtctcagcagcaggtaagcaagccactgatgctcccatggaagacctgctgctgtcactgtagaccggggcttccacagtttcctcttaacacagccatgaaaaggtctggtcttagctctggccttcataggcctttagataccataaatatcatcagtacatgtaggtgtgataagtgtgtggaccttgacttctttgtcacacgtcattcgttccgatatgatattcctgtagagggacaataagacacagtggtccagacctgtagttccagcactggggaagttgaggtaagaggaatgctaacaatataaggctagcttaggctgcataacaagaccctataccaataaaataaaactgtcaaagaggcaatatacagaagtgtgtaaaagatgtatacataggtgcctaaaatagagattaaaatgatatgctttcttttttaagacttactatttattttttgtacatgagtgttttgcctatatgtatgttaatgcaccatgtgtgtgcctggtttacctacatgtatgtaagtgcaccatgcatgtgcctggctcatctacatgtatgtaagtatatcatgtgtatgcctggttaatctacctgtctgtaagagcaccatgtgtgtgcctgattcatttacatgtatataagtatatcatgtgcatgccaggttcatctacatgtatgtaagtgcaccatgtatgtgcctggttgacctacatgtatgtaagtgcctggtgtccaaggcagtcagagcatggcatcagctctcctggaactggagttacagatagctgtgagccaccatgtctgggctaggaactgaacttggttcttatgcaaaagcagccagtggttgtaaccactgagatatctctcctgcccccacataatagacttttaataacaaatgaaactatctgtgaatagttgatttcttaccatctggcagttaatgcagaggggaaaagtcagtggtttcaagttgactttcctgttgaaaggaaaacacaagaaacaaatcatagttctgtttgtgggattttgaggaagtgaaaactatttgggtaggagctgagccttttccatacagacaacagagggaatgatttatattccataaaatgggtggatatgtgggcagatggattggtcagtggttggaagggtgggtgagtgagtggacagatggatggatgggtgggtggattgatggatggatggatggagggatgggcgggtggaatattagatagacacacaaatgaagatggataacaagttaatggtgaacccttggaaaggtagacggctgatgatagagacacagatcacgtgtcggtgaatactcagttgcaaggctggagttgaaaaggttaaagacggtatctaggagttaataaatggtcaggccccgtgaccttagcctctcttagaattaaaacggaaccaaggaaaaagtggcaggaagtaaagagatgtggtccatgagcagtgtcttagactcatacatactcatacacactcacacacacacacacacacacacactcatactcactcacactcacacacacacacacatgcagacactcacatgtagacactcaaacaatcacacacacatgcagtcacacatgcagacacacatgcactcacaaaatcagtcatacatagtcacacacacacaatcacacacatatacatatatacgcacacacataaacacacattcactcacacacacacacatatatacatacatccatgtacactcacacatacgcacctacacacttacgtagacccacccactcatactctgtcaaacacacatatacacatacacacacatacacacactcacacatacagacacacatgcactgacatatacagtcacatgtacaggcacatacacaattatacacatatacatatatgcacacacacataaacacacattcactcacactcacacacacccatgtacacacactcacacattcacacttacacactcacacacgtagaccacacactcacactctgtcaaacacacaaatacacatatacacactcacttatgcagtaacacacacacacattcacactcacagcgaggtgtagacagcctgggagctgcctgcttcattaccagtcattagtcctgaggctggatgcatatgtccgtaaaagctcccgctgtctgtgtccatttcccagagagaaagctggccactcagcgatctgaactcatagaaaaatctgattttatgttccagtctcatcacaggtctgcctaaagccttgtctcgtggccaacaatatacagtactaagttgcagggttagagttgagaaaggctagagggtatctaagagctaacaactggggatgtaacctgagttgctggccagcaaacagttgatgtggattgtcacaggaacccagaactttctctctgttactgtggctcccccacctcacctaagtgggagttatagcatggaaaggcttaccaacatcattcccgacgcattctggccttaactgtttccagcatttgaccgtttataggatctcagccgggtatggggaacaaagatctgaatgatatccagatcctgtcctccgtcaacattcctatgccagaaaggaagttcagaggagatgctgtcaatggcaggaggaggggcagttccagaggaggcagggctaggcatagattcctagaggtgggaggatggaaagaaccagaggtagacattccgcagatgccatccaaaccaaaagaataggctgggctggacagcgctggtgggggcgaccataaacagggaagcagagcgtgtgataaagtaaccagggatgtggcaggtcttgagaccgtggacggggggtgtgggagatgaggtactgaatttcggtgtctggtgtgtgaggagacaaagggtacaggtgtgtgagtgtatttgggtggagtggtgtgcggtgtgtgcagtgacgggtgtgtggggtagacggagatagcgagcaggggtgtaaggaaagagtgggcagaagcgccgtgtgtgtgaggagaggctgatactgcacaaggaagcaatggccaggagcatagccaggcatcttggagacacccactgaggagattctggtttcattgatttacttatttgcattttgtgtgtgtgtgtgtgtgtgtgtgtgtgtggtttgtgtggcgttagaaggaagttttcaggagtcagttctctcacctcaggctctgctgacaggactcatgtcttcgggcttgcacagcctgtgctctgacctgccgagccatctggccagcccacttgggattttaaacaagagataccaacacctccacaatcccagcagcctcttgggtgcttgtggttaacaggacaggggatgaaggtggaggcgctctgtgggtcacacaggtgactgttaagtagagacatctctgcatcaagtccatagacctgaatcccacccttatgtcctgcccttatatcctggccacaatagttgagtttaaccccagtgtggcctggaggtctcactttccacgtgataatgaagatttggtgaggagtttagtgctgcgtcagacctggagccagggctcttggagtcctgcgtccattgttcagctggctttcctaccgtcacgatcacgtctattatttttcctcctggcaactgagttctctttgagagttatgtccttaaagcttaaactaggggtgttggcacttttggattctcttcttttccttttctaaaatggaaagaaggtagtttaagtaaccagaaatgctatatgttgaatattcttcttcttaagccctgttttgggagcacagcctttatttatatttttcgaattggtgcaaactattgaaaactatttgcatcccgagggcatcgagtctcatcagtgacgacgacccccccctcccctccacccccaccccagcacctcagacatggacagaatggtccggagcccctcagactcaagtgactaatactcattgtagtctgatttcctcagcaggttcttaggacgatgttaactcactgaccttggagctgcagctcttgggatggcattctgtcactgactttggagctgcagctcttagatgacattctgtcaccggttgctctcacgccactcctttctcggcattgccatttgatgcatcagttctagtggcctaaaaagggatgtctcccgcagtgtcgaggaaatcttggtgagggagtgggattttgtaggctgaccaccttatgtcaatttccggtcttgactaaggtgttatctcagggtcttacattatatttgtgtgactccttaggttagcctgtgggtaatgttactccccagggtagtagggtctgagcttctgaattttggcagagacagttgcctggatctaccagcaggagtgtactctagagtacagagaccaggctggcctcgaactcagaaatccgcctgcctctgcctcccgagtgctggaataatggcatgcgccaccactgcgcggcacgtctttattttttgaggtgggttcttgatttgtaggcaagactctcaggaactccctaggtagccagaactcgtagttggccctcctgcgtcagcctcctgacaactggggttaaggtttaagccaccaagctcagtgttcacacatctttttaaaaatacaacacttggtgagagagctcagttgctcaagtgcttgttgcacatgcctgaacacttaagtttggcccccagaatctgtgtaaaagttccagggtgggcaagtagacctctatggctcactggccagcagcctaactggtgagtcacagaccagaaaaaaacaaaaacaaaaaaacaaacaaaaaaaagtgcctggctgatctctgacctacacactgttcacacacacacacacacacacacacacacacacacacacacacctacctttttatatatcctaggaaggcttattgtagagttagttttgtgggttaaataagtagtccttttcctaagagagcaatggctgtcttgtgaatgtttcataaatcatggtcaaaatctgaaccacaggagctttctgcatggaagtgtgtctcaggccactaggtggcactgctgcactctccaataatgtcactgcctagagaggtctgctgtgagtctgtgggtacgtgatgtgtgtacacacgtccacatcatgtgtagtgatgatgtatgcagaaacgcatgtgttgagcatgtgtatgtttgagagttttggcttaagggcaactcaactgtggattatgccgtatgttccatttgttggcagttgatatttggtaggggtgtacttggggcaatgacaatagcaaatgtcgtgtctggcatcttgcagacatgttacaaccgcatgctaatacattagcaatggaaaagtcagaaactgctgtgtgttcaatgcaggcatctcacatgtaggttttcacccctctcagtgacaggagagagttaaccctgcctaggtaggtctcagcaaaacactgcctgttcttccgcctcccaccggcatttgtgctcagctctaactgaagaccggtggctctctgattgctgttgccagtagtgttatttggttgagacttaagctctttttgccttcaatttatatatgaaacatcacgtctctttctgttgagacacgaaacctgattgactgattcagaccactgatgttgtataagccagcaagcttgcttctcttgctacagttttatttgccctgccatagttatagttcatatgtatatttttaaagatttatttattaactatatatatgtacacacacacacacacacacacacacacacacacacacacacatatatataatggtttgcctacaggccagaagagaacactaggtctcattatagatggttgtgagccaccgtggttgctgggaattgaactcagaacctctggaaaagcagccagtgctcttaacctctgagccatctttccaacctgtttaataggctcttcagtttataatctgatgtttaaaaggtgaccgttgtatcaacagagaagtatctaattattaacacttcacttaaaacatttcctcaaagatctcctttaattcttttttttaattatgtattttcctcaattacatttccaatgctatcccaaaagtcccccatacgctccccccccacttccctacccacccattcccattttttggccctggcgttcccctgtacaggggcatataaagtttgtgtgtccaatgggcctctctttccagtgatggccgactaggccatcttttgatacatatgcagctagagtcaagagctccagggtactggttagttcataatgttgttccacctatagggttacagatccctttagctccttgggtactttctctagttcctccattgggggccctgtgatccatccaatagctgactgtgagcatccacttatgtgtttgctgggccccggcatagtctcacaagagacagctacatctgggtcctttcgataaaatcttgctagtgtatgcaatggtgtcagcgtttggatgctgattatggggtggatccctggctatggcagtctctagatggtccatcctttcatcacagctctaaactttgtctctgtaattccttccatgggtgttttgttcccaattctaagaaggggcacagtgttggatcttgtcgaatgctttttccgaaattcttaattctattttttaacaattttttctttttttctttctttttcttttttttcttttcttttcttttttttttttttttttttttttttttnnnnnnnnnnnnnnnnnnnnnnnnnnnnnnnnnnnnnnnnnnnnnnnnnnnnnnnnnnnnnnnnnnnnnnnnnnnnnnnnnnnnnnnnnnnnnnnnnnnnnnnnnnnnnnnnnnnnnnnnnnnnnnnnnnnnnnnnnnnnnnnnnnnnnnnnnnnnnnnnnnnnnnnnnnnnnnnnnnnnnnnnnnnnnnnnnnnnnnnnnnnnnnnnnnnnnacagggtctcattgtatagccctaactggcaggaaacgctttatatatataaggttgtccttgaactcacagagatccacctacctcttcctttccagtgctgactaaagacacacactaccacatttggctaaaaatgtattttttttttaaatcaacaagctttaacatagaagtaaagtttatctgtgtgtatcctgaaacacgtttctaccatcttactttccaatttccgacaggttgtgagaagatacattctgggctccattgttgagagcgagaagaactatgtagatgctctccggaggattttggaggtatggaagcatggtgcagcatacttcataaccttttcttacccattgtacatactttagttgtgtgtgttttgtaggtgtttgtgacccaaaacatccaagtctgagaaatcctccccagagtgtaaatgttgtgactgtgtgctggcggtgaaagtcacatgatttgttttgaagcgagaagacctcttctgccaccctgggtgactgaccgttgacacttgtttctggcgcagcaatatgagaagccgctgtctgagatggagccccggctcctgagtgacaggaagctcaggatggttttctaccgcgtcaaggagatcctgcagtgtcactccatgttccagattgcgctggccagccgcgtgtccgagtgggatgtcgtggaaacaatcggcgacgtttttgtggcctcggtaatcatccagcagacaccattcccccccaccccctccccacctgaagtgctgtgggttcagaacacaaagccacgtgcccctttcagggtgctatcacttcccagagctcataagggtgcgtgctgatgtgttgacatcctgacccggtttataccttcaggaaaggagcaggggtcccctttctcaggggacaaggaagcctgagcagaggttccggacagaagacaagtccagaaagggttaagtgtacgtgttgtatcaggttttggttacacagtcatttaactgagtcatacatttggttgtgccatcgttgtacatcagctcttgtgctgagcgagagagccctgcctgttgagttgtagcatctctgagcatcttcctaaagtagcgcatactctatctatacagtatgcctggtgaccatataaaacatgaggcagaaaacaccaggttgttcccctcaaactttgccctggatgttttgtcctgtggatataggatttggttctgtacatgacaggggactgtgatgctgagacagcatgcaggtgacatttcctgggagcagaagcagctgcccagaggccaagggcacagcattaccatgtcaccgatttggggtagttttagtctttgctcttcacatggctcacgcacagtgtgtgttgttcgcctttcagtctagatgtagaaggctgcatgcagatggagcagattagctctgtgcttgtgtgaggtaacgctgtcaacaggacagaagcatgaaaatctgttgggaagtactaggctacttaaataatgctgcattagtaacatagcagacttatgaaagttacttttgtttgtttgtttctaaagttttatttatttactgtatatgctgaacagcacacacatggaggtcagaggacaagtttctgtagccagctctcttcctccactgtgtgggtcttaaactcaggaccgtgtgggactgatcttagcttgtcaggctagcacctctaccctgagtcatcacattggcggtgttatattttttgagacagactcttgccttgtatcccaggctgcctttgaactcttggtgtcctgcctcagcctcctaagcatgatgctgccaggctccgtttccatggagttggtgcaaatacttgatgaagtgggcaaaaccaatcgtataagtttcaacatcaatatataggcacatgcacacacacacaaacacatgcacacacacacacacatgtacacacacatgcacacacatgcacacacacacacatgcacacacacacatgcacacacacacacacatacatgtacacaaacacatgcacacacacacacgtacacatgtacacaaacacatgcatacacacacacacatacacaaacacatgcacacacacacacacccattacctcctcccctccaaaacaaaagaagtttagctgcaaattgggggtgaggatgggggctcagtcctgtcctgcctggttctgcctcttgaagcctttgcatttacaggaaaatagggaacgttaatatataggcgtcaggtgtcagttctctacctgtgcaaggggaccactgtaccctgtcttttcaaaggtagtttgtaccctcaagggaagctgttggggcccctgggtaatgaatgacccctattctcttggaagctatatctgccaaggaagcttagagatggctgtctgctgtcccatgaagcccagggtatttaccactcaaactccaagtgcagggataggcgcactggggtcagcccatgatttcccaccaggcaggcatcaagtgccccatgaggacatggggagaaagagctcctgcagtcatagccgtcgcggtgtgaggagagcactgcgaggggtgggttccaaaccatgagttttccattccctgtgctccagttctccaagtccatggtgctggatgcttacagcgagtacgtgaacaacttcagcacggccgtggctgtcctcaagaagacgtgtgccacaaagcctgctttccttgagttcttaaaggtaagcaccctctccctgctttgggctttaaccctgtctcatagcatatctcctgtcaaagtaccttggaaagaacctggacggagccctgcctggagtgcacgatgttgcttattggagagagtcaacactgttaggtccctgggtatctgtgtcgacgaggggaggttcaggggctctaggctggatcatagatttttgaaggaacttttgtttgcctgccttaaacgtgtatttatatggatatagacgttaaaggacattcgatcggaacccacagatacctgagcctcccatcccagcttggcatagggagtaacagtagcccactaccagcccagcccagtctagacgtcgggttgggaatgatgctcttttctgggacagagcaggtagacaagagctggagaggctgaccctgtgaggtgcgaggaggagcctgtgttggccatgtggcgcttgtgccttctgatgtcagagccgagagcctctactgccttcttccatcccaccattgagagaggtcccatggtgactgctggtcttgcaggcaggactcggaggcctggatgtgagagagcctggctgaagctgttgctatcgaaccatattaaagtcccctttagggccccctggcctgtctgctcaggctcatttgaatgagaaagccttggaacacagtgtgttcttggtgcttggaactatgtttctgggaatttctgctacctggggtaagctgtcatagggcaagtgtccttgccagcactgacgttgtatttaaggtgggataactccctccttcctttctactgcacacagctcaggtccccgctgttccacggccaaggacagctattcagagactaaatatccctcgtgctttgcagaagctaagctgtgcccttgagctgtgacatcattcctttccttgaaggaaacggagacattaccgagttaaaaattgatttcctctgagggttttgtcaggaactcgatgatgggtataaactgtggcactgcagtggccacagtccctgctggcctccctggggcaggtgaccttgagtctaggcttagccaagccttgctgtgctctatgcagtgaccttcactgtgcaggcttattatacagagatgtaccagatgtagcccccgagtcaggacctcaggtggccccaggcggtccggtactgacatctccctgcatgctcagagatgctggtcaaggtgaccgacaagggctgggtggaactttctctctgaagcagcataaggggccacaacctcccctggagcagtccgactagcttggaaccctaagaatgccggggaaatatagcagggcctgagttatccaggtaaggcccctcctcggggccagcagcagcagcaagtcctccttggaactggggtagaaagtatttcccacacatttggaaagtttcctcctggtagagctaaaaaaaaaaaaaaaaaaaagggtgaagcaggggtgttgagcagcctgtccaccatcctaactctaccccgaggacacagccaggctgagccactacctgccctgagcctgccattcttccctacagctgagccaggattccagtccagaccgagtcacactccacagccttatgatgcggcccatccagaggttcccacagttcatcctcctactgcaggtatgttggggcataggccctgaagggtctctcctttcctctccttcatctgcccgcccctgccccctcccctcctcccaggggacagcaggccacaatcaccagcagccacagagcctatggagaccaaagaagtgtggaactggactgaaggagggtcgtgggctcccttgttggttctgggaagcaaacggggtcctcgtaatcagccctgtcaagtgttgccgctcttcttgactgcacgtgccgcgttcacattgttatcatcggtccgtgctgcctgcagcacttaccaggagcttccttctctggcctttgtaaggtttcagtgaccgaggcccgttcttcaggctccctctctctagttcagtgtctccccttggtccccagcgatttcccgacacttgtggcaccatgctttgtccctttcctccgtgtagttggtctctggggtgagcttagagcacagtgcaagagaccctataaagcaggctgttggcggggtctgtcgtccgtttgcagagcacaagcagaggagaccgggtgagatgagaaggtcctgggccttcaggaagtgggtgagcatcgtcccttcttcgacagagtcagcctgtctttgtagccaagagccaggcactggctgcctctctctagtgcagtgaatcttcctccagtacaaggcttgggttctgctggaagtccatgcgggagctgtctgagctgcatcttctcatgcactgtgtcttccgcatcagcacccgcatctgcatcctcaaccttcctgtcaagttacagaggagttctgtgcttgagcctcacaatccagcctttgccagcttcaggcttttctagtcctgccttcacgggattgggattgaagacagttggcgtctcttcacttggctgacttgaggaaatgctgtagccggcccatttgatcccctgcatcctccctccctcccctcccccatgacagcaacaagcttgtttctctttctcatcactgaagaaggaggactttttcttcttcttttttttttttcccgagacagggtttctctgtgtagccctggctgtcctggaactcactctgtagaccaggctggcctcaaactcagaaatccgcctgcctctgcctcccgagggctgggattaaaggcatacaccatcatgcccagcccatcaagaggctcataggtcatattatttacagctatgcagcaggtcagagcactcaggctggtcctgaactcatttcatctcagcctctaactcttgatccccctaccgaggcttctggctgggatggcatgtgtcaccacaactagcaccgtttctagcttttgctttagagcagaaagtctgggactctccagaggccactgtggggttattgattgggtctcaggtgtcaggaggcccaaggagtaaaagacggttcagggcatggcctgtcggtagaccagtagaacacacacatttatcagtgtctacagcctttgggtggcatgggttatggtaccacagaacagttgttgacagtggcttcagagatgtccataacgagaataatgcaaacatttgaactattgtgagcatcaccaaatggcacatggagactcagtgtgtacgtgttgttgggaaaactccctgtggatctggtggatacagcacagcagcctcagcctgcgaaaggcatgtgctctgagcagcagagaggagtgtgagcatagctgtgtggtctcatgcaccaagacctcttcctccagctcagggccttcgcacacagaccctgctgggtgggttgaccttgtgggcatagaacctgtactatgcacaaccttcctaatgctgtgacccttgaatgcagttcctcatgttgtggtgaccccaaccataaaatgatttccttgctacttcataactgtgatttttctactgttacaaatcataacataaatagctgatgtatgaccccaagggggtcacgacccacaggctgagagccacccatatagtggaggccacagtagcatatttaacactgctggggaacttctgtgagcaggtggctttgcccgacgctaatagaagatgcagtttgcccgcttcatcctggccactgttggctttctgaggtagtggcatgcttctatgccagggacccacactgtctaatcaatctatcaatcatctgtctatctacctatctatctatctatctatctatctatctatttcatcagactgtaaggtattaagctagttttgtttttacaggaagagctgactggatgttgagccaagtgttgagatgactcttacccttctcccagtcccgactcctctccagaggtggctggcatcccatgtcactctagctgccggacaacgtggtcagacagacggttggggtcagaagcatccttgctgaccacccatactctgcctcctgctcacaggacatgctgaagaacactgccaaaggacatcctgacaggctgccccttcagatggcgctgacggagctcgagaccctggcagagaagctaaacgagagaaaaagagatgccgaccagcgatgcgaaatcaaacaaatagcaaaagccataaacgagagatacctgaacaaggtccagagagatgttcctcatctgctccgataactggggtggccggggcccggaatgcctgggagtgcatgcaatgccttggcctctgtccacttgttttcttaggaaagggactcagtgagttggtagctccccacttggatccgcgaaccccccaaggaggttaaaaggccactcagctttactttcaaaagtctcacattttgttttagatagctgctttgtgtggcaccacacaacaaagagccctccttggccgggctggttgacttcctcgctacagaaggatttcttgcggcataccacagacctgccacgtttgtctaaggccccgtctatgggggaggagtcagcctacgtgtaggagctgtgctgacgtgtacatgtgttagttcattttctgctcggtgggggagtgtcccgcttgctgatgacgtcagcggtcaaggggcgtgtctctgaccctcagtgacatgatggaaagttttagagtagagaattacagtcagctgtgttctgggcataatttgtgtcatttagagttgggtacccgcccccttctgtggtgcttgatgtagagcgccccaggaaagaaggtgtgtggactgcagtctggtggcacttaactcatgcacctgaccttgatcctgctcacagggcatgaaaagccaagctatgaagtcagtggctaagaagggagttaggcagccaggcatggctcagaaggcggctgggaccatctggggcaagggcactgtgtttcctgttaggagcatgaagtgacagtgacgttctgtggtaccgatcagggtagagcatccttccaggagctgatgggcttctccttggtttggtgacatagagcgtggcagacagtaagaagtacagcctctgggggtgtagctcaatggttgagctcctcatgggtaggtactcatgaagccctgggcttggtcaccatgagcggcaaatcggccacagaaaattgggtctagatgcagatttacctttgcttcagagtcagctggtaagtgagctcacccccccagcactgatgaccataagatgtgtagtttaaagtcactcagcgagcccggtggcttctctgtgaggagagagggggagccgtaaaactcagggagtagaagcttgggcactggggagcccccgttcccttctcctttgcagaaacctgagtgggtgacctctctggtgtccttttgaacctccagctcctcagcagtggaaaccggtacctcgtccggtccgatgacgtcatcgagacggtttacaacgaccggggagaaatcgtcaagaccaaacaacgccggatcttcatgctgaatgacgtgctcatgtgtgccaccgccagctcacggtaaggacgagaccgtgtcacctgtcagcctcacagcgacacgctgtgtacatcggagaatgggagggaggccgcatccacgctctcgcctgaactcagaaccttaataataaaaggacacccattgcaggcttttgtgattaccatcatcgttagtatttatttatttttatgtctgtttatttattttgcagtgctgggggtgaaacccagagcactattcatgacagacagactctgggactgagctgtaaccccagctctgtgagctgagttttaaatcctgtgggtccgtgggtctgccggcggaaatcgggtgccatacaggtgatctcaggaagactggtgctggagctggctctgaacagagtcctcttactccctgtcacctggggccctttgttgtcacatagctgactctccaaatatacctctgatagatatttctcctttggatctgtccacacttagtccccattagttctttccctcagtttggcgtgagaacggttccttggcgcttagctactgagctaagctgaggagatctgggagggcaggatcctctagggtaggtagcatggaagagaacccatcttgtattaaatgcagtatcctccgtgtttaacgctgcacccttggtgctttctcggatagcatgggttgctgtggagccagcgcccttagctggcgagcagcttctgctggcatcacctgacactttattgccaccatggctcttgtgagtagggggtcacctttctcccactaccacaggatttgggcagaggatatgtggggtgactcttgagagccagagtcactccactcaccaagcctctgacttgtggtcagcaaatgaaggacggtgaccacgagggtcagggtggccaggcagaggctgtgtgcaaggctgtcgctgtgtgtgcgcataattacatgagttgcaggctgagcagctcctctgatcacaggtgtgtgcgtttctctgtgtccatgttccacgttatggtaaaagaagagaagccttaggtttttgtttcacctctgtgtactcggccagtgctttagtcgtggagtgtgagctgtgacttgagtttattgatgtggttataaagtaactgcataggaataagggggaagctggagtcagatcagagaacgtctctgcacacttgggatagtttatccagaatcctcggaccctgtggccatgagttcacaggtcttggtggaattgtagaggatttcccctgcccttcctgctggaggtcttagctggagccagtgactgctgtttgcatgaggattccgagtgccatgacaactagacggctgctccaggctgcgtgagggaccggaggcggcatgggagcttggtcctgtggtaatccataaagtgacaggcttctgtttgctctaggaactcacatgaaagccatgccgtgatgagccagaggtacctgctcaagtggagtgtccctctaggtcacgtggatgtgattcagtacaatggaggctctggcgccggggagcactgtcggcaccacgctgcacactcacctgagagcctggccgtggtggccaacgcgaagccacgtaagtgacagccctgcaagcctggccccagttccccactggaactgggatggcgcgtctgttgggacagctcagtctgtcagtctgtctgtcttgacatggcagagcccggtgtctgcgcctcattggtcgaaggtggtatgggaagaccacaggcaggctctgctctctgctgcctgtctccgcttttccttggttctccacaatgagctcatgtgtgtggccttcacagtgaggtgggagagatggcagtgctgtgggtgactcagcactgcacagtggagggacagcagtgctgtgggtgactcagcactgcacagtggttggaattgctatcactggtcaccatttggcctagagattttgatctgagagcaggagccattgccatttcccctctgcctgtttaaacgggaagaaagactagctagtccatcggtgacctctgcttccgattaaacccatgaacgggaacgctccataaaccttaacaagcgttaaccttcaggttaatttgtttctgacacactcagaagcacgaaagcctacacttaaactcgctcagccttttggttggacatgagcatttaggaaaaatcctttctgctcctctaattcctagaatgttaggccattcagctcagtcattgcctagtaggtcggctctctgaacacagtattggtcaccgcctagtaggctagctctttgaacacagtattggtcaccgcctagtaggctagctctttgaacacagtattggtcaccgcctagtaggctagctctttggacacagtatcagctattagactcttgaatttgcccccacttaaagcaagatgcacctttatctagactctgagctagaactgaaataccacggggcagcctagagcatcccagtggatcgcagggagatgagcagcaagaggagggagggaagaatggagggaggggacacacaggaagggaatgtctttccaaattgtcacaattcattgcaattgtatccaaggggaaactgaatatctttctatgcgccgttagaacacccattaaattactcaggagtgtctattgcaggttgtgttgggcctctgtgaacagtgatgactgtttatactgcagtcagtcctaaagtgtgtttgtagccagggttgatcctcagtatccagacagccactgatgactctgatccagagtagacgcacagacttacattttttttaaaagcatctttctgttggtgacttgtactaggcaaatggagaatggggttaggatcagtaagaaaccttaagaaaaaatacaaagcaggatggcttgaccaactcccgtggaaggaaaaaccggaaaaggattcgttctcttggaggcctgtgtgctgctgtgacctttgcatcccaatttctgtgcaaagctgagtcatcccggacaaccaccacctctcccatagcactgtgaaggccacagcaggtgctaaccacaggaaagtgggggaaagaggagccagccagcgaagcagagcagaacagagccgggcttgcccactgtctgagggtgaggtgtggggttagaggctgagtgtggagcagctcagaggagctactccccaggagaggggtgctgtcctcacgctgagctcagaagcattgctgtatgtcctgttaagaagaacctgttcaggcgccaatctgtagttgcaagccgcccgcgacctacatgaactgggtactcctggaaggcaggcttagggtgaaagagagactagacggcgagagaaataatgaagccaagacaaattttctctgatcaaggcccgtgagtttactaagagactgtgcttaaaagggagaagccccccccccacccgcccctccccctccccggccagtccatccttggtgactgtagctgccagcccggaagacccagcgcaacatggatgtctcaaaggtgtctcagcaggcagcaggatctcagagaagagcagggcagttgacacctcaaaagaagccagccaaggcggaaagctgcacggcaggtggctccacctcagtgatgacaaggtctgcaccagcccactacaatgtggggagtcctggagacctgcagaccacactttgcaggccgatgctgatctcctgtctttaaggaagctcagagattacctcagggaatggcagcttctgacagcagcttttcacactcttcagcagcgaggcagttgttccgccttctagaagtttgctctgcttctcactgtgggtgcgcccatgccttggcatgacgcgtatcattgtcctgctgctgatattggtggagtgccatgccctttgaggtggtgacttggtgggcatgtgacttcatctgttaatgtctcccttgattagcctttcctcatccccccgctttacagcatgccttacagatgggatccgcaggacgaattaagggccctgccatccccagggggcatttcagtttaatgatgtggtattgttgttcatgtttatttattatgagcctgtgatgaaccaagtgctgggtcctgcgagctgccagtgaatgtggcacaggccaggctatcctgaagaaatttaggagcagaccttctgatgcacagacagtgtgcactgtgtagcacatcccataatggagataaaggggagactgtgttctcagaaacagtgtcttttaagaactgtcttccggaaggacagagggttctgcagattgaggtgggcaccctgactcacccttgcatgtgtgcccttggctggtgacccatttgcagctgtactggcctgggtactcctgaaggagccatggttgcggggtgactgcagaagtccagccagccagccctggggtccatgggagactagccctgggttgccccttctgtcttaggaacacggaactggagaaggcccctgctatctcttgttgcttgagatgcagtgagtcccgcatctgagaggcatacacagcagggatgactaaatcctttttttttttttttttttttttgggttttcgagacagggtttctctgtgtagccctggctgtcctggaactcactttgtagactaggctggcctggaactcagaaatccacctgcctctgcctcccgagtgctgggattaaaggcgtgcgccaccacgcccggcctgggctgtgtgagtggcatgactcccaggctgtccgtactcccttgctgaggtttaatggaatgccagctatatctgaagtgtcaaaggtggtgcttcgatgttgtccacgtgtaaagcaaagtgcacagagcagccaagttggttaggcagccattatcacagacaggaaaattttactcttctacgtcttgagggttaggcatttaggacatgttgctgggtcaggtggctcagcaggtactgatcaccaagcctgactggcctgcgcttgctctctgctgctcacatggtggaagagagaatccatcccttcaagttgtcttgtgtgcatgccgacctcagtaatgggcatctttctgcacttgagaggtttgctactgctgctgcagactctgtctaacagtagatactgggaaggggctggactgggtgtgtctagatccacctcacagcaggggcagcctgtctttaggatccaatgagccgccctccagtcagtcacaccagcagcaggctgaactggtaatcagaggtccccgagtctcccctgtgcttcctttagagttttggcctctgtgtgttctttccccttccctgggtggggcctgttatctcaggatgtttcgagaagctgggtagaagttcttgttcccattgaaatcgtacgacttttgtgttgttttgaacgactgtaacattcagctctggaagcttggtctgctgttttgtgttggaggcagaacgtgggtgtcactgcctagcaaccagtgctgaggaagggtgaggctgtgccagcagaagcagcaaggagctgccccgacacagctccaagcacccagaaagcaggcttcagatggaggcagggcatgaacgttagtcgttagtcgtattgggtttccacgatggactttgcctacagagaggggcctgggaaccagtggcctgggctcctgtggggacccatgggttgggttaagcattcggatctcctgaaatgactttggaaagtgtgtactttcctgagggcagtttaaagtgttttactgacttttcaggctgtagctcatggttgggaagagaaagatggtgagccatctgttgggtaagctgcccctgtgcacgctggtcacagacccaagaggtgggtcctcattttctgtgtcagatggttatctgtattggcttacctagcacatggtccataggtggcctggggactcaggtgatgtaggatcccacttgtctttctggtggtccccatcaaaataagaacacaccccctggtgttacatctgcattcttgctgtatttaacatacccatgtcagatgatatgataatttgacatctgaacccaaaacacaatgattgaacaagatccctagtgtttctgtctcctagaaaattgtttttcaacttgcgattaacacgtgataattagaaatgtttgtggggcacagagtgacatttcggtcctgacagaacacatcctgactgatctgagtacttaatgccaccacctccttgccattcctctgcatctggagcttcgtgtcacctctcttccagctatccactggttgctgtaaactgtagtcagttacactgcctagcgctttgtctgcacctatctggagccccctcttcagtctcctctcctctccccactcccagctgctggagtaactattccacatacggaccctcgtcttgcctttctcacatggtgtttatcttcctgggtctgacttatttcatttagcacagtgtactccggtgccatccagtttgccacagatggcaggactcaatgctctgttactgggtgtaattttccattgtgtgtaccacattctcattgtcagctctgtctgctgatggacactgcagttgattctgtgtcaggcgcttgtgacaagggctggaatcagcacaggtgtgcctgacacccccacatccccccatttattccctgagatacaggcttgggtcggatagccggagcatgtggagtgtttgttcagggttttctgcaaagcctccctactgttctctgagggtggctctaagatccccatgagcaccaagtgataattcccctttctctgagttcttgcctgtatttgctattttgtttttgatgatagccattctcactggtatgaggtgaggtttgatgtggcttttccacagtgcacatggacttattgggcatttgtgtgtcttactcttagacatgtctgttcagattattcgcctgtttttagtcgggtttcaatagagatggcagatgctggccctttgtcacatgttaactcgcaggtcaggcattcttacgacttccaaggctcatcagccaattgctccttttgctgtgtagaaacggctcagtttgatacaatgccattctccggaccttgatttgttgcctcaccccacacagaagccagatgggaaccctggattttgctctcagcaagcagccaggtatcagacgctttaacccagggaaggggacctttgaggaggcgaggacagggacacagcctggagctggttgctctatcagaggacagcaattcctcccagttcctgatggctcttgggagatggagaaactcagagggagtgctgtgaagaaatgtttgccctgagataagcttggtggctgctgcaggaggcagcacctgggagcctgttcctactggcactgactgttttcctccacgccagctcctgcattcccagatttacaacccacccctggtagaagagcttcagcctgggtatgggaaactctctgcccctgacacccctcagccagcgtctgggacagtcagtggttcagtttccagacttggcgagggtcacgtcggcatctcccacactccctgaggtattgtagatgtcctggctgttgacatagccacacagccccttccttgtttgtcacattagattccattcaacttactccctgcatttcctgactagttctatggatttccatagaaacggagggggcggggggggggcggggcagtgcagtgaaggaggccgtgtccgtgagaaagcccaggaatgacatggagcaattgtgtgccagtcactggcaatagagagtcggcccacaaatctaaaattcttggaatctgtcaccgggtagctggaaaccagctctaacaaaatttctgactatggattttgacctgataaagtttagactggaaagcaagaacagttttctgcacagagtagcatgtgagggtgctctgctccgaggtctacggtttttagttttcaccttgagcagaggtgctaggcttgctacccgtcactgggatctttcgtggttcctctgtgtcccctgcatctgctgccaaggctccggtggcacttggttcgttttcctgagctggagggaggtgggcgcgccccttgtggtctccttataaagtggcctcttcctgccctaggttcacatcagtgatggctgtgtgtgcacacacactttctctttctttattaaatgttttttaagctgaggagatggctaaggtgcttgttgtgcaaggtggagccatgaagcagccgcactgtctcttctctgagtgggcaggacaagcctggtggtgggctgtgtccccatatttcttcccttctgaggaaggtttccaggtgtgtgaggtgaggtaaacagccttaccttggatcctcctgtctctggtcacctcctcgccctccagcagtctctgctcaggactctgcctgggccacccaccacttgttctccttggagggaaatggacaccagaggaagagcctggatacaacctccagcttgaagggatccaagaatggctggtctaagtagaaacatttttctctgcttaaacatgtggctctctcgcaaggggagtgggagggagaaatgttttctttccaaatccagacaccaatggcatattctcgacatgctcagtttagaaacacttgccaggaagttggtgtcccttctggttctcggatgagaagtgaggaagctggagccgagtccctagaccgaccaccgggtacagacctgcctccattatgtagacgtcctctgtgtgacagttgtcatgcacagtggcctaaggtgtgactgtgatcaggtcggggcactcgccctcatagggttcaccaactgaacagcagtacaaataaaactatactgtttgggggctaaaactggggatggggttgtggtaaaggaaaagaacagtggtggagaacgaagcaaagagagccaggacagggtgcgaggggttttgtgatgggagttattttgtgagccctggagctattcctgggctgtgaactaactggagaagtcaaagtttattagtagttataaagctaatgtaacgtagttgctgatagatcaagaaagtggatgtagcatttatagcatccctgcaagccagcgtgcaccatttgttctcaaaagttcacccagtgaaagcaatagatgggttaccaggtaaaaatatttgcgtttgtaaacataaagaaaaatatagacagtgtgcacgtagatacacctaagacatttactgcatctgttaaaggcactagtgataagttcagagtcaccagtgttcctcagtgttgcttgaaggaaggaaataaaggccctttcccctggaggagtttaaccaagagtgagcccacgttagagtttctcctgcctctttgtagctaacagtctctgcctacaattgtctgttgtaagaatctgagtctgtgcctgcctgaatgcagtcttgtctgtccccatccctgtcgctctgtccctcacaaaggtcctttgctctgtcttttattgagcagcaaagaaagcgtcatgtgggggaaagaatgaggaatgctttacagaagtccttaaggggtgaaactttgcctggtactcacgaaccctattaatcaaggcagcaaacagcaagaagaggttgtcaagcaatacctgtgtgctgctctcggccgacatctgtgcgggatagattgcctaaggttcctttcaactatttgctgtctccagcatttattaccataacatacatgaacatgagtacattgccctctgggtcaggtatggaagagtacatatcgtaagattaaagctgtgtattcgcttgggttgtaaaagttggttacatgggaactgcaagcaagtaaggttgattgtcacgtggttctcttaaaagcagttaaacgaaccgtctgagtacacagatgtactggctgggtttgcatgccaacttgacacaagctggagttatcacagagaaaggagcctcagttgaggaaatgcctccatgagattcagctgtaaggcattttctcaattagtgatcaaggtggggagggcccattgtgggtggtgccgtccctgggctggtagtcttgggttctataagaaagcaagctgagcaagtcagaggaagcaagccagtaaggaacatccctccatggcctctgtatcagctcctgcttcctgacctgcttgagttccagtcctgacttcctttggtgatgaacagcagtatggaagtgtaagctgaataaaccctttcctccccaacttgcttcttggtcatgatgtttgtgcaggaatagaaaccctaactaaggcaacagaacaacatctccatcttgagtcttaagtgacctcaagatatattattaactgagctgtgagttccagcgaagttccagtctcagaacgccgggacattgtcctaattacgcatcggcacaatttcgtcctcgtgtggtgacactgaagggcacttagctcaggtgcgcgtgaagggtggtaaatcagatccacattctgaatgtcctctctcgggatgctatccttacacagagtgctccatcctcagtgaggcagcgtgtgtttgagatgcatgcagttatgaagtctttatcatgggagtatagagctgtgtctcagacacatgaagaacagaatgaaggctgagacaagccttgaggttctcaggacagagtgcaaagtgagcttacagacctcttggtcagaattatcatgaggctgaagaggccagcagcagagtcttaaacccagctgggcactgcttagcctggaccctagaggcagagctgtggccagacagccatcccgctgggacccagacaccaaggccccatgctctgttcagcttaaaggaatctctgctactgactctgaagcccagctctttccctggctggccctgtggtgatttatgcatatgaaagtgggaaaaaggccaggatgaacagcgagatagcttgtagcttaggttttgagtatagtcctgagtccagatccctcctgcctctgcataacgttgtttccaaatcagcttggaggctgagggtctgttctcagcactcatgtacctgtggggtctggaggtacagtgtatgctatcaccccttgtgtccctcaagccttccacaagtggcggtgctggtctggctattgggggttggctggtaagaaccgacagtggacacagacggcagggtgctcgccacctcctgacccaagtttgccatttctagtcctttctaaatgttttgactttgggaaaatccttagggaactctgtggtgttggcaatcccccagggattagaaatttgattgaggttaaattttacatctgctatttcttaccaataatgattatgcttaaaattaggggccttaggatgtagctcagttgacaaagtgctttcctactatgcatcaggctctgagtctcatgcccagagcttcgtagtacagtgtggtgatacacacttaggaccttagccctcccaaggtagaggcaagagggccgagttcaaggtcatcctcaactacttaggacttttgggaacgcctggaattctctcttccatctgtctcctcatccatctccctcctcctcctccctcctccttccctccctccctccctccctgcctccctctcttcctccctccttctcggttacaaaacaccagtcaaattgtgagactatctataagataattcagcagtcttttaaaagagtggaattcatcaaagatagactgtgactctgttctagtctcatgcaagtgaaggccaagacactcctggagtgcagggacaggggctcgaccaggacaagaacaatgagcaggaaactgatggcacttggatgtgacaggggcagtgagttctgtgttatgcccaaccattacagtatacagttctgtgggacaagatgccaacctcttgtaaggcaggtggagggcatcattctatacatgcaaaattgtttcagaatagcaattagcaaaggaacaactcccaaatgtctgaagcctttttttttttgaagtcattctagatcctccccaattaaaaaaaaaagcaaagcaaaactaaaatgtatttcggtgccgccccaggcagggtacagtaagcggctctcctcttccttctcgtttttcagacaaagtttacatggggccagggcagctgtaccaggatctgcagaacctactgcacgacctgaacgttgttggccagatctcgcagctgataggaaacctccgagggagctatcaggtaacggggcctcctggatgggatgggacgggacgctgctgtggcttccagacctgtgagcatggctttgtctccgagttctccagaatggagcactcagacggacttctctgaggagcaggctctgctcggctcttctgttgtttgggccagcgtggctttcctccctgctgtggcacttgagcttggattttatgtctctgtgtgattagtccccagggagtttgtcacctgttatgaacacaatggggtctccctggggtttccatgccagagctctgctttttcccttcttctaaatgtgtgtgcaagaaaagtgtgttggctcatgcctataatcacagcctttggtagcatgaagcaggaggattgcctgggctgcatctttccaggcaggccaacctaggctagagtgagacctcgtcacaaaaacaaagcaaaagcaacaaaagctaatacgcacgatattcctccgtagaacttaaaccagtctgtagcccatgattggacgtcgggcttacagcggctgatactgaggaaagaagatgcgatcagagctgccgaccgctgccggatccagttacagctcccgggaaagcaggacaagtcagtaattccaaaacagaaacggaacggttctctgtcagatgtgttttctggctcggtagctcattacatggtgtaccgtgcagactgactgtatgtgtaccgtgcaggctgactgtatgtgtaccgtgcagactgactgtatgtgtatcgtgcaggctgtaaagggagcgcccctcttctccggcaggtccgggcggcccacgttcttcactgctgtgttcaatacgcttacaccagccatcaaggagtcctgggtcagcagcctgcagatggccaagctggcccttggtaagacacagggtttaagcggactggccatgctccatgaagaaagggctgtttcagggacatcagagaggtcgtttgattatgcatacacctgagagggtgaaaccagggtagagagaaaacctcccgtgacctggaagcatagcgttaagtggaaacgttacaaggttgtattataactcagggtctgaagaatgcatcagtggcttctattgtggtatgaaattcttgtatattgtgactattgagcacaagagtgggtccctggggctgaagccctggtccggagcctgaaaccccggcatggggaagttatcaaggagtggaaaggacagagcatcccagcctccgtgttcagcccctcctgtgacagggagtgtagtgtatcttatcttgtcactcagggctcccagcttgaaacatcagtcctgtggttttcctttggctagacatggatagatgtttgctggttcatgtatctttttagcctgtgtaggtagatcggtaggtaagtggatggatggatggataaatgaatagatagatagataggtagttagatagaaagaaagaaatgtagatggatgataggtaggtagacgagaaatgataggtaagttggcaaatcgatagataatccataataaggtagatagacaaaaggttggtaggtagatgatatatagtaggtagatagattgtcaggtgataggtagttaggtacacagatatatatagaccaaaggatatatatagacagaaggattatgggtaggtaggtaagcaggcaggcaggaagacccacatagagatccttctctatagaacttatatagaattcatatacacacagatcttttttactcagtgtgcactgcagtgccgtgtgtgtgcatatatgtggcctgtgagtgaatgctggtgtgtgtgtgcaggtgcaggtgtctgtgcctgtgattgattacctgtacatgggtaggcgtgtatacatacttgtgaaagctctcctgagtgcagactgtctgaaaagtcacccaagaataaatcagaagttggccattgctggtcccctgggaaaaagactcttactgtgaaagggagacccctggcctgactgaggacagggtcatagctctttgtcccctcctgggtgtttcgctgagttgtacctctacaagcaaagggacgacaccttgtgagatgacgtgtgtgtaagcacctgtgctcactcagggctaaggtggccatcttctttaggagctaattatgtcttcatgttcatgaatactttgatgaatctggatggacccagcccatattggcgtgttcagttcagggacagacagggagcgtgagtccccatgccatgctgctgggctgcagcagcgagtggtgtcctccgcccacctcgagttaaggagagaaaggcagtgctgcttcccaagatagaatcattcttgctcacatgctgtgaacggttgggtacagctgcaggggcatgacgggcattcacattcaccccagcagctcagctctgctctctctgaatgtgcccacagaggaggagaaccatatgggatggttctgtgtggatgacgatggcaacctagccaagaaggagacacaccctctcctggtgggacacatgcctgtgatggtggccaagcagccagagttcaaggtgaggaccccaggcaggcagtgcctacttttgcaggagacttacttggggaacgctactgttgggccttgatattactggttgagaggagatggttttggtagtcttggaaatggtagctgggagcccaccaataaggctcagccactgtctgcatggcctgctgctggctaaggttattggatgccccatgcccactacaccagcatctccctcctctgtgatgacccagccccaccaacagtcccgctctgtagaaggtcaggactctaatgcctttatctccttgatgtagtgtgctccttgtctgctaaagtgccaggcaccaaggtccaaagccactaacaaggtaccatgcctttctttaagaagtaacttgacactgttctctctccttcattcctgacccctaacccacttcctggggagtatcttgcccctggctcaagagagcaagcctttggaagcctcagaactcttgccctgtgaacccacacagctcatgtgtcagaaaggccagcagacacaccatcggttttcctgctcctcgctgggtcctcctgtctgatttggcatgcccagctggcttttgacatggttgagggggttctaagacaaaaccacaaaagaccttggggattcatgtctgcaaaaccaacgtgtaagacttacacagttggctgtttgtatccctgggctcgagcccatggttcagccggcagaggatggaaaacattttgaatctgcaatgttgtcttccattgcagattgaatgcgcagcttataaccctgaaccttacctgagcaatgaaagtcaaccagcctcaccctccacagcccgtggctttctgtgggtaagcactttcgcttgttgctagggccaagtgacaaggagctggtaggtggctgaggggagctgagcagagactaccaggttagatttccaaacagagctttccctgtgaggtttggacttggggattaaaatgttggcttctatcctttttcatctaagacttttacagtggaataaagacccaagatgacgaacttaatggctgcgccatgctctctggtgtctcaccacactggctccccccccccccccaccttcgaaaacattgctggctttttaacactggtgtcatagctgggatgaatttgtcccacaccaagtctaggctctgggcaatgctcagttgcagtagtgctttctggttcttgcacactagaagaatgtccctgggcctgggtccctggcctctggcccctcccacttcccctccagtacacaccgctcagagctgacatccctgtccaggcagagctgctgctcagagcccttgctggtagtgttcagaacggggcagcgtggccagctgctgtttcagtgtgcctacctagggaccagcagagacactgtactccttctgggtagtaggttccttctgagcagatttgtagctgccgcagctcggcacacacacagacacatgcatgtaggcccacactcatccatgaccaggaacctgacggctgcccctcctttcaacagggttcaatgggcttgcttacttgtagcatggaatgcatgcaggaaagggaggaaggtatgacggtgtgctccgggttggaggagcacggagtgctccctgaccgcatgcagtgtgcccctggcatgacctcctttgggctcggtcctttccagtttttgcctcttgaaaggcttgtctcttcactaaggataagcgctgtagcactttgatgccagcttacttaacgccgtcactaatttgctctccggcacattataaagtgactgcatgactaggcccttgcctagtgtacagaatgagtgttgggtgttggatgtgtatacttgccgttttgaaaataaagttgtgttcatgttactgaaaacttagccaaatttaacacattgaaaagagaaatgggctctcttggaaatcctttcacctcatttgcttttctgagtgtgactcacacaatggaaatcagtaccgtcctgggtcaggcttctccacatccaggatcacgcctcatcagaagtggtagcaattccagaagcatgcctgacgtcacacgctctctccctcgcctcctctcttagattggaagctgtagcaaccagatgggtcaggtcgccattgtctccttccaaggttccaaccccaaagtcatcgagtgcttcaatgtggagtcacgcatcctgtgtatggtatacattcccgcagaggagtcaaagccccaagaaaccaccgaaaccaaggatccagaagccacagcctcgagagcaccccatgtgcccaccatctgcctgggcacagaagagggaaggtaaagaacacagagaacacacactgttctagggattgtcctcagttcgagccatgccacctcgcatgtcggggagtgtgagcctagtgtaagatgcaagggggggggggacttctggtcagtcattgtacgctaaagtgaccatgcccatggtaaccaatctgataagagatctgatagcttttaagaggggttaattcttcttttaaaaaaaacatgccacttattccattttggaataaagaaacaatatcttataatcatatggaactttaacaccatttaatgaaagattaacattctaaaatttataggaagaaaatgaactatgacccagactctctcttcaaactataagaatgtaattgtaatggttgtgggtgttttttaaattcgggttaacatagtgggaggaaggagggaggtgaggaggacacgtgccatttgctgatgcagactggcccctggtcctctctccagcacacgcaggcctgctaatgtgtgcgcttttgtttgcagcatttccatttacaaaagcagtcagggctgcaagaaggtgaggcttcagcacttctatgcaccggacaagtccacggtcatgagcttggcctgctccccacaaggcctgtatgcaggcctggtcaatgggtccgtagccagctacaccaaggctccaggtaagcacccacactcggccctgaccctgggcagcaagtcagtctcaccatggggcttgtccctcctgtttccaaacctgcgtaacgtgctcctttctgaaagggcactgatggacacacgggaagtttctctaaagttggtttccaggggcttcttcccgttccacagtgactcagattaacctcgaccagccttagggccccacccagtgctgttgggcaccctaaattctcgcatgctctccccggccttcccacatcactcaaacccatgttcacatgggggcgcggcacctccccagggatggcttctccatcgatgatctttccacgtggcatcgtggtgactggcctcatctgccctcagggtcacaaataccaagcccatgtgtgcccctcgccctccggtcctcatacagcatggcggtacttaactagccatcctgatgggctctgatgaagatggaaagaggactgatggcccaggtcacatctctcctccagagccccctcctgcctccctggctgtctggtccctctgtggttgtccccgcagatgagagggtagcgcagcccacactgttctttggactttgggaacccgtcttgtgggtgggatactgctgctctcattagctttcgccacaagcttcagctgctgcctctagaaatgcttttccagggattgtccttgctgctgcacagcgtggcaggcatgctcaccagatgcccaggctgtccccatggccttgcacacctgtcccctcagttccccaggaactggtcacaggccctatgcacacacctccaaagccatcctgaatatttgttagtgagctttcaaaatggctggtgacttccttgccaccctgcggagtacttggccatctggtcttctccatttcttgtgtgctaatctcttaaaggattaagccccatctctgtacattttgaccagcccggccctgtgctgtgttatacagaatgcatcctggcgcatggtgtctttgtagtcccactatctttgcagccttcctggtgtgtcttaagctccctgagcattgtgggcaggcctgaatggtagagtatagggtgggcggagcatccatacagagtctgttgtccgtctgcctgttcttggtggcagaggatgagattggtcggaaactgaagccctcccagacagagtgggcactggaaacctggacttgctttggaatgggacttggaaacctgggacttgacaggaaaccaccaggttgtgaaggcatgggactatcactattgttagcttgtgtgtggagtctgactgtggtgcaggtgacctgcctggcagctctggcctcagcacaaacccagggagaagctgtcccaggaggcagtcctattggcccagattcacacactttcaggttgcacgtggccctcccagggagacaagaacacagttatctaaggaaaagagagcttgcttagccagaaactggccagaaaacagaggccaattgttgggagtctagtcttaaccaaagcggaatatctaaagtgggttatcccacctttgatctcggagttcctgtttcaaaggaagcacactgtcgatccgcagcaccgagctctcctggcagcccgtgggcagagttctgtctcatctgcgttttcctgccatgcttgccctcgggagcatatgccatctcgggtacaggctgtggtgcagtgaagggctgtgagtaccacacctgggatgctcgtttgtatgaatgttaggacatgtgtgtgtgtgtgtgtgcatatgcatacctgaatttctgtgcacgtgcaccgatgcatgtatgtgtgcacacttgtatctaaccatattcggacccagtgcaccttctgcatgaaaggtaggctgggacactgaggttcaaaaccatcctgcaccactgttcaccctgagcagaactcccatccaaggggctgtgcatcagtaagcacaccacagcagtcagagatcccccagtagcccgcctctgtctaacagcccagcccggatcccttttaatgcttgggggtgtttactcaaaggctcagggcttctggtctgacaaaaaaaaaagctaaggccttgcttcctctgcactaagagcacacacacacacatacacacacacacacacacacacacacacacacacagacagagagagcggggaagccacactgatgatctaattaccatcagactcctggggcttaatgaatggttagggtgaagactgaggagttaagtgcttagaagacagccccatccgttgttttaaaattcacgttaaatcttctttccggctgtacaatcgctatgctaccgattcattcttatttgagttgtggtagaactaactctctaatctctgtagctttttcaaactaaactatgctttggcttcctgggggtcagggaagggagggaggcggttaaagagcagagagcctttggcttagtgttgtcattctcacctccagtaaagacacgctcctcccgagatgctgtactcatcacggtgtgtcttgaaaacataagcatcttcccagtgattttggatatagtcctcctgacacaaccaaatcagttcacatattccaccgggccacagtggcgtctatggagccatgtgacaggtcccgtggggagctttttaagtatgcacctcatttttcgttcctggaacaggttttgaggcttgtgacagtactgccctcatctaacagatcaagaaactgatgcttaactcacagagagcaagggctgtgtctagagacacgccaggtaatggcaccctttgctggggcccataggaagctgtcccgtcctgcctgctgccttctgtgtcttccacgtgctacagggctggttctagggccccggacactctttgtcggatgcaagtattgtattcacagttggtacttgagttgtgttttgcagtgatgtgtggccctgtttctctgtccctgtgcacagttgcctgaactcaagggaaactaaaattgtttttttttttaagatggatcctggaactcggaaccccagcaagtgatcaagttgggtgtcctgccagtcagaagccttctcctggtggagggtgcactgtgggcagcctcgggagggcaggtgttcatggccagcgtggagactcacactatagaggtgagtgctgccaagcctaccctgctgctgcctgctggtgatgggatgaatcccagaagcagctaggcttttcctcagtgcgagtggcaggaaccggtggggcattctggggccgtgtgtgaaacgtagacacttatcgcctgtgcttagaaagacaatattacctagaaaattcaaccagccatttcctaactacacctctggggcatagtcgctctgtgtctacctggtgtcttttttgttgtttatttgttttgtttttttgttttttgagacaaggtttctctgtatagccctggctgtcctggaactcactttgtagaccaggctggcctcgaactcagaaatccacctgcctctgccttccaagtgctgggattaaaggcttgcaccaccacgcccagcacttacctgctgtcttgagtcagtgttccattgctgtgaagagacaccaggactccagcagtaaaggcagttggcttacagtttcagaagttccgtctattatcaaggcaggaagcatggcggcatacgggtagacatggtgctggagaaggataaactttatttttagagccatgttaggttcttggcaaaactgaaccgaaagttgagagactgcaccacgtctctacccccatgcacgcccctttcctgcccctccccatctcatgcgtgtttccatccgcggaccagaattgatgtgtccttgctgttcggtccgctgtgtacactggtctccagtcacaaggtggtcctgacggtcattgactggtgccactccagcagcatgcacgacatccatcccctctctaaaaccctctgtccggcactggcttgttcctctttcccagtgtgggtagcctcagaccttttaggctgtgtttcagaatgtcaagggaatggtaattagacgtttccaaaacaggggtagagctagttagacgcaggcgcactacacagcattgaaggcggtgcacagccttgcgcaggcctgccagtcaaaggagaaaaggggtccgcacagcacgcctacagcatagcgctgcatccactgccgacggtcaggtctcccgttccacgtcccagtctgtgtgtttgcagttcacagatgtatagactgtgtatctttcactgcgccattggtattttctagccatatcttacactacttattataccgattgctcatgcccagttaccccatctgtcttaaaccatctttcaccccgccctgtccctatgtaagctcaggtcacactgttttggttttgtttctgtttttattctatggggtggggtagtttaacctgatggttcagcactctcctgctcgctgcttcagtgtcacactgccatcaccattggcctcagagaacatttgtaggtcatcttccgtggggcttaccagctcaccagagcagggcttcaggccgttctgctaagagtttacacgtcacacttttagacattgtttggacatctatttcaggacatgccttggtggcatgtgctgtccccctcggggagagagtgatgcagagaactcgggtggttttcctgttgagagtagaattcagggcccaatgcttgtttaacaccccaccgtttaaccaggcttttgccgcaagagctgcaaactgtagtatgtgtgactgacacagatatcatccgtgcagatgctgcctaagacctgcagactccctagggcagtgcaggttgcagaagctgaggctctgcctgtagcaggatgtttctacctgggcagaggagcagacggctgtgctaagtttcctgggcagacccaggttcaaaacatcctccccaggatggcagtgagatagcgtcactcacgcccaggctgagcctcaactgaagatcctactgcctcagccctagtgctgggctacccctgcgtctgttttttctgattcatgtgtgagcggcttctctgtgttccaaggcccagtccgccagctagccacaggagaggcaggaggagacctgtgcaagcatctcctcccgtagtttcctggtaacttcggttcctcttacatccacctgtgagtcactgttgttgtaagaaccttccttcaagcacagagcgagccctaccaagtcacaggtaccatggcaacttcctgggatttttattgcagcccttgccggcaccagtgacatcattcaagttcctagaaagtcccaagaacctgcgtagacatgctccacagggcagatctgacgactagcagtcctcacctcgctggttctgtgtctaaactagcccagctgagtgtcacaggatgctcatctgggcctctaagtcaaggggctgctttgttggtgatgggaaacgcccaccacatccagcacagcacactggagcccagcggaaccacagctgctgtgtttcatcaggatgaaatcttgcttaaagaaatatccaagatccagagtagtgatttgttagttttatactgagacatagtaacactatcttaagatgtttttccccaaatggcaatattatatcctcttcctcctcttcctcctccttctcttcctcctcctcttcttcttcatcctcctcctcttcctcctcatcatcactgttattcatattactatagtaaactaaaaccaaaagtgctaggggatgctctctgcagccttcctctgaaagcaaccaagataaggtagcattccctgcctgctttattaagccacacgctgtagagaggctcagtgctggagatttccaaggctcagcgcgtagagcattcagatccaagtaccagtcccctctgtgcaatattttagccccaaaataactagacacatttatagagagaagcaaaacctgcttttctgggaaaacgagattcatgctgttcctgttttgtgggcagccacagctgagatgtgggtgcagcccgggatctcaacccgtgttcacccagctggggcgggggtgctgctgctggggggagccagctgccttcctgcacagactgtgagcctacggctaagcctgggtcgtgcagggtggggagcactgggagccattagggaggaggccctgagggcgaggcatcctcacagctgctgcagggctgaacgggaaggctcataggccagggcatcctgggtctggggtctctaacctggcagcctgggtcagaatgcctcccaaaggacaggtctgcctcctgccaagcatgagggcagttcatatgctgactgtcacgtagggaggaactctattctctacatgttatttctctctctctctctctctctctctctctctctctctgtgtgtgtgtgtgtgtgtgtgtgtgtgtgtgtgtgcgtgcacatcacaaaggccaaaaagggtgttagaccctctgcagctgaagttacgggcccctgtgagcaaccaaacttgggagcttaggaggcaaactttggttgtctgcaagagtggtatgtgatcttaatccttgagtgtctctccagccccttgccatcttttctcttttccagctgcgtgttagctttccttcttacctttgagtgtgtgtgtgtgtgtgtgtttaaaaatctaatctcaaaaaactaataccagtctaaagcaatctatgtttatgaacaggctggtgttctggggttccagtagatgctaacttcccagctgttttcctagagccatggggcacagttatggcatcattactggagaagcttaactgaaggctgctttccttgctcttgagtttccaccatttatggtgctttttactagactcaggtggatagaaggaaaggaataaagggacagacaggatgaacagccaggacaagaatacagcaaccccgcagtagtcttcagccacggtcatccctgtgacagttaacagagcagcaccggccagggctccacccatccatcctggcatccctgtgacctctgaggcatgctcagaaactgtttcgcagggagggaaggaacaggccctgggcctgcgtccctgctttcaaacaggacaccagacttaggggatccatgcccaggatcacagagctgaaccaatgccgtcctggtccttcatccagcaccagtacatactgctgtgtacctgccaagtaccaggtaccgtagagcagaccctggcattgtgcccagccacgggacagtgtcaggtgctgtggagctctggtgactccattcggcccagccctcagcaggcatggtaaagccatgcccaggtcagaactggccttgtaatgtccaatcactgtatctgccctgagtctgtgtatatggctatggttgcaaaaagcaaaccatagggccttgtcaccacttccataaagataagcagagttcacgaggaaggcatgggaagggatacagagagtgtcatagtgatgtgactccaggaggaactgtagtcctcaggttgaagtgtggaccaagtgatgaccaagtgagagggcagagcgggtctgacagggccaggaggaccccacagtagcaggaacctagatctctcagcccagtgtatgggatccagggcaagaggtctgggcttcctcccagcttcctggtctgtaggcagagatgggaacagccaagtcttctggagctagcgccttggtccttaaggccctgatgcagacgtcacatcgcccacttgccatgtgatgttgagcatccagagaccctagatacccaccaggtgttatgaaatgtgctttcttggaagatgaccctgccagtccatcaagtgcttgagaaggttgctggggactggagaccctggagctgcagctggccacatgtgcttccggggaaggctgggtaggtgcgtgacatggagaggaaggagggacccgctgtttgatcctccggtttcttgctctgctttctcaagcctccctggaagtcctgtgactcagcttccgcaggttccctggggcagtcactgttccaccctgaactcaaatgacgggcagccctgatcaagatttgtgcccccaaattcgcagaggaccatctatccctgcagacagttctgcaccctccgagagcacaggacaacgggcgggaagggaaggctccttcagcacttacagaaatccggtattgcaaggcaaactgtcctgccttgacctccaccagaggcttggcagagtaactgcaatgaggaagtgatgctaatttccagagaccagggaagctgggcaggtatgagcttagctgtgtcatgagaacagtacacagagcggtctgaccctccgctgaccccacgtcccttgcttggaccaggcatgagattcagagccacctctttctccagtccctggcactggatcacagccctccccgcccccccccacccccccaccaaggcaccccagctgcctcaggggcagggtcctgggcaggggacgtgcattccttgtgtctggattacaagctctacgtggaaggtccctgcttctttgtgacctgagttcaatcgcagtgatctacccaatgtgctaaggccagagttacgcaggaagcagaggtgtctatcgatccagacttcctcctccagtgatgcctgactgtgcagggtgtgtgtgggtggacgggtgtgcatctcagaaccctgaagaccatgccagcaccgagactagtgggcagcagccttcttcagcatcccagaaagtgtccccgtacccagcctgagctctagagtgaagcagacagcccctgtgggggtggcagtgccggccacagagtccattctccgtgcgaaggcatctaggaagaactgtccccagggccgtccagtgaacatcagacagaccgtgcacaacatgaacccacagagaggagtctaggggccaggccagtgctagcgtctcagggcacatagaggaagctgtgtgttggcatggcaacagcgtaagtgaacacacaaagaggactcaggggcccgcctcctcctctgcccacacagagttgacagttattacctgagatgctggggttgggctgagtgggtgttgtcgggttggacggaggagaatttgctaagctatagtcttgaatacagaatccctaaggaatctgggacaacactggcagattaaaaaaatcaaacaaaacatcaacaacaacaacaaaatctaaaattcagcaaggtcagaggttacaagatcaatatccaaaaatcaatctagtttgtgtgtgccagcatcaagcagcctgaaaaacaggccgaggagacaaggttgggagacatccccatacagctcctaacctgggttctgccacccacagacaagcaaagccactcctaccctggaatcttccattgaaatgagatacagttaacgcaggctgtagctaagctcagcccggctcttctgggagcatctgtgtgggtgtgggttactgcaaccttggcaagcctgttgcctctgcgattgatgggtcatgtgctgcgcacccttgttctcttaggacacagagctatgtctgtccccatctctcccctcacccccacccctgagcattttaagttgttgagatttagagaggcaagattgatgctgactgtgaattacttgactttctgtggtgctgttacgccgcacttggctttggcctctacaccccctctggtctcaagatgaccgtatagctgaggtttgccagcaaggccttgtgcggtaacggtgccgtgagggtgcccattggggaatgagtgccctgtgggcagggctgcttgcttcaggcagggctcaagggaagcaaccctaggactgttacatctgagggagagcggcaggctttatctggattggagagaaggacctcctcccaggtacccacggctgtgctgctcagtgggctgggtctccttagggctctaagccagcagccattcatcctgtagcccctttcatgttgtgttgagtttgttctctcagcttgtgaaggtagcatgataaaaggcaagtagcgttgggttctgtgagtgacttgcctgctcggggaagcctcaaaagcgttgtgcccacgggtgctattctgtggctgtggacggagaccacttgctctgacagtcacgggtttgatctctacccagaccccatgatccccagaagtgactcagcctagccccgccgtgtggcatctttgccctcagcactgttgtagactctggctatacccctcgataccctgtgtgacctcatttcctccactcccccagaatcagctggaggcccaccaagatgaagggatggtcatctcccacatggctgtggctggcgttggcatctggattgccttcacctcggggtccaccctccgcctcttccacacagagaccttgaagcacctgcaggatgtcaacattgatgcccccgtgcatagcatgctgccaggtactgcccccaggaagggagggttctaatgtccctgtccctcgtacagcctgcagccgggtccctcagaaggaaggagaaagggcagcagatgttcaagggacatcagctgctaaggcacacatagccaatgtggaccatagcccctgggtgttcacatgtgccctgtgtgtataggtgcacagctactgtgtgtagtacttggcatggcttcatgtgtgagcatgtatatgaacatgtagcctgtaaagacaggtatacatcctgtctacaaatataataaagactgcattaatggccacagtggaccacatagtggcaccagaggcaagaccgggaaaaataaatcgtcctaaatatgtctatggccaataggaatcactgaaaactttgaacagggagaggagagaggccatgccagggtggatttggggagtatggtcttgtagggagaggctcaagtgcatcttgctggccctttgtccacagggtcctgcctaacaggctgcagggggagcgtgggagaaagatggggacagtgagcacaggaatgggcggagttagaaagtaagtgatgggcgtgggggcgtggccacctgtcaactcatgtgttggatagcgtttacaagtgatttgtagctaagccattccaggcgccttggaaaagcataacaacaactcaggggtcatgatgccgaaagggtacgcacccacccttggcatgaggagtgatggggaggcagagaggcaagaaaggtgccaactgataagatctgctgagacctgaggacacaaggcatctagggctgctgaccagcatttccctatgggattggccgctgaccgtttttttttttagataattgtaggctattttatttcgttaggaatatggagggttttttaaaatacatgttatttttagaaaacaaaagtgattcagcatcaaggctgcccccccccccagcatgcttctgtggatcatctggacaggtgtttgctgttggcatctgtcctcacccttagacagaaaccgtgtcagagtcaccagctgccagcacatgcttgcatccggccagagaatgccctgcactctctattgacatgggaagggacaggagttagattgttctggggcccagatcctgactctggtgccctgtggcctccagggaagcagctgtggttgccatggttcctggaatcctgagaaccaaccacaggaatgtgtagggccacacagtgcctccatctgagggcaggggaaggggtgggtgggtgagggtgggggctgccttgtgttcatctgcctgcagtttctgtcagagactgggagaaggaggcattggccagtgagtggtgtgtgtgtgtgtgtgtgtgtgtgtgtgtgtgtgtgtgtgagtgtgtgtgtgtttatgaaaataatcctcgtacatgatacagtgcaatggaacagcaagaccatcaggtgaacagtgaggcagctgtgaggctctccatcttgccgaccctgttaaccggtgtttcccatgacctcggtgtgtacctaatttaaaaaaatgacctgtgggctgctctcctctgtctggcttctgagcagatccactggcaatccttgctactgactcaggccagcagggtgcgtacgaacgtgcgagggcacacttgcccacttcctctcccctgcctggtactgacccggtgtgggtacaggctcctccctcccaggcaggcagccagtgctgactgggaaacactgactaaccggccggctcgggtgtgcagtgttctgtctgtagctgaggtgcactgcagggcactcttgtgtttctttccgctcgcctgtagccatggctgcccctcctcagcctcctgctctgcttccagttggccaagcattgactgttcccaaccttccctacaaagcctggccctccttggcaccaccagattcatgggactgttttccattttccagaggcccacccacctcaccgatcaaagggcatgccagagtctcttgaaagtgttatggtttgaatatagcactgccccttgacagcctgtgggtttaaggttagggacagttggaccatgagggctctggcctaatccaacggtggcttcatacttcaatggtgttgagaggtagaggaaactaggaaatggggtgtagttagaggaggcgtgttgctggaggaatgccttggacacatgccccccaccccactcctccacacagctcctaacctttctcagctatcatgagatgaacagctttcctccacacacccttctgtcatatgctggcttgccagcagcatagaagccatggaactactgaaagcatgggccgaagtcatttgtccttttaagttgctaatgtcaggtatttggtcacagccgtggacgatggactgatagaagtcatgttggacacagcaggggtgggggagaccctctgtcacagattttgatctgcttctgtgtagctcgnnnnnnnnnnnnnnnnnnnnnnnnnnnnnnnnnnnnnnnnnnnnnnnnnnnnnnnnnnnnnnnnnnnnnnnnnnnnnnnnnnnnnnnnnnnnnnnnnnnnnnnnnnnnnnnnnnnnnnnnnnnnnnnnnnnnnnnnnnnnnnnnnnnnnnnnnnnnnnnnnnnnnnnnnnnnnnnnnnnnnnnnnnnnnnnnnnnnnnnnnnnnnnnnnnnnnnnnnnnnnnnnnnnnnnnnnnnnnnnnnnnnnnnnnnnnnnnnnnnnnnnnnnnnnnnnnnnnnnnnnnnnnnnnnnnacacacacacacacacacacacacacacacacacacacaacaaacgctgtggtttagatagaataaagacagtgtttcagagcagtgttcactgcagcctgagtttttgagccactaatgtactactgcgagcaaaaagtgcccacgcaggcgtgtgtggaaacagcacaggcaagcgtcttttcatgtcattgtaaaaacccaactgggtcctgctgatggagacacactgagccaaaaagaacaaaatttcgagaaaaaaaaaaagatgctgtaactatcagaacttaatcagagcactctcctctaagaccaccctgtggaccacatgaattggggtctcagaaggtcgccttccccttcctcgtagaattcagttctgaggccgttcggcacaggctcctaacgtaaaccaccacactgtgcactctcggcccagcagtagaccttagccaggggcaggcgtgggactcagcgagcaaagaaacagaaggtgtggctgcagtgtgggaaggccccaggcagccccggggttgctgcacaggtgtttcctgtcctgtcctctgaactcagagcaagcagagaggggtgacagaggtgctgggccacactcaacctcctgtgtccccgtggagcggatacagcgtccagaagtgatgcagtcaagtcaaagggccaagtttcctattaaaaaaaaatgagtgtgagtcttctaagtgccacggccctagtcatcagggggctgtgagttatcttgtgctcatggctatgtgtggatgggggactgtgagttagcttgtgctcatggctatgtgtggatgggggctgtgagttagcttgtgctcatggctatgtgtggatgggggctgtgagttagcttgtgctcgtggctatgtgtggatgggggctgtgagttagcttgtgctcatggctatgtgtggatggggactggatgggggctgtgagttagcttgtgctcgtggctatgtgtggatgggggctgtgagttagcttgtgctcgtggctgtgtgtgaatggggaactggatgcaggcacacacacagctggcacttgggcagcatctctctgggcagctggggggtgacccgggcagccaatggccagttcctggaacaagtttgtatttagtccctaaataaaaaataggaaatagcagcatctggggctcacttgctttcttcctattattaaggccctttttttcttaacgacatggggcagtgtttggggatcgtgtgtgaggccctgttacatcgcccctaggcaccctttatctctgcatccatgcagggtttctgtctcccagcttcctgcccttcccctctaggtctcatcccactgtaagacactaccatgttagtctcttcattctcctggggaaacacacttccgacagaaggggcagctttgaaaaggcaatggaacacttcccagattcctactatacttaagataatgtaggtgtaaaagtgaaatttctctaaaaaaaatacacacacacacacacactgtttacatgtgggagaatcgaagagagaatgaaggatacaagatatatttctggatgaacagaaatatctagcgactctttcatccttcgtgctttgatgataagtcatttttagaagctaccaaatgagatgacattacacacatgagaagccctgtttacctgttaattgtctttgaagtgagatcgttcacagcaaaagtatttcacaggcatctctaaaagcccagatgaacactctaaaagccatgaattcaaaaattcttccttgtagaaaaagtaaaggaaagtatgtctcccaacgcaaaaccttttaggagtcagaagagagcaaccgtggcaggctgtgatttgtggagctttgcgtgcagttgattggcagcctgggtccgtgggcgtggctggtcctcaggcccctgcacagagcacagctgagaccttggggtgaggatgtatctatcctccgaggttcctaaatctgtcttaaaaaggaagtgcccacagactcactggaactttccatcctcccatctgttttcctggctcaaggcagggcgacaggtggaggaagtggctccagtatgttggggtcgactcacacagcagtcagcagtaatggcgcggagcggctctggaacttctcaacagctcttgaaaggcaaatcagctgctcacagagttccaggccactgtgggatcaactgcggtgcatcggtaaggtgcacgccattacagatagacagacatctagaatcgcagggattaaataccgcgagcttctggaaacttgtacagatcactgttacgaagtttttttgttgtttgggtttttgtttgtttttaaaaagccttttctttttaaaacatctgttttgaagtctaagcatttcataaaagtggcctctgaagacacgaagtccacttgggccccagtgtttgcctgtccttagcgtgaactttgtgtcagaggcagatatagcaaaaataacctttgttctacagaaaacgagtcaaagggcgctccctgagcaaactccgtgcctccctctgtgctggttggctttgggcccaaccccaggaccagtcttaagactctttgaacccagtgtcactttccatggccgcagagtgcccttgtaggcttcctgatactctggagctggagagactgnnnnnnnnnnnnnnnnnnnnaccccccccccacacacattcaccaggcagtgacacccactcctcccaaggccccctgctggcctggctacagagcaggctgccagaacagcccaggcgtcccagagactactagcaacgtgatttcgggcatacttgaagtgaaagtctggaagccccgcagacagtgcctcttgattgcactgtgctgcctctgtgtgtgtgtgtgtgtgtgtgtgtgtgtgtgtgtgtgtgctgtaagagacatgtgtgtgcacacgagagggggggggtggggaaggaggcccttgcaactgtgtggaagcagatgatttcgatagctctgggttggttcacctcgagcaaggctggtctgaaaacagactggagacctgcctgtgtgatggctgctatccagttgaggtgcactgacagaaccccccaaggaccttgtctttctcttctggttgaggaaggctcggcacaggtgtgagcatcctaacagcttaccctgccacaaggcttaggagactagagagactggccttgatgttgggaacattccccagcctcacgcccaccccctgcttcccacccagcactgccgcctgagcgggcatcagacactttctttctctctctgacccagggcaccagcgtctatctgtgaccagcctgctcgtctgccacggcttgctcatggtcggtaccagcctgggtgtcgtggtggccctgccagtccctcggcttcagggtatccccaaagtgacaggtaagtggacccagcggtgtgcctgcctctcctcagagcagctaggaggagaggcagctgctgtcctgtcatctttagagaactgtagggtacttagcagagacataacttgctcatttgcatgttctctttatacttctgcttttcttgtcattgttggtagtccccagagaactgatcctgaacactctcctacccatcagttcccttcagagcacaggggtttgctcagtggaaatggagcccttcttcttgggtgtagagaaggaggctgggtacacaacccctcccctgagttttgcttctggcaatcccagttcacactggacggcaggtttggaaagcagcccaacttcatgggtcttggggtttctactccaggatgctattcaggcaagcccccaccccccggccaggaacaaagcatgatgggaagacttcagtagcatggaagagatagcctgcatgatcaaatgagaggtggggaaatgtttaggaagtggttgccttagttgaagagaccatggttgagagctgttacagccccacccccatcccttcctccctcaccccatctttcatcttcaatgctgagggttaaatccggggcctcacatgacaggcattcacacctggcacccagctacctgccccaacacacgctcactccttgtaaaagtttccgttttgttaggaggtaaagtttcaatcgtggagtgtatgctaaccaacagagaaactggggcatcctttgtatgtttgaggccccagtcagccttctcaattcacttctccctctgtcgccactgatcctttcttcagttgtattctccaagttgaacctcacattactctgcacccccaaaacatggcggagatcagtgacatagggaggcggctctcctgccagtggccaggaggagcccaccaggtgtctccgacagctgggtcacaccacagggagactgaagtcctgatttttcacactctggaaacttttgcaatagaaattgccaggagcttctgatagtgtagacattgagttcctaacactggaccacttcagtgtttggcttcttaagacgtagggaaataagatgcatttgcacagagcaagtgaggaagcgtttgatgcccaaagctaaaaacttcttatgatgttatttcaggggtgtgagtataagaaaatgtaatctaaattttggaaaatcacttttatgtatgtttgtattctgtctgtctgtctgtctgtctgtctctctctctctgtgtgtgtgtgtgtttatgtatgacatatgagtgcagtgcacatggatgagagcctaagattccctgggtttgtagtttcaggcaggtgcgagctgcccggtatgggtgtcaggaccccacacctcgctccctccccccccccttgtcttctttgagaacactaagctttcttacccatggagccatcagtttaaggctttgggtaactacgtccaccacagtgacgtgatctagggcgtttctgctttaatcaccctgtgttagtgccgcctgccaagcttctgtctaggtaggagctatggggttagatctggcactttgataccctatgctgcatgcctgttattaaagatctttgttgaattgtcccccagggcgaggcatggtctcctaccatgcgcataacgggcccgttaagttcatcgtctcagccacggcttttcaaaacaaggacagagccagggacagcccacgttccggttctgagcttcaggatgaagaccccaaggacttgctctgcagcgaggaaggtccttcctgcccgggccagcctgacacctacacatccgtttggttgggagactccctaggattgccaactcaaaagaatgatctgtcttcgtcctcggggtcactgaacctgtcccatggctccagttccctagagcacagatctgtggacagcagtctgtgtgacctgctgagggaccccagtgcctccccaaggagcagaccacagggctctaggcgagcaagagccagttcagcgctggtggtgtgtgggggccagggccaccggcgggtgcacaggaaggccaggcagccttctcaggaggacctggtttcttcagtgatggtgtggcagatccccctgctgggcatgtaggtcaggaggctgctgcctggcataaggtggcaatcaagcacaactctcagccggatgcagggccagctgacagaggctgcatccacaccaccgggaccaactggaagcagagtttggaaaagaaatattctgtggtcactctgctctcctgccttcctcccatcgcacaacggagcccagctgtgccagggaagcaggggagcgccctggctgtggggtcactggaccacagtccaggataatgctacagtctgccccatcattcacctgatacataaagtgagctggctgtgtgggctccagtcccatctcagagagctgacagggaaacaacatagcacctagtagcataggaggtcattaacaacccttaaaatcattctacttgactcagactcactactgttatttatattctctatatttttttaatcccagaatacagattgtaacaatttagaaagccaggtaacacaccccagtccagtcagcttgccctttttggaaggagtgaccaaggctttccaaagtagactgttgtgtgtactgtgccctttaacaaatagtgtttttatattgcattttttttctattaaaaatcaacagttaacattttagtcaatgtactctctgtagcatttcacacataatctttacttgaagccaaaatgttcagtacctgtcaacattgaactccagcttccacgccaaatcatacttgccttctcatactaagtgacattaatgtctgcgtggggcatgtgccggcccagtcatgcagggatggtgctagatgtgtctctggtcttctgtgcacctgctgtcagagagccatccacacagttggacactccttctgagtggtccatgatgctgatcagtcagccgctgcccgcccctgcacctgcctgccatccctgtaccaccctccccccccttcccaaagaacacacagggtcacgtgggacacttgaacgtcaaggggcatgagtaacccatagactctgtttgctccagctgtattacacatcagtgtttcacttactggatggattaaaaaaaagttgttttttttaaatttaatgcagatattattcaccaggaacaacttctcagcactttacaaaggactaaaatgctaacttttaacttagccaaatatttttctaaattgcacatatacccaagctttttcaaactgttagctgctatcttatttgataaaataaaagactttctattttagaatacagtatttcaagttgctttttttccccctgtaaaatacgaaaggaaggaagcagccctcttctctgagtccccgaattgaagtggccagctgcagagactctttgctaagtgtaaaagacgactcacatggactcacatgcgggctcagaccctccaaggcctcccacccttgccagttctcacgaagtatcacctcacaaggtcatataataataatttgcatataatttgcatgtcttactgatattttttcaagaccaaggtggcctcctcgaggacagatagaagagatgccaagttcctggtcctggaaggccggtgccacaggcgtttccacactgcagatacaagctgtgcacagaacaagctccaccacagcagtggcctgtgagaagcaggctgggtgatgagcatccagcaagagccgaggtgggagctcaaaggatgggaaaccctgctagcgtggcctgagtctggtgagtcctggatttgagagacacaggtgtgtcagcacccactgaacaaagcaacccactagagccaacacacttaatgagcagctggctcccagaccctctatgtgtcagtcatgaagttaagttttcataggcctggggactggacatgaaccccatcgtgttgcttccttcctctggggcctgcggcctcagcttaacaaaagcccccagtctgagagatgtgtgtcaggtgtgggtcacgtacgtggagtctcctcggagagcagcatccacgcgaccccgttcaaactcagaataacacttaatacctcaaagtttctctcatcttcctggaaaggagagggagtgtgaaacctgtttgctctccggaaagctgcagccccattgtgagacgccacaccttgtgtcccgcctactgggacccctccagatacaaagggtgtgtaaaaatggcaaggttttgacaaaatttgaggagaggcaaacccacagactaacagctgtctgtcccctgcgttcagcccctgtcgcctctcctcctcgaatctgaggtgtggaaaggtaaataaatggagggctcatgagagcaacacgaagcagaacccaggaatcagagtgtgatgctccaacaggtagtcaggtcggtgctggagctcagtacacaagcaggcccccaagccagccagcgctcagcaaggtcctggtgactggtggactgaggtaacagggctgagtgtccacagatcagcacaaggaagccccaagggcaccctcaccgagaggcatcacctcccccagagtactgcaaaggcaatcagctcctcacaagcatgaggaagctggtctgggtctatgctggtttgacagccaaagccaccccagggaaagccagaagccaccagggaacagaatgacctatttgctggcttctgtccagagagggcctcagcagtggtgttgggcacacagcagttgtattggaaatgtgtgtagtcctcaggctcagcttgacacacgctaccactaagggtggccttgttgaggcaggcttgagcgtcctgccatcattcctaggagatgagccagtttctttgtagccattgacaccggagcctggaatgcattttgttgtaatcggaagtgtggatgtgggttttcttccacccttcagcggaggactgtcactcaaagtggcttgtgctcagcatcgcctcaagccatgatattacctgtggaagacagccatcagcgctggtaacatcaggatttattggctccccctcaagcaggtggcccactaaagtcatagtgcagaaggaaaactgacagtgaccatatctgcataggctagacatgcccccatccaggtaaggcttgtcaaccccagcttggatatatgccctagggaccgagagagagaaggcctgtgtagcttctatccttcatatcttcatcttggagctctccacctctacaacctttggccctcctggaactcagggcttgcttcccaaagccgagtatttatgtggggatagagaaagtttcattaaagcaatatctgctctatcagagcagttcttatccttccagatactaagtatgcatgcgcacacacacatgcacacacacacaccacatatgcacacatttacatacacacataggtctgcacatagacagttatacacaggtttgcacccatgcattctcacatactttctcctctaataattgctgctttccacttgggactggttgggcaatgtttactggagtggaaaatgaaagctcaggcagctgttggccaccctgggcttgaggccaatgctcccactgactctgggaaagaattaaccccttcttgaccagcggggttgggaaaccttggcatctgagagtttccatcactacgggccatttgtgtgtttctcaggtgtctgtagaactctacttccctgtgaatgtctgtgcccgtgaagggctcattatggttctaatgtaatgttgtgtggctgacagagttgggcaggggagagctatagctgggggagtttagaatgcactatcctgccctgctagacccaggcgggctcaaccacatggccactgtctgtcaaggctgtcaggagcctgagctggccagtgatgggatagaagtcgcccctatcttaccagctctcagctggtgagacaaggccagcacttagccaatcatgctgcttctgctgatattttggtgcttggacaaaccataaagcaaaccagcaaagcccagcgcatccacccacacagtcagcagcacctcgtgcatttaacttgctgtggtcatggtcatgaggctctggatcgccgcctggcaacttggcctttaatcctgatttccccctgtgtaaaaatctaggaattccggggctctggttcaaatgggacatctgagcctgaacagtggagaccagccatggccctataagagcccaagaaggacagcatcctagaatcccataatccatcaagaaactgagggcagaacgagtgatgcctgaggatgcctgctgggtggaagggttgtccatgctggtttggctccagcctatgcatcttgaacaaggctctctgggacacaggatgagcactgggacacccggggagggaaggtcagggatcctggagacatttagagccagactaaagagaatatagatatctggcattcaggaagggaagtaggggggaaatgtgttctcatcctctcacaaagaaatatctgcctctttagtgcatagaacctacactcccagcaagaaggtgggctcatcaccgatgacaataatctcccctggagatggcgtctgcatccattcgactgtcagagctggggaagggaagcttgcccacatctgccccatgaggcataaagactatatttgcattccgaaaccctttcacttttccagaaggagccctgatttggggtggggtggggtgtagcagtggaggcagggtgatgaagaggcagagaaatctaaaaggagcagggagaagtgtttgtctggttgaggatggggcagggttcactgactacccaaggaacctgtgcagaggcaaaggacaccacagcctccttcagtccctgagctgtggtactgtggtaaggctggggcaaataaagggagactgatgcaggcatcctccaggaaccagcagatgcaggctggtggctcattcaggcaggagctggacaagagatgctctgtatctccctcccacccagggaccagaggctagggccctacaggctagtgagggctgcttctcaggcccttctagccagtccctgctgcctttctcatttcctggtcccctccactggagatcaaacagcttctggctgcagggaaggaaatgggggcagggcatgcttccctggtacagccaggcagctggccaggcctgcccaggctgacccacttcccaggatgctgggagcagaagcaggagccagaaagaaaaatgcaaaagctctgtccagtgtgggagcatcataagctcgctgctataacttcctcaaatcctacgagatcagggtattcaagagaggccagcttctgtgactccctgtggttttaaagtatcatctggagtcctgcaaaccatctcccttcaaccctagaaggcagcagggattaaaggcacaattgggcacaacccagcatgtctgtcatgtttaccaagtggtcagatttctgctaacattcatagaaatggcctaaggcccgttttcaaacactggtgcctgcacagctcgcttctcacaagtactacaactgcttctgcctaagtaagttttgcattaagaccgagcaaaagaatcccactttctgcaagctgaggtgcttggaaagacttggggaaacctgtcaggatcacctcagagagcccctcccagcggcaggacacagggcatggcatgcaccacccctgaaagtattgtgcaccaagctggctaggggctcgggccatttagtctagtcctatggttactgctcttcatttagtctcttggtatttgctcgtttatttcattgtctgcatttagtccatttacttttgtctttctgttgttgctattgttcctttgtttctttgcagtgctataaatggagtgcaggggcttgactttgcacttccacggagcaacaccctggcctttatatgttgtttgttaaatgttacattgactgtgacattgtaagaaggggtctgtaatgggttggagaggtaagaaagcttcatttaaagtcgactggttcatccccaggcagactgaaaaaccattctgtctcagtgccaccgggttgcattcataaaataccaaagctgggggctataaactgcagttctggaggtggaagagcaagcctgtggctgaggtttagatgggctctgctctctctgtgggcccttggagggtgtccttgcgtctctgctggtttccagtgttctgtggcatggacacccaccacgggacatccaatcactgcatctcttcacccagccttctctctgcttgatgactttgctctgagatccccgtttatgtctgttgtttctgcctttgggacatcggtcatgcacctctggggcctatcccagtgacctcttcctgtcccaacagtaacctctgtgaagttatttccctatttcccaatacattctgaggtgggctggtaatgggataccaacatcatgaatgtgtgtgtgtttgtgtgtgtgtgtgtgtgtgtgtatacacatatacgtatgtatatatattaattatacaattcaacccctagtaatcgttgaggtttccaggtacactatccaagggaattatttaatttacgctcttgataacttactacttcaagctctattaattaaagatgacttgaaaattaattttctgtagtgactctaggatcaagagtaagataaatatcttatttttatctgaatttttgttatattaaaccacacgtggctccaaagccatcactcacattctacaccacattgcagtcaccaaaagagaacagatttgtgtgacaacatgtaccttggctgccggggctggcacaggacggaaacctgcctgcacattctggctcctggggctgtgccttctgcagtgcagagctcgccccaactccttccagaatgtccatctggagctgcctggcctctgaccacgtgcatgaggttcctgccatctgaggtgagccaaacccctctaagagatgcagctcgtgggtacatttaagctctactgagcatggtggcccatgcctgcaatcatagcacctgagagtctgaagcaggaggattgccacgagttcaaggcttgtttgagccacatcattaggccctgtcaaaacaccaaagcctaactaacaaatatttaacttagaacaaaatatggtcaagatggaagggactttcgtgtggtgtttgccaccttcttgctttgtgttctgtagcaaggatccctgttcatttggaaggggggggggtctcaccacaaaagaacaaggctttgagctggataggaggggaacccggctctacctgtatcagatgtgtgaccaggaacaagtccattgcaaactcacaaacgttaagtctccttcactgtaacagggaggcgtgtcgactccctggtagactgtagagccgtaaatcccagcttccttaaccccatatggggtcccaaaaagttaggcagcagtagaaggatgtgcaaaagacaaaaatctctttgaaactaatcatataatacatcggggtgtttcctgcaacactcgcccaagtaccctgataacttctgaacaaaaggcatcggcacctcgcgggacagcgccaatggatgccacctgaaacaccttggctcagatttgctgctagcgttaggaagtacaggggctttgctgcatgtactaactctctgctcgcacacaaacagtgtttaattacaggaaacaaagactttcaatgtcttcctattgccatttctcagcatgtgtcaaaattagtgcatttcatgtgaatatttcatttttaaaattgctgtcattagtcacttgagtgttataaaaaacgttcaatgaatcttgtcttaggattaggacaaaatttccaataacttaatgagatgacctgccattccgtactacgtaacttatatgaaatagtgctctcagcattgacaattataaaataaaactaccgtctcggggctgcaaagatggctcgacagttaagtgtgtgtactgcatatccagcacgtcccagtttagctcccaggataagtgccgtgctgtggaattacagctcaagtccacctgcatctccagctccagggtctgacacctctggcctccacacccaacacacaaatgtataactgtaaagaaaaaataaaaccttttaaaattgaccatctctgaaaaaaaataataaggatgctttgcatcctgcaagatcaagtaatcagcagagattgaattctttcttcaaaaataaataatcagatctttttcattagtatgcaaatctcctctcatctttaataaatggtaaaaccctgaatataccaaatgtggctggtttggaataaatctgtggttcatcgtcaatacaagtgtgatttgtattcttgtggaagtgaagcccctttcaactgcagacaatttattaacacattttaagcaatatctcaatataaccattaaaattttatttccttttaaagttattcttttaaaaaaaaggctactaggattcacacttgcaaacttgctggcttagtaagtggatgcccttaaatttcctttgtaaggatttctctcctctcaggaaaggagctacagtctgctaaataaggcagggtccatgcagacctccagcccacagaaagcggcatcagagacaaggggcagcagacatctggtctaagtgggcattcctggtccattatcatggcttttaattcaggaagacacagagctgaagagtccattcttgtggtattcagctgtacagcatgaggtaccatctcagaccagtgtgtgtgtgtgcatgtgcgtgcgtgtgtatgtgtgtgtgtgtgtgtgtgtgcatgcgcgcgtgtgcgtgtgttttccaggaatgcaactgtagtttaaaatgcgcggaaggacatgaatgatgcagaatcacctcacgagtggcaaccatctccatagtcacggtcgccttggacacttcatagacaacacagagcatgacctctgagtaccaggctcctaggcaccggtctgcggtgtgtgaagagaaaggagagcccaggcagctcagccaccatatctaagacgcatctgaaagaatccacatgcagattggtggcggcgtttctaggagtggcctggtcagacaaggctggtacttaagggagtcccatggggacaacttccctcttacacagcatggattggattttgaaatgaaccaacaaacatctaattatttattcttaatgccgaaaagctggaagtacttagagtaactggctccattcctaacagtcattggaatttaattgcttgggggagggggtagcagtgcagaacatgaagtcttacgggctttaaaaaatcctggggactgtctggtctggcatctgtgagcaaacaacacccaggatccccacaggagccaactaaagcgcttaagagtaggaacgaggtgtgacatgggtatgacctacaggcaggcaaccttccttttatacttcacaaggctgcgtgcaggaaagatcaaccataaaggcacagacggagagagctgagagctctcagggcaatggtagaatcgggggaacgccctccctggagaaagatggctccactacccactgcacagcatacatccttccatctgacttgggtactgtcagggagacaggttgagcatcttgtccctgtcaggtttgagagggatgactgcattcagggtgtcgtctgcgtgctgctgctggctctctcccagcctgttgctctgacctggacctggtcggttttacccagcactaagggtgtgaaaggctcagtcagtgccacacctgttcacacctgtctctgggagatagccacggtgatgcatctcaagtctgcagtacggtccggttcttcctgaggcaggaggattcgatggcacactccctccgcgattacagtcctggtcagtttcaggacctcatgaagcatgaagaatttccaactaattaccacacctctggcaaatttcaatgacgtcactgaaatagagtctataaatgtgtaagtggggaaacacatggcaggtaacccccaaacaccccctctacgagacaccagaaggttatttttaattacttcctttactttttttttcatcctttcagaaaatttccatgaacagcctacttagtgtatagctttgtaaaaatccctgtcggaatggggttggggtaggtctgtaaatggtacccagcccagtgtgggagctggtccacccagcatccagagccaggatgatggaggctgggcacgtggagaaagccctgaggccgcatcctggtcacctttctgccttttctccacccacgtgtaaatggagacacactaagagaccttgagagttacctatttgaggacaaactgaaattaacataatgaaaatgaaaatgatctcagcctgtttctattgtaaccaacaggaacggaaggaaggagtcattccagcagtttgcagctttctgccctggttgatgcctggctactgaacaagaagcgtttttacagctttggtgttgaactcagaaaggctggtggtataaattggccaagaatatcaaagcagagtagagagcaaatgttcacatcctctgttcacagaaatctggccatcggtaatttgcataaagctgttaaaagaagcatttatcccaggatcaaccctgatttgacacacactccttatgttacccgaggctgcccacacaagaggagaaggccagtctagacaccaagaaatgtccaccaactggttggtcagcttcactatacagaactttcttaagattctagactctatcaggatgtgggcaacagatttttaattactatgtgtgggatcgcttcttacagatgctcagcgggacccaggatgtaatgctggaggtcaaacagccaagagcgccctaggtagggcaaagctcgcggcagacacctgttcctggtgctttttggggttgggaagggctcaacaggtcatgcccgcggggtgcagcagcggggtctctttactggaggtgctctgtgcgccacggtgctgctgtcaaggctggaggctaccaagagcgagctcccagcttctgctcacttggtctggaatgggttaagtgcggaggcgcaggagctgttgcgggcaggcgccgggcaccgcgcacactagatccac

SEQ ID NO: 1003 - DNA, 4665 bp, Mus musculus
atgaaatgatttatgatgatgtggagaacggcgaagaaggtggaaacagctccccagagtacgggtggagttccagcgaattcgaaagctatgaggagccaagcgactcggagggcaagaacggaattcccaggtccttcctgcgcagcagtcataaaaagcaagatagcctctggggacccacagagcccattctgaaaaaagcatatctctttgtgctacagctctctcatgacctaacccgctttaaggcgcactgtgaggaaaagatgagaggcttggtggccagtacggtgggagccatggagattcagcaggcaaagcagaggcaggagcggaagatgcagaagcttatgaaggcagccaaggagggcaccaaagatgggctggagaaaaccaaagctgctgtgaagagaggccgctccttcatcaggaccaggtccttggtctctcaagatcacaggtgttattttgaagaagagcagaatttgttcattgacgtggactgcaagcacccggaggctgtcctcaccccaatgcccgagggcttgtctcagcagcaggttgtgagaagatacattctgggctccattgttgagagcgagaagaactatgtagatgctctccggaggattttggagcaatatgagaagccgctgtctgagatggagccccggctcctgagtgacaggaagctcaggatggttttctaccgcgtcaaggagatcctgcagtgtcactccatgttccagattgcgctggccagccgcgtgtccgagtgggatgtcgtggaaacaatcggcgacgtttttgtggcctcgttctccaagtccatggtgctggatgcttacagcgagtacgtgaacaacttcagcacggccgtggctgtcctcaagaagacgtgtgccacaaagcctgctttccttgagttcttaaagctgagccaggattccagtccagaccgagtcacactccacagccttatgatgcggcccatccagaggttcccacagttcatcctcctactgcaggacatgctgaagaacactgccaaaggacatcctgacaggctgccccttcagatggcgctgacggagctcgagaccctggcagagaagctaaacgagagaaaaagagatgccgaccagcgatgcgaaatcaaacaaatagcaaaagccataaacgagagatacctgaacaagctcctcagcagtggaaaccggtacctcgtccggtccgatgacgtcatcgagacggtttacaacgaccggggagaaatcgtcaagaccaaacaacgccggatcttcatgctgaatgacgtgctcatgtgtgccaccgccagctcacggaactcacatgaaagccatgccgtgatgagccagaggtacctgctcaagtggagtgtccctctaggtcacgtggatgtgattcagtacaatggaggctctggcgccggggagcactgtcggcaccacgctgcacactcacctgagagcctggccgtggtggccaacgcgaagccacacaaagtttacatggggccagggcagctgtaccaggatctgcagaacctactgcacgacctgaacgttgttggccagatctcgcagctgataggaaacctccgagggagctatcagaacttaaaccagtctgtagcccatgattggacgtcgggcttacagcggctgatactgaggaaagaagatgcgatcagagctgccgaccgctgccggatccagttacagctcccgggaaagcaggacaagtccgggcggcccacgttcttcactgctgtgttcaatacgcttacaccagccatcaaggagtcctgggtcagcagcctgcagatggccaagctggcccttgaggaggagaaccatatgggatggttctgtgtggatgacgatggcaacctagccaagaaggagacacaccctctcctggtgggacacatgcctgtgatggtggccaagcagccagagttcaagattgaatgcgcagcttataaccctgaaccttacctgagcaatgaaagtcaaccagcctcaccctccacagcccgtggctttctgtggattggaagctgtagcaaccagatgggtcaggtcgccattgtctccttccaaggttccaaccccaaagtcatcgagtgcttcaatgtggagtcacgcatcctgtgtatggtatacattcccgcagaggagtcaaagccccaagaaaccaccgaaaccaaggatccagaagccacagcctcgagagcaccccatgtgcccaccatctgcctgggcacagaagagggaagcatttccatttacaaaagcagtcagggctgcaagaaggtgaggcttcagcacttctatgcaccggacaagtccacggtcatgagcttggcctgctccccacaaggcctgtatgcaggcctggtcaatgggtccgtagccagctacaccaaggctccagatggatcctggaactcggaaccccagcaagtgatcaagttgggtgtcctgccagtcagaagccttctcctggtggagggtgcactgtgggcagcctcgggagggcaggtgttcatggccagcgtggagactcacactatagagaatcagctggaggcccaccaagatgaagggatggtcatctcccacatggctgtggctggcgttggcatctggattgccttcacctcggggtccaccctccgcctcttccacacagagaccttgaagcacctgcaggatgtcaacattgatgcccccgtgcatagcatgctgccagggcaccagcgtctatctgtgaccagcctgctcgtctgccacggcttgctcatggtcggtaccagcctgggtgtcgtggtggccctgccagtccctcggcttcagggtatccccaaagtgacagggcgaggcatggtctcctaccatgcgcataacgggcccgttaagttcatcgtctcagccacggcttttcaaaacaaggacagagccagggacagcccacgttccggttctgagcttcaggatgaagaccccaaggacttgctctgcagcgaggaaggtccttcctgcccgggccagcctgacacctacacatccgtttggttgggagactccctaggattgccaactcaaaagaatgatctgtcttcgtcctcggggtcactgaacctgtcccatggctccagttccctagagcacagatctgtggacagcagtctgtgtgacctgctgagggaccccagtgcctccccaaggagcagaccacagggctctaggcgagcaagagccagttcagcgctggtggtgtgtgggggccagggccaccggcgggtgcacaggaaggccaggcagccttctcaggaggacctggtttcttcagtgatggtgtggcagatccccctgctgggcatgtaggtcaggaggctgctgcctggcataaggtggcaatcaagcacaactctcagccggatgcagggccagctgacagaggctgcatccacaccaccgggaccaactggaagcagagtttggaaaagaaatattctgtggtcactctgctctcctgccttcctcccatcgcacaacggagcccagctgtgccagggaagcaggggagcgccctggctgtggggtcactggaccacagtccaggataatgctacagtctgccccatcattcacctgatacataaagtgagctggctgtgtgggctccagtcccatctcagagagctgacagggaaacaacatagcacctagtagcataggaggtcattaacaacccttaaaatcattctacttgactcagactcactactgttatttatattctctatatttttttaatcccagaatacagattgtaacaatttagaaagccaggtaacacaccccagtccagtcagcttgccctttttggaaggagtgaccaaggctttccaaagtagactgttgtgtgtactgtgccctttaacaaatagtgtttttatattgcattttttttctattaaaaatcaacagttaacattttagtcaatgtactctctgtagcatttcacacataatctttacttgaagccaaaatgttcagtacctgtcaacattgaactccagcttccacgccaaatcatacttgccttctcatactaagtgacattaatgtctgcgtggggcatgtgccggcccagtcatgcagggatggtgctagatgtgtctctggtcttctgtgcacctgctgtcagagagccatccacacagttggacactccttctgagtggtccatgatgctgatcagtcagccgctgcccgcccctgcacctgcctgccatccctgtaccaccctccccccccttcccaaagaacacacagggtcacgtgggacacttgaacgtcaaggggcatgagtaacccatagactctgtttgctccagctgtattacacatcagtgtttcacttactggatggattaaaaaaaagttgttttttttaaatttaatgcagatattattcaccaggaacaacttctcagcactttacaaaggactaaaatgctaacttttaacttagccaaatatttttctaaattgcacatatacccaagctttttcaaactgttagctgctatcttatttgataaaataaaagactttctattttagaat

SEQ ID NO: 1004 - protein, 1123 aa, Mus musculus
EMIYDDVENGEEGGNSSPEYGWSSSEFESYEEPSDSEGKNGIPRSFLRSSHKKQDSLWGPTEPILKKAYLFVLQLSHDLTRFKAHCEEKMRGLVASTVGAMEIQQAKQRQERKMQKLMKAAKEGTKDGLEKTKAAVKRGRSFIRTRSLVSQDHRCYFEEEQNLFIDVDCKHPEAVLTPMPEGLSQQQVVRRYILGSIVESEKNYVDALRRIQYEKPLSEMEPRLLSDRKLRMVFYRVKEILQCHSMFQIASRVSEWDVVETIGDVFVASFSKSMVLDAYSEYVNNFSTAVAVLKKTCATKPAFLEFLKLSQDSSPDRVTLHSLMMRPIQRFPQFILLLQDMLKNTAKGHPDRLPLQMALTELETLAEKLNERKRDADQRCEIKQIAKAINERYLNKLLSSGNRYLVRSDDVIETVYNDRGEIVKTKQRRIFMLNDVLMCATASSRNSHESHAVMSQRYLLKWSVPLGHVDVIQYNGGSGAGEHCRHHAAHSPESLAVVANAKPHKVYMGPGQLYQDLQNLLHDLNVVGQISQLIGNLRGSYQNLNQSVAHDWTSGLQRLILRKEDAIRAADRCRIQLQLPGKQDKSGRPTFFTAVFNTLTPAIKESWVSSLQMAKLALEEENHMGWFCVDDDGNLAKKETHPLLVGHMPVMVAKQPEFKIECAAYNPEPYLSNESQPDSTRFLWIGSCSNQMGQVAIVSFQGSNPKVIECFNVESRILCMVYIPAEESKPQETTETKDPEATASRAPHVPTICLGTEEGSISIYKSSQGCKKVRLQHFYAPDKSTVMSLACSPQGAGLVNGSVASYTKAPDGSWNSEPQQVIKLGVLPVRSLLLVEGALWAASGGQVFMASVETHTIENQLEAHQDEGMVISHMAVAGVGIWIAFTSGSTLRLFHTETLKHLQDVNIDAPVHSMLPGHQRLSVTSLLVCHGLLMVGTSLGVVVPVPRLQGIPKVTGRGMVSYHAHNGPVKFIVSATAFQNKDRARDSPRSGSELQDEDPKDLLCSEEGPSCPGQPDTYTSVWLGDSLGLPTQKNDLSSSSGSLNLSHGSSSLEHRSVDSSLCDLLRDPSDRSRPQGSRRARASSALVVCGGQGHRRVHRKARQPSQEDLVSSVMVWQIPLLGM

SEQ ID NO: 1005 - DNA, 119149 bp, Homo sapiens
aatacttcacctctgggagattagtactgttaaaattttattgaatattcttccagtgttttagaagtagtctttttttttccccttgaagcaaacttttaaatgccgttaatataagtgatagtatctgcatggttatgtttcaaacattagcagtttttttccctgacaaacctaggcagcacttgtttttatatgtatagtttatttaaagtgagagattaagtttttttatttatggctttattaagatataattcatatcttagtaccgtttacctatttaacttgtaaagctccgtggcttttactgtattcacaagcatgtaggaccatcacacagtcagtgctggtcacccctagacaccgctccccaccccgggcagagggtaactaaattttaaactaaacttagatactttatttgtacccttttgctcattaagaaaagagcacttaaaactaacttcaaattagaatagccaaaatccagaacacagatggtaaatgctgagaagggtgtggggcggctgcggggacacagacggcaaatgctgagaagggcgtagggcggccgtgtggacacagcaaatgccgaggagggcatggggcagccacgtggacacagacagcaaatgccgaggagggcatggggcggccacgtggacacacaaggcaaatgccgaggagggcgtgggccggccgcgtggacacagagggcaaatgctgaggagggcgtggggcggccacatggacacagacagcaaatgctgaggggggcgtggggcagccacgtggacacagggcaaatgctgaggagggcgtggggcggccacgtgggcatggacagcaaatgctgaggagggcgtggggccagctgcgtggacacagacagcaaatgctgaggagggcgtggggcagtcgtgtggacacagacggcaaatgctgaggagggcgtggggtggccacgtgggcatggatggcaaatgctgaggagggcatggggtggccacgtggtcacagacagcaaatgctgaggagggcgtggggcggccacgtggacatagagggcaaatgctgaggagggcgtgggccggctgcgtggacacagggcaaatgctgaggagggcttgggcggccacgtggacacagacagcaaatgctgaggagggcgtggggcgaccatgtggacacagagggcaaatgctgaggagggcgtgggccggctgcgtggacacagagggcaaatgctgaggagggcgtgggccggctgcatggacacagagggcaaatgctgaggagggcgtgggccggctgcgtggacacagagggcaaatgctgaggagggtgtgggccggctgcatggacacagagggcaaatgctgaggagggcattggctagccgcagggacacagagggcaaatgctgaggagggcgtggggcggccacatgggcatggatggcaaatgctaaggagggcgtggggcagtcgcgtggacacagacggcaaatgctgaggagggtgtggggcggccgcgtgggcatggacggcaaatgctgaggagggcgtggggcaaccgtgtggacagacggcaaatgccgaggagggtgtggggcggccgcgtgggcatggacggcaaatgctgaggagggtgtggggcaaccgcgtggacacagacggcaaatgctgaggagggtgtggggcaaccgcgtgggcatggacggcaagtgcggaagacggcatgggccacccgcgtggacacagatggcaaatgctgaggagggcgtggggcagctgcgtggacacagacggcaaatgctgaggagggccgggtgctggcgggtggctagagggcgtggggcagccgcgtgggagggcagtttggtggcttcttcaaacctgagcacactcttaccgtgtgacttgcagccatgccccggcgtatttatttaaatgagttgaaaacttaatgtccactcaatacctgcccatataggtgttgatagcagctttattcataattgccagaacccagaagcagccatgatgtccttcaggaggtgaatggatggataaactggggcccattcagacagtggaacattcagtgctaggaagaaatgagctgccaagccgtgaaaagacatggaggagccttaaatgcatcttactgagcgagagaagccaacctgaaaaggctgcgcccggtgcgattccaaccacgtgacattctagaaaacaaaattatacagtaacaagctcagggttgctaggggtttgcgggggggaggggtgacaggcggagcacgggatttttagggccacgaaattccttgataatggtgcatccatgtcattacacgcctgtccaaacccatagaaggcacagcaccaggagcgaggcctcacgcacaccgtgggctttagttagcgacgtacctcaacatcattacacgcctgtccaaacccatagaaggcacagcaccaggagcgaggcctcacgcacaccgtgggctttagttagcgacgtacctcagtgttggctcctcacacagaaggcacagcaccaggagcgaggcctcacgcacaccgtgggctttagttagtgacatacctcattgttggctcctcacacagaaggcacagcaccaggagcgaggcctaacacacaccgtgggctttagttagtgacgtacctcagtgttggcttctcagttgcaacaagtgttccactctggcaaaggatgggggatagtgttgggggaggctctctttgggggtggggagtatatgagaactctctgtaccttcctctcaattttcctgtgaacctaaaactgctctaaaaagttgtatctcttaaaagcaaccaaactggggtgggcacgttggctcttgcctgtaatcccagcactttgggaggccgaggcaggaggatcacttgagttcaggagtttgagaccagcctgggcaacatagtgccacctcgtctctattaaaaataataaaacttagccaggcgtggtggctcatgcctgtagtcctggctgcttgggaggctgaggtgggaggattgcttgagcccaggaggtcaaggctgcagtaagctgcgatcgcaatactgcactccagcgcgggcaacagagcatgactctgtctcaaaaaaaaaaaaattaataaccaaatggaaatgaatctctgctgcagaccatatgaagacagacacaagcagaggggccctgtgggtgtggggacggctctcaggctcagacaggctgttagccgtcttgatagctcgagattcaggcctgcaaggtccactaggctcaggtgtctacaaaacttagaattgataagaattaaataacaacaacaactgaggctcttggtcacactggccaccccaagtgcaatagccatgtgtgacttgagctgtcctgcgggccctctagaacctctccatcatcctggagaggaccggggagcagcaccgtttctgtcctgagggccctctagaacctctccatcatcctggagaggaccggggagcagcaccgtttctgtcctgagggccctctagaacctctccatcatcctggagaggaccggggagcagcaccgtttctgtcctgagggccctctagaacctctccatcatcctggagaggaccggggagcagcaccgtttctgtcctgagggccctctagaacctctccatcatcctggagaggaccggggagcagcaccgtttctgtcctgagggccctctagaacctctccatcatcctggagagaacccgggagcagcaccttttctagcagcagcatttcgaagattggattgtcaggtaacttcctcgcccttttttgcatataggcataacttaaaatgggcatggtcatattatgtcataatgattggaaacgtaatgtttcttaaagttttctatttcataacttgttttagaaatgtgtgccttaattgatgagccaattacctgcatactcacaagtgtaaaaagtcaggttggtaagaagtcagtgccaccaaggcagccccaatggccctgctgtgacggaaacagtctgaatcctgaggcttaaatggctgctgctgtcggtcagcattaggggtgtcgtgtcaagctgccggtgacccacaagggctggcccctgaatgcagcagagcctgcagttttcctgggaagtgcagctgtggccagagggcagcctgtcctgggcaggccagaggagaggggcaggggaagaatggtccccaggttagatttgggccgggcgctggcgggtggttagatttgggccgggcactggcgggtggttagatttgggctggatgcctgtgggtcggcacgggctgcactgccgtctgtgtttcctcctccgtgtcatggccttcatgggtgactctcagaacctgccgtcctgagtgggcaggaggggcacagagcctctccctaggtgcagccctgcccaggccgcccttccctgcttccctgccagctgcctacccagagcgccgggcccttcccgcccacctcctgggctccacagggaccaacgggcggagaacactgggccatggtgtgtccagcgaatgacggctacactgcagattccccaacagctttttgaaagatccatgtcgtctcaaactacaacacgttgtatctcctgagatgctttcagcagcccttgagcatcttttctagtttgcaaattgtagtttttctcatcagtgttctccttcagctgaatggctgggttctgaagctggggttttgagaagcgggaattccttctgtggctgcagcaggagtgttgtgggaaccgacccagcccagcttgcctggctcccgccagggccctgaggatggcacaggaccttttgtgttggaaagggcttggccgagcttgcgggggagcctcctgggttgcaggccggaagtcccaggtcagggtgctggcaggctgtgtgtgctccccgggaatgtaggtcacagccttccttgcctcttccagcgcccgccggctgtgggcactcccgggagttcctgcagctgcactgccaggtggctcctcgtccctgtgctggcctctgctgtcatgaggacactgccacactgggttagccgagcctgctctagcacagcctcctgtaaaccaattgcacctgcagtcacctgtttgcagacgagctcaccagcagactgggggtgaggatttcagcacagggatttaggggacacaattgaacctgtcagggctggtgtcagaactaaacttaggaccccaaatgctgggatttttaaaggcattctgcattgcacttcactaagggacctggggagctcgggtggggtctgtgatgcccaggatcccccagggcccagggcagtgtctgggatggacatgctcagcacacaccaccttgaacgcccggccccatgctcacctcagagggcggcgcagcctcaccatcgatggaggcccccttggaggtgggggtcagaggagcagcccagctccaggcggcctcgccctctgtcctgggcgcccgccgtgggcacagctgtgggcacccatgcaggcaggggtgcagcctcaggtggttacattgagcacaacttctttgagttcttgtagaaaggctatttttttcttactggaactgaattctgagaggaatttgtaacacacatcattctgcagagtctatataacttgaaagtctttccctgcagtgtttgcagaggatggagggcagctccgccagtgtctgccagtctttcaatgacagcagagagctcttgaattccaagccccaagccccttccaagcccctccaagtctaaactaacaagatttaaacttttggaggaatttcttgattgctttgatttcccttgtatagtagaattctacttaaattttactaggggaaaaagtgagttattttggcaaaaaacagtttgaagcttgctcatctgctcgtcattctctcattcattcgctcacatgatgtgcgtgtcacacattgccgccaaccaggtttcccactgcaccttgctgggcggtgagcagaggtgccggctccgagaacgcatgcggttcttctcagggtcatacctgtacctggcacacgggacatgcactgtcccaggtaatcccaccggtctcccggggctggtgtcacagcccaggaggtggcgtatggggagggagtggaggggcctcggtgtctcctcagggctgtttcctgcacacacgggctcctgttcacggccttccttcctgaagactttaaagagaattccttcttcctgtatggggtacagtgtgggttccggtcccaacagctcatgtttctccccttgcagatatttgagagcctattttgtaccagacattgtcaagcttttttaaaaaacaatatttatagactcatgtctaggtgtattttatctaattgtttgagttcagcggtagtaaactataatttccaaaaaagagagttgacaatataaaaatctagtgtgattgtgtcaccgtctggatgaatctgaacatgtgcctggcagtgactttttttggggtggtcagaacagaaactttttttggggtgggggacaaggtgttgctctgtcccccaggctgcagtgcggtggcgcaatctcagctcactgcaacttccgcttactgggttcaggtgatcctcccacctcagccttcggagtaggtgggaccacaggtccacgccttcaccccaggctaatttttgtacctttttttttttttaagagacggggtttcactatgttgtccaggctggtctcaaattcctgggctcaagcaattagtcctccttggcctttgaaagtgctgggattacacgtgtgagcccctgcgcccagcaatacataaacattttcactgatcattttcgtcacggcatttagtcggcattgtttccgcagcacgtttatttggcaaacatgattttttctccccaaacgtgaattctgtggaaatgacagttgcatttggaaaatattccagaaaacagtttttttgtttgtttaactttttactttaaaaggtattcaccagttcatttccataaactgactacttaatgatatggcaaaaaaaaaaaccccttctgaaataggttttgtttacggtcgcttgggagacagtgaggactggtttgaaagtacatagttaacaaggctcaaactctggaaattagcggttctgtccattccagctctccccctgcttcgattgtttcatttgattaggcttaaattcaaaactttgaatttagagaagtctttgaccctctaggaagtgggtgaggctttggtatctgggcagagcagagttcaccatccagaaggacagcaacacacactcctatcagacgtatgttttaaaaataacacgtttctgaatcctttttcttgattcaattttagtatttgtcattctcatacttgtaaaactcgtgagtgttggtggaagcagttccagaaagctcgtggggtccccaggtgtcatggtcagctgggggtctcatccccaccgtccttgcagtggtagctggatccagttcacgctgtcgtgggcctgggcccctctgtgtatttgtggtgacctaaaaatctgtttccttcaaaaggcactcctagaatgtatgactagtttaggagattcaaaggaaaatgaaacacctcaaatttaaaggttgtttttagaccgctagagttccccgggaggcgacttccccaggaggctcggcagagagcgcctggagactgcgtggagtgtaagtgggttgtgtgtctgtgggttgctccctagcagggctccccctcagccccctccggagctgcctgcagccgagctgggccgtcctgcttgggtgcatctccctggcccacgggggattgtctgtgttggaggggcttggtttgggctgacccaggctctgtcccgaggtgccacctgcttctgtggattgccgggcatggcagcaggaggtttcctcaggaacgtgtgctgggaagaaatcccagcccttgggaaaggctggcaggggctgggttcctctcgctcctgggtgtgccgggtggtgttgtcccagcacatgggtctcctctggaaaaaggagaagcacctgtctgctctgatggtggcacacagtcctagcacgccgtctctgcaaatgatgcacacggcaggctgcgccatcagccgtaaccccggtccaaggagacctgtgactcgcctcctgcaaaatgtttcttatcaagcacttacttggaacagttattaaccatgctctttaataattatggaggtttgtattttaagctatatatcggtgttcatatttgacactgattttctaaccatcagagatatttaattaaaattgtaaataagagaggcaaaatgaaaataaaaggagaagaattctagggagagatgcaaggtgtcagaagttatttctaaaagtaaagtggatgatactgaattctcttccagaccatcagcccagccgggtgatgttcatctgctgggtgcacagatttaaaatgtgaaaagctcttttttccccttactttctcttgttttcttttctttttttttttttttgagacagagttttgccctgtcacccaggctggagtgcaatggtgcaatctcggttcactgcaacctccgcctctcgggttcaagccattctcctgccccaccttcctgagaagctgggattacaggtgcccgccaacacgcctggctaatttttttatttttagtagagatggggtttcaccatgttggccaggctggtctcaagcttcttaccttgtgatctgcccaccttggcctcccaaagtgctgggattacagatgtgagctaccacccccagcctcttgtttcttctctgtgagttgtagatcctattaaaagaaaataaaaaccagtgactcagaattctaatgatacttattttgccccttaaaaaggttaactacaagcgcagtacagcacagaggaacttagtcagtgtctctggctaacatagatcgatcatctatctatctatctatctatctatctatctatctatctatctatctctccttgatgtggttttggtttttctttttagaaaatgaaatgaaatatgataccaataataatgaagaggaagagggagaacagttcgattttgacagtggagatgaaatcccagaagcggacagacaggccccatccgcccctgagacaggaggtgctggagccagtgaagcccctgcacccacaggtgagtttccaggagggtccccaggtgagtccccaggtgggtccccaggtgagtccccaggtgggtccccatgtgagtcaccaggtgagttcccaggtgagtccccaggtgagtccccaggtgggtccccaggtgagtcccctggggggttcccaggtgagtccgcagatcaccggcatcagggtcacctgtgctcagccatcggactcgccgattttctccccattcttacggcccaattggaacattgtagggaaaggatgatttctaggagccagagagttatgatttcttcatgatgtacctgaaaggacttaatttaagattggctaagtttcttctctttgtactattttccataattttcaaccttttcactctacctttgtattttgcaaagaaaaagtattgctatttcccaataagaatgacctcatcattgtatcactagattaaaagaaatattcagaacatgtgggatgaagtagctgtagaggtttcgctttctaagtttggaggtgggttgggtgctttcattcgctgaccagagggactgctcaggtcaggcagtggtgggagagcctgcacagtgtttcttcctgtgtagcacccgcctctcagctcgcacggtgtttcttcaggtgtagtaccagcctctcagtttggcagcgttcctcttggctcgcacggtgtttcttcaggtgtagtaccagcctgtcagtttgcacagtgtttctctctgcttgcacggcatttctttgggtgcagcaccagcctctcggttgtttgcatgccgtttctttgtgcatagcacccacctcttggcttgtaccgtgtttctttgtgcgtagcaccagcctctcggttctttgcatggtttctttgtgcgtagcgccagcctctcggttgtttgcccggtgtttctttggccatagcacctgcctcttggttgtttgcacggtgtttctttgtgcatagtacccgcctctctgcttgcacggtgtttctttgtgcgcagcacgcgcctctctgcttacacggtgtttctttgtgcacagcaccagcctctcggttgtttgcccggtgtttctttggccatagcacctgcctctcggttgtttgcccggtgtttctttggccatagcacctgcctcttggttgtttgcatggtgtttctttgtgtgcagcacgcgcctctctgcttacacggtgtttctttgtgcatagcaccagcctctcggttgtttgcccggtgtttctttggccatagcacctgcctctcggttgtttgcacggtgtttctttgtgcgcagcacccgcctctctgcttacatggtgtttctttgtgcatagcaccagcctctcggttgtttgcacagtgtttctttggccatagcaccagcctctcggttgtttgcatggcgtttctttgtgcacagcacccgcctctcagcttgcatggtgtttctttgtgtgtagcaccagactcttggtgaggggagcagctgccctcctccggcagcttctccctgacttagctcatgggatgagcctcctgtagtgaccaggctgcatccgtctcacctgtgcccagaggtgatgctgggttccccatgtgtgagtgctccctccgaggccacctgatgacctgggaacgtctaggggtcctggcatgggatgatggtgggagctcatacctgcttcccacttgcgctccaggagggcatgcctgccatgcccttggtgatgtgtctgctgacaagtcctttctgcatccccaggaggtgaggatggagctggagcagaaaccaccccagtggcagagcctactaagctggtgctcccgatgaaagtcaacccatattctgtcatcgacatcacgccattccaggaggaccagccgcccacccccgtgcccagcgctgaggaggagaatgtgggtctccatgtgccctgcgggtacttggtgcctgtaccctgcggctatgcggtgccctccaacctgcccctcctgctgcccgcctactccagcccggtcatcatctgcgccacgtccctggacgaagaaggtactgctaccctcctctccacgcccccgaagtggcctgtggttccctcctctccacgcccccgaagtggcctgtggttccctcctctgcatgccccggatgtggcctgtggttccgtagagtccgggcctgaccttcccccctcctcctcctctccatgcccccgatgtggcctgtggttccgtagagtctgggcctaaccttcccccctcctcctcctccatgcccctgatgtggcctgtggttccgtagagtccgggcctgaccttccccctgcccccacccaggtcattagatgtttgtttacagagttggaaaatgagcccctagttcatcttcagtgacaggaacaccactgagggaaggccagggtgtatggtttggaaatttttgaaacaacgtctggtgccgaatgtgttgccccctcatgtctggggtgccttgaacttcaccccgatctctgattcccccaccagctgctcacgggagtgtgtgcagtttttggcctgtatgacttactgtgctagatgacagttaccgttatgtatgtcccgtgtcacctgcttgtctatagactcagactccctggggtcaaagcgtgtgtctcgctgtcttcattccagaggatggaggggtggtgggggtgggagaattgcctcaggggctccctgtttcccactcatgcttttcctcgccgggaagatgccgcaggatctcagcagagtcctcagtggaaggtcagagccacctggggcagcacaaagggctcagagtcggccactgaggacggtgttccctgtagccaggacatgctccgagcgaggactgtgggtgccctcgtgggtgcctcgctcacctccggtctctgtgtcctcagcgctgacagctccatttcgagtctgcttcctcctccacttagtgagaaggagtggccatgtgctctagaaggggcttggttggtggagcccgttctctgctgtccttacatggccctgccatgtgtagtcacgcaccagctgtgtctgcagagccccagggttctgctggaaggacagcgtgcagtccgtggctgcttcgactgcagcccaagggctggggcctcctgccggccctgctgtagggccaggcgccagggtgagggtaagcacataccctgcctctgtcttcaggagcgacccagtcgaggcgtctcagccgaagttttccttttttgcccagatctgtttctatgctgtctttcccaggaacgcgctgcaggattcccagggttcatgggatgttcctctaatggaagcccacagcctctacgcctgagacatgattcttattcctgtaaaggtttcagtggaagcagccttccctttccagttaataacagttgagaaaaaaaaatccttaaagaaaaatctcaattttggattttgggaaacacagaggtttcagaatagacggcctcctgtgcgttttcctgttgaagtcggccagagtcctcggaactcaccacggtctgcatgatccacgctgctgttgtcactctgtgaccgcggagcatgagaaccccctggaaatgagggcgtgcagagtgtaggattcttggctgaaggaaaatacgtttgttttaaagtgattttcttattttaaaatattatttgattatttaaaataattgcatatcatttaatttatttttaaaataacttagcatgaatttaaaacaatttgcttatttttgttctgtcaacctagagccagtaataaagccttgttctaataaagactattttaagtcccggagtagaggagcaggtggttctccggttgcgttttgatcattgaatgagggatgtgaacgcagacctccttcctgggaggtggaaaagcgtggatttggtgttaggcccggtccccagcctggcccacacttcctgcctggtggcactgctggcttttctgttccttgctctggagcctccctggggcggggcggccgcctggctctgcagggcttccccgggacgtacagcccagccaggatccccaggcctgcggtgggaggttgcagagccctgcctggagctcccagctggccaaactgggatgaccagattccgttatttttcctgcctaccgaaaccagctctcaaagacgtccacaggcaggtcctgctcttgtttacgcacgggctgttgtggccagaagcctctgggtgcgctgctgctcggagctgtttaggcgactccctggccagcgtgtctgcctccttctgaccttgacagactcagtttgcaccttaatttcccggaaggcggaggaaagaagagtttcctggggtggagccctgagagggctcatgtgtgtgctctggggatgggagtctgtgctcctggacacccccgtgggggagacatttctcaccgtgcagcgagattgctgctgggcagcacgtcctgcctttgtccctctgcaaaacacgagtaaaagctttgtggctctttgggtgtttcttttcctttttttcttcttctttttttttttttttttttttgagacagagtctcgctctgtcgctcaggctggagtacagtggcgggatctcggctcactgcaagctccgcctcccgggttcacaccgttctcctgcctcagcctcccaagtagctgggactacaggcgcccgccaccacgcccggctaattttttgtattttttttttagtagagacagggtttcaccatgttgaccaggatggacttgatctcctgacctcgtgatccgcccgcctcagcctctgaaagtgctgggattacaggcatgagccaccgcggccagctggatctttgggtgtttctttgaggcagtgtggcagtgtgggaagggcagtttttggagcaggcagattggatttcagatcctggccctgtgtctgccctgacacctgccactcaggaaggtggcccggaacactgaaccagcagatgcatgtgggatttgcagcgctacccgcagatccacccccccagcccctcgggcatctcgtgtctgttgctagtcagcatccagctgtgtggcagctcctggtgtgaccagggacctgttttcagggatgagacctccaagcaggttacatcgagctcagctgtctccgactttgagccaactgctgcggtttgaaaacggttgagaactgttgctcattccaaagataaattccctttagaaagtgtttcatggacagctgccagtgtggcgatgagcagcagccgctgagtgctgctggctctccttccccacatcattcttggtgccacgcggctgggcggtggcagattcgtcaagggaccacgtggcccgcacccacgcagtacagccatcacagactctggctggcttctgcccaggagccctccgaggtgggagggtctgcttcttctgcactggcgtctcaggctgtccttggatggtctaagttcgtaccccacctgtgtggaatgtttgggaaacctgcactgcggctttgctcacggctcaccgttcaccctggagagccacagacaggcagggaggaatcgccaggcgggtcggactgcgcgtgtatttgcgtgtggagggatgtgagcgtgtgccagtgaaagctggtgtcacatgtcacaagcgtaaccactcctctcttgaacatcttttgagcgtgccaggcggatgccccttcaggccagtcacagccgtggctcctgtggacacatggagtgggagagaacatcccgtttctttctaactctagcctgatgcatctgggtgccggtcacagccgtggctcccatgcacatgtggagtgggagagaacatcccgtttctttctaactctagcctgatgcatttgggtgctggtgcagtttatttctggctgtttcacaagccctcagtagatcacattttattagattccagtcttgaatacattttatctaagagctaaaaatttttaagtttattaatcacccttatgctaagataagcctctgattgataggaaagtgtgaaaccatttttaagggtaaaaacatcaacttcatgagcatttttgtcaggcgtaaagcagcatcacatattttctttcccagcagaaacaccagaagtcacagaagatcgccagcccaattctctgagttccgaggagcctccaaccaggtatctgcatccgtcttcccacacctgctgaattcccgcctttctcctgaggagctggacgtggggatcctggtgtgtgtccctgcccgccatcctcagctctgcgcggcgggagctgtcccaaccccacctcctgcctcgggtccctcccaggcgagtgtccctggaaatgtagggtcaggacgagtggactgagggtctgataactgggtctgatttcaggcgtccaggtgtgtccaggcttggcccttgtcacggccctgctgttgctttccctcatttgcttttctcctttctatcatgaaggcggcctttgcagggtaaagcgtcccccgtgaaaccgcctgcaggcgggtggggtatctggggagcagcagccactagagcagtgctcttgccccagtttaaacagagttgtgccaccaggtaggtccagccacggttctccattagaaattgcagattttatgtaaaattaaaaattagtggtagcgtgttatcactggtgatctaaaatgtattgtgaaaaatatgtgcattgaaaataggaattattttgaagaaaatgtatatagaatgtagtgtgaggaaaaccttaaatgatcttcaaaaggatgaaatttttcaaacatagaaatagttatgaatagtttaaaatagtgtttctgtttgattcagattttcttttacctttttaggtaactttttgttttgatattattttaaactttaaaagtgcaagaatgctccttggtgatgtgataagttctcagagcagggggctgcatcctaatttcacaggtgcacagcacagcacacagggcgaccccagcacccatgaggccatcaccaggacatggggcatcccccagcacccagggggccgtcaccaggacacagggcatcccccagcacccatgaggccatcaccaggacacggggcatcccccagcacccagggggtggtcaccaggacatggggcatcccccagcacccagggggccatcaccagggcatggggcatcccccagcacccagggggccatcaccaggacacggggcatcccccagcacccatgaggccatcaccaggacacagggcgtcccccggcacccagggggccgtcatcagggcatggggcatcccgcagcacccacagggccatcaccaggacacgggctctcttccctcatcctcaaggtcctgcaggtaccttggggcctgttagagcttttgcttgagaagtcgtcatcgtggggtgctctgcacggattatcacgtgattccgttagtgacccttcccataggaacattttccgaggccttccatacacgtctctgggtgctcactctgcttccggtcttggccttcccagcagtgtctctgcgctgccaccgggctcatccttgcacagctccccacaggacgcggtgtcgggacgactgatccctggtgcatctcatttgtcagcagtggtgcctctcatggggcgatgcttggtgtgtgcagtgagtctgacctcatcatccttccgagtggagcattcccgtagctacccattgcaaaggatgacaccgcagtccctgtgtgtgtgggactctggtggcccatgtgaccacccgctgggggcagagcaccatggtttatgctgggtggccttgcatctctttctcccactgacctgctcctggacatggagacggcccattgcccgctggcatctctcccacccagcgttgtgagcagggcctaagaggtcctcaaaggggtggctgaaaaaccagaagacagttcaggccttctagggcaaggaccgtattgcggctgtattgcccttgcccgtgttctgtgccgtgcgtaggccaaacatctggaatacttatttacagagttatgagtgaaagcttgaacttgggatgtcctataataatagctgggaaaatatgtgatttcctgtatagtaacatatatatatatattctgacacacacacacacacacacacacactctgcagggcagttggcatcctagtgacttgggctgtgcctggatattctgactttatggtttgttttctttaagtgaagatcaagtcggtcgagaggacagcgcacttgcccgctgggccgcagacccggccaacacagcctggatggagagtaagttccccagctgcccacagccagaatcctcaccacgctccacagacgtcactgcggcggggccgggtccctgagtctcaggtcccatcagatctaaaactctaaaaagatgtttatttactgaaaatagtaacatgggctgactgtgcagaagtttccccgggttccctgaagctgtcacttcccgtgaggccaccccagctctccacgtccacgcactcactcttcctggtcgtttctttctagcacaggctttattattatggtaacagtgagatatgtgggtaacagaaactctgacctgcagccatggtcagccaccacccacacgcccaccctgcgcttgcctgtgattcccagggagatgcagtgtctggcacccgttttgaagagggggcgggtgggcctcccttttttttttttttttgtcccatacacactttattttacataacttggtgttttcttttatctaatcgtacaaatttaaatggggattcccgaataaatgttttgttaatttacctttggcagaaacaacagattccaaaacatttagtagcctcttatttatttgtaacttaaaaataagttctgtagcgtatttttccaaaacaatagcctgaagcaaatgtgcttgaaaagctaattggtaatgatctgattaatatcacagcttatttaagagaactattacttaaaggacagactagacatgtattttgacaaaaacacaatttttggtcacgtgaatgattcgtgtttagatttcaaaaacaggaaacatccaaaagtgcatcattttatttataatctcactccttgaaatgagagcagtctgcaacgtaaacagagcaaagaattccaaactctatttttatgtacatttaaacctgtaggattatgtcccgtctctgtgtggattaaagcgagcgcatttccaacacgcggctccagcttccgtacaattcagagtaaacctaaaggcattctttctccctttaagttggctgagccagcccccctccaggtggccagatctgcagtcccacctgcggcttcaaaggctgaaagatttttagctagatttacttgttttttttaatttttaaaggaaaagcaagattactttcctgattatgcctctcattatccactggctcactaatttctatgttactgtttcatatgatcaacttacaaggtagaaccatcttagttacctcctgattattaaactgcctcctggaagttttcattctggtttcaattatgacgttgttaaaacaaagatcttagtgtaattagatgattccgctgtgtgcctattaaagcaggatcgttacaggattaaattattgtcttggctgtttgctaacagttttatttccgaggtaaaatttgtctgatttttttctcattactcatttttattacccagatggcagtgaattggaataactatatttggaaatatgatctctaaactagcagtctctgaacattatctaagaggagtagaaatctttactgtggttgcagatagtaaatgctattaaaagaaagagcgtctgtaatactggagcttgacaacagcagcagataaggaattttcctgaatttttatttcctgctagtgtggggacaggagtggtggctggatgtcaggggagagttcgggtttgttggtctcattttctgtcttatgtggctgaggaagcggttgtctgtatgtttttgatgcagtcatatgtcgtagtttggacgttctcttgcagggagggcaccgctagtcaatgagtggaacctcgatttaaaggtctttttatgaaacggattttcatgtgaagcgtgtaactcttacagatatttgagtaaacctcaggctcattgttggtgtcctgtgtggtcatctcatacagcacggttttgcttacagaacttgccttcttttttatgaaacggtttcactttcacagaaccccagtgttgcacgtgatacagattgagaaacactgtcctatatgtttagcattttgatacttgctactactttttactttcagtggcacaaaattatggtgtcattggtttattgggatggttttccattgtatccagcactgatgggctcttttcttatttctggaagtctgtgtgccaccgttgtatttttttgtgcgtcagaacgtcaacttcataagcttaaaatactcgtcagagagccatatagaagtgtgtaattgaacacaaaatcatagaataagtttgacctggaaaccataaaactccttcctagtgacattttacagctggtccatttaaagagacatccttcattcccaataaattattctgccctaaaaataatgcttatgctttggtaaggtgctgttagctaccttacagccctcattgtctactagttgggacaaagaacgaaaaagtaaaaaataaaaaaaaaactacccttataaaccaactttttgaataatcatgacatcatcggcgactgtggccctgtaaaatttaaattgcactaggttttgttggtcactgtttaaagtgtttctccccgtttattgcagatccagaggaagcaatttacgatgacgttccaagggaaaactcagactctgaaccaggtttgattttgtctggaattgatttgaggagattcagctcagcagcctttccctctggatgccaaagtgactatttagtggacggcccagacgttttctgtattcatgttttgtatgttgcttctagaatggcttattgatgtgtggtggaatattggtgtttgtgcacatatgtgtgtgtgcttataacccttgaaatagggcagtttaatcttacttatcccaagcaaacagaggagtaaaggtacagaaaatgccggcaaagaggtaggaaacacagaggctgagaagcagcaatgtatatcgaataaatgacatcagtgagaaagtagagagaatcaggcaaaggtaatagtcaaagaaataactaagaattctctacaattaaagaaaaacataaattctcagattttagacatagagattcaaagcaagatgaattacacgttgatccatacctaggccgatgcaatggaggccgcggagcaccaggcccagggtgaatctcccgagagcaactggagagaaaacatggctgcctacacaggaaccgctattccactgacccacaggctgggggcgggttctcaaagcgaagaaggacgtggctcttttaacctgagcggccacgtccagcaaagtacagtcctttagaaagggcgatgggccgcaggaggcagagcgggggagcttgctgcccatagaatctaaggaaatagttaatgatgcactcgctgcagggaagagcacactgaaccacggaggaggtgacaggggcccggagggagtggggagcccgggaagtgtcgggcgtgtggagagtcgataccagcaccgctcaagacagcgctgatagtgccgattgagtttcagatgcagccggagccccagccagtgccgactgaagaggagggtgaccgttcatgccgtgtgttctgaagttctgaagtcggcatttttcagggggaggatcttgttaccgatttttttttttttttttttttttttgctatggattggtccagtttgcgttttatgggtaactgctaagaaaataggaatagattattttaactttgaaaccagtagtgcaaaacccaatctggtaaatgcaagaaaatataaaataagaaagctttgcaaatcatatgagaaaatactgcaaaataagtacaaacatattggtacgcatagtaaagtgcatcctattgccagtaaaagaaatcctcagattggataaaatagcaaagctagccataaattcttgtgagagatacataagagtacagaagatttgtaagtaaatggatggaaaaagaaatataatgcaaattctaaccaaagtattgtcagtataactataataatacactaaatgttaagccataagcaaggaataattcatgaggaagatatataacagttctaaactcatatgcacctaacagcatagccttaagatatataagcaaaatataacaaggcttaatcagaaatatgtaaatacgctgttggggtgagagattttaagaaaactgtctctgctattgacagatcctggacataaaatcagtaaaccggccaggcacggtcgctcacgcctgtcatcccaacactttgggaggccaaggtggatggatcacttgaggtcgggagttcaagaccagccgggccaacatggtgaaaccccatctctactaaaaatacaaaaattagacaggcgtggtggcgggcgcctgtaattccagctacttgggaggctgaggcaggagaatcacttgaacccaggaagcggaggctgcagtgagtcgagattgtgccactgctctccagcctgggaaatgagtgaaaactctgtgtcaaaaaaaaaaaaaaaaaaaaaatcagtaaaccataaaagattagaacagcaatgtagtatgattgacttgaaggtcatatacagatctttgaagcaagtagttccagaatatgtatttttttaaacacatgaaatattttaaaaaattaactatatagtatgcctcaaaacaaatattaacaaatgccaaagaatggatgttcagaccttatttcctcataataactgaataaaatcagtaaaaaaaaatcaatacaaacatttagaaattaaaaatgatatactactctgtaactcatggtcaaagataaaatggaaatgaaaatattttgtcttgaataataataaaaacattacataaactatatgggatagattttaaagtctaaggaattatagacataatggcatatgttaataaaacagaatgggcgcggtggctcacacctgtaatcccagcactttgggaggccgagccgggtggatcatgaggtcaggagttcaagaccagcctggccaagatggtgaaaccccatctctactaaaagtacaaaaattagccgggcatgatggtaggcacctgtaattccagctactcgggtggctgagacagagaattacttgaacccgggaggtggaggttgcggtgagccgaggttgcaccactacactccagcctgggcaacagagcgagactccctctgaaaaaacaaaacaaaacaaacaacagagagcagtgaactgagtatccagccagctgcacgaaagagcagcagagtcaaaggaagtggcaggaaaaaaataatgggcaaggcaaaaatgatgaaataaaaatccaggaagcaacataaagtattaacaaaaccaaaggttggttctttaaaaatagtacaaaaatagacaagcctctggttatattaagatgacacagagaaagaggggagagggatggaagaaggaaggaaggaaaggaaggaaggaaaaagttgatcaagaggatgtaactgcagtagaaatttgtaaaaatcataagaggatgctataaataactttttatcaaaaagttagatgaaattaaaaattgccttgaagaatcaactatacccaaaataaaaaccatgaataaacctataatgatccaacataatgaatggtttgcttaactactgtgcagaacagcccaccaggctcagatgtttttatgctggggtttattgagccttcagggagcggacaaacccctcagtcgcatgcactgttccagtgaatagcagaagcaaggatgaggtgagaattagtttataatgttagcagaaacttgtaaactccctcacctgcgaaggttgatgctacatttccttccagaaatgtcaggaagttgaatccagcatgaccctaacaagtaagcaagagcctgttttaaccttttacattcatggcagcagttcaaggatcctttgagaagctcttgtaacacgatttccccaaattgatggacataaacccatatgcttatctcagcatgtgtttaaaaagcacttgctgagattcagtgaccatccaacattaaaaactgctgatagaaggaaactcacttagctgaattaaggacgtgttcttaaaatctaccgccaacgtaatggggaggagctcacggcgttcgttaatttattcattccgcaaatatgttttgggcagttacataccgaatagtagatggaggtgtgcctgctgtcatggagatagggtgatttcatcctgttgatcaggaaaactcctaggtgcttgcaggtaaatgtgccacaaagaaagtgaggaccaaaggttagttgatgtaaaaacaagtttgaaatgcattttggggtaatttatccggtcgcttcgggcattcctcgcggaaggcgtggtctggtgactcagaagccaacacactgcgggagtccagccgtcggccccctgccgtgtggcgaggcccagtgtgtcccctttgtaaggacagcacaagcaggagttaatggaccggccatccatagcggtggtggggcagggagccagtttccgaaagaaactcacgccgccgcaggagggccctgtgggatgctctgtgcagagctgttgtgcggaccgggagacgggaaagcctggtggctgcaggagggcaccgtgcagaagtatccagtaaaccacccacagcacggcagcagaaaaacgagtaaattatatgtgtgtatgtttatgagaactcagaagcaatggtgagcaaaaagcaaaagcaagaggagaaagtcacagtgtgctggcatcaagttgcattgagaggagcccgcggggtagtgcacccgcatttcctcgttgcgttgagaggcgcccgcggggtagtgcacccgcatttcctcgtttgagaggcgcccgcggggtagtgcacccgcatttcctagttgccttgagaggtgccgcggggtagtgcacccgcatttcctagttgccttgagaggtgcccgcggggtagtgcacccgcatttcctagttgccttgagaggtgccgcggggtagtgcacccgcatttcctcgtttcattgagcggtgcccgcggggtagtgcactcgcatttcctagttgccttgagaggtgccgcggggtagtgcacccacatttcttcactcgtttagagttcggggctctcagaacacagggagaatatgggagaattccttactagatgttacagaggccacacagggccacttttttcttttttttttattgtgtcaggtatacgtaaatattcctttcggtcagttcagcacgtaggactgagtggcattaggtacgctcactgtacagccaatgcctccataggccactttttaaatacgcggggctaagggccaacgacaagattgtcatcgaggacaataagtcgatggcgctgcctggtcactggcttggtcagaatacacatgccagggtgactggatttaacgttcagttttagaaccacaaatctgccagcccaggcattcaagaggaagtgagtaattcactgaattgatggttagcaagacccttcaaagtccttggaagttccgtgtttgctgggggtcacaacagcaattgcgtttctaaaacattgaaaaccacccggttttcacacatctgaatagcctgagttctaacagacctaagtaaaggcgtccaaacgtgcctgatcctgtggctgggtcccaggagccttaacaaggcattgagagagctggattgattgattagactcttgccaactgctgtgcggaatacagaaaatgcagctccagctctcaaagggctgaaaatctaattgaggtgaaaaaggtaacatgtgtgaaaaccatgtctgtgtagacttgttttgtatggaccagaaaagttggaagtccagagatggatgcgaggaaataggggatggagtttccttataacctctggagggacagtccagatacataccggggtgtgtagcgggtggaggttctaagacaggctggaggaacagtgcagacacacaccagggtgtgtagggggtagaggttctaagacagtctggagggagagtgcagacacacaccggggtgtgtaagcagtggaggttctaagacaggctggaggaacagtggagacacacaccagggcgtgtagggggtagaggttctaagacaggctggaggaacagtggagacacacaccacggcgtgtagggggtagaggttctaagacagtctggtgggagagtgcagacacacccggggccgtgtagggggtacaggttctaagacagtctggtgggagagtgcagacacacacggggctgtgtcggggatagaggttctaagacagtctggtgggagagtgcagacacacaccagggcgtgtagggggtggaggttctaagacaggctggaggaacagtggagacacacactggggagcataggggtgcttttctctgagtcccctagtacatggtagaggctgtagaccctccgctcttgggcacgtgggtaggctctcaggatgactcttggctcttgggcatgtgggtgagctctcaggatgatgcccagccccaattttcaggcaattgtgcaaggacttgacccattcatccgctgagctgagttgctgagactgctgggtgcccgggtggtgatcattgtccgtggcatacagaacacactgcagcttctgcaaagtgagctcatttcacgcattttatggctttgccaggctgctgttgacctgccagaacttttaatcagacatttggaggacctgttttgtagtcagtggagaaatattacaaggatagggtaatttgaaatatctaaggattgtaagtgacaagttcatgtctaattttgcatttccagtgaaagcaagtgttggctttgaatgttacttatgtgctgagatgtgtatattcctcagtgcttaattactaaggatttttaaggccaagttttgttacagtgaatgactgtggatgcataaagaataaatttaatatttttaaggcatggagattatttgtatctaagaaaccaggtaaaataaagaaacatttatgcttgtgtgactgataaaagagttagagagacactcatattctgggagtttgaagaatgtcattttcattctctaaaagtcttgttagtgtcacagcattgaaaatttaaaaatccgtgtgtattttcttgctagtgctggtacttgaatatctgtatcatccacctatccatccacctacccatatttctataatccaccgtccatcgacatgcctatcatctgtccaccatttctctctgtctaattttcaaaacatcctgtaagtttatataaaggaagatttttcttcttgtgaagttctctaaggctgacaagttacctggcatgactgtggcggatgcccatagccaggtggtcctcggggtacagatggggcaggggcacttgtgagaaacacctgaagtgcttttccccagcctccccggccctgcccgggtggtggaggcgctgcacggtgccttccatggagcaagccccgggctccgcagggtcctcagcatgattcagatttccttccacccccagctctagatgatttggtaaaaccacaaacaggcacaaaacagcccacatggaattctaaagttttaatttcattttggaatttatgcactcagatgaaatgatttatgatgatgttgagaatggggatgaaggtggaaacagctccttggaatacggatggagttcgagtgaatttgaaagttacgaagagcagagtgactcggagtgcaagaatgggattcccaggtccttcctgcgcagcaaccacaaaaagcaagtacgtgttccctgcacatgtgagggatggttctctcgcgttaacacggacagggggctgtgaatatgattgtgatccacctagtacttcatagtgatttgttaagatgctgataagtagtttggggaaagcataagatattggcaaaggagaagacgtgtcttgtttcatatagttaagtatcgtcatggaaagatggagaaattaagcttctataatccacttaaaaggtcttaaatgagctcaccaccttgaataagaaagtagttattctctgaattgcttgtgttttaatgtattatgtgctttgcacgtagcaccgtttgcggaacactgaatagatgggatcggggttccctaagacacagcacatctgcactttgctttaagtgaggtttcaactttagcatgttcagcatgaaaaggaagacgtaaaaatagaagatgttaagggacaaaagcttctaaactgacctgtgacaatcctttcttttttctttttcttttttttgagatggagtctcgttctgtctcccaggctggagtgcaatggcgcaatctcagctcactgcaatctctgcctcccaggtttaagccattctcttgcctcagcctcccaagtagctgggattacaggtgcctgccatgactcctagctaattttcgtatttttattagagatggggtttccctatgttggccaggctagtctcgaatccctgacctcaggtgatctgcccacctcggcctcccaaagtgctgggattgcaggtgtgaaccaccacacccagccggatgatcctttcttacagggaatttttattttactttttttgtggaaaagtcttgagattagggtgtgaggtgggatgtcagagctgtaaggcgtgaattctggaattgggtggttgtgagtcatggaacccaggaaccattcagctgaggcacctcccaggtctcggtggtgccaggccgtgccaccggtgttttgttagagttttttttgactgtttgtaaaaggatagatttgtgctcatctacagtgatgtctgtgtactttctgtgtgaggctgagatggaagccacacgcagtccttgtctgaggctggcgagtcccgtgttactgatagagatggtgaacggatgcccgccatagtgacagttgtcgataaccggtgttatccctccggtcccctagtaacccccagtaagcggagatttcattcctggacctagctgccacgtccctatggtttacaagtgattatgggctgcctacaattctcatattctgtgaacctggctcgtgaaactcaaggagaatctactagatcttggcagtcagctcacctacccagtttcattcacaagttcttccaggaattagatcttttctgccaccgtcatcattacaactgcgatttaaacaaccgatgaagctgcaattgtagtttttcgggttttttttttctttgaaatggagtcttgcctgtcgctcaggctgaagtacaatggcgtgatctcggctcactgcaacctccacttcccagattcaagtaattctcctgcctcagcctctcaagtagctgggattataggcaccttccactaccagctaatttttgtatttttagtagagacggggtttcaccatattggccaggctggtctcgaactcctgacctcgtgatctgcctgcctcagccctccaaagtgctgggattacaggcatgagccactgcacccggcctgcaattgtagtttttaacagctgataactgaggtgatatttcgcttgctgtagctgagtcagacacttgatttaaactgagatttaagaagagtgctgggctctgacatcacagatggaggctcggtgtgtgcctcggagcgtgggttaaatgctcttcagtttcgccttcatggtgggctgtggacagaggggccaggccactgaggagccgagaggcattagtagtcactccttggtagtaattcaggagaccctgcccttgctttggagcgggcccatatcccagaggagcccttgactgtctgggcagtgccagtggttcagcagccctccctgctaggcgaaggagctggggaaagccagcatacagtgggtttgtggtgcagaattacaacccgggagcgctgggctctgcatttccagcctctcctacacgtccatgttgccaggacagtggcctggaccgggggtgggaatactgtgtggggtgcagacagggcgcccgtgtgttaggcctgtccaggatggaagtgctgcaggcagcaccaagttttctcgttcaaagggtcacattttaaaaacgaccaaaataaaactatatgttgttcaaaagtcatctcaaaaaatctcgaattttgttaaaaacttcctaaagtgtctgtgacatgagaaatgccccgagacgagccagtggggcctcagccacgtgcatctgaagtgtctgtgaccacacggagaaggatccagggggtccccagtcccgtcagttagagagaaagtgatctcaggttggagacccttgaaaatccgtgctgccatccccaaaatatgtcactttcagtatagtttaaatacaagtatcttttgcttggatgccaacataaaaaatgattttatgtatttttatttattggataatttttattccaccaaaatgtaaacgaatgatttcacagatattttgtgtgcgtgcatttgctcctgtctagcacagagaagaccctagcctggtgtctggatagtgtctgtcttttgatgccatgtttagctcatttctgcatttatctctcttttttttttttggagacagggtcttactctgtctcccaggctggagggcagtggcaccatcacggctcactgcagcctccacttcccaggctcaagcaattcgcccacctcagcctcctaagtagctaggatcacaggcgcgcaccaccctacctggctaatttttgtaattttaatagagacagggtttcaccacgttgcccaggctggtcttgaactcctgagctcaattgatcctcccacctccgcctcctaaagtgctgggattacaggggtgagccactgcgcccagccaactatttgtgcatttatctctcaaggaccaactgggctagtaatggggactctcgcgtgtggtcccagaagcccccagccaggacaggcctgatgtgccactgcagacgctgccagcatcctctcaatgtaaaattgtcccaaagaaccaaaaagagcgtttttgtgaaaagactgtgtctctttatgctgtagctttctcatgacctaacccgtttaaaggagcactatgagaaaaagatgagagatttgatggcaagcacggtgggcgtggtggagattcagcagctcaggcagaagcatgaactgaaggtagagtcttgcccccggccgctgcccccacttgccagccgggcagtaaagaaaaaccgcgcggctcggtcggtccttgctgtctcaacagcggttctcaaagggtggtccggggctcccggaatcccccgacgctttggggctcacgtggactctgagacgctctgtgcctttcactgtctccctcttacggggaacccaggaacattctggaggctccacagctgtggcctcaccgctggcggaatgccatctggctgtctactagagaggggtttccagaaacgcacaatgccactttctgtttgttttggaaaatacagcaatttttcatcaatgttatttaagataacatgtaataggttgattattttttaaatgaacatttataaaaatatccaaaatttttcagcgttttaacttcaaatgcagtaaatattgatacataaaaccctggtaaacaaaagccatttgggctctccataatttttaagagcgtccagggcccctgagaccggaatgcttgagaactgccggacctgagtgtcgtgacagtctgttctgagcgatgtcttttaaaagggcactgtcaagtactgtttcctgcaattggaccttttatcctgctggtattttgtgatcattcatatgtgttgaatggcactcactggaaagggatgtgcactccacacagcttctggagcagccggctcatccgccctgttgtgcttgggccatcagaagccacagccacagccgccccctgggagccgcgttaccccctcacatgcagcatctggctggctcccctgcagggtgtctgatgggacctgccggaggctgcaggcagtgtggcggggtttctgaggagtggagggcgccatcagaaccatgggaggggtgtgtgagctacatttggaggttttcacagacacggggagtgccctggctgaagcaggtgagggcactgtgggaagtgggaaaggaaggctggggaggcagccagggctgggcccagcacgctcgcttcccctggtgagaacacccctgtgtcagccctgagatccgggagtcctggccgaggctgtgacctggaacccggggtctcacctgctctggggctcagggagcatggcggccctccagtttgtcagtttgcagttctctgatactctgtccggggaccctgaacggcgctggctgaaaaccaagggttcacagcccaaatctggggttgagaaagagcaggatgtagacaggctgtgcaggacggaaacgcgcaggcgggcagggctgtctgcggcatcgggcgggaggcaggggacatgggtgcaggggccaaggaaatggcagcaggacatggtcccatgtggggttgggagatgcaggagcaggggagcccccgggggatgggggacagcattgcaagtgatggagatgggctggggcaggcgacgcgggtgtgaggccgtgcgtgttgtgtggtgttcatggtgaacgcttcaggaaggcagccctcaggcgtttggaagtccagggcaggcagacacggccagggctacagcgacgctgtctgcacgctggtgcccagcagccctgctcctcacgcggtggtgtgacccagatgaggagagcctggttctcagctgcactgctggtccctttgagaggtccctgggatggggacatcggttgtcccataagagatcatcttttaaagacgaaatcactcagcgtccagtggccagtacctcagatgttgggtttttaaggaataagaaatcagatggcaggagacgcctcagacgcccctgagtctaggcagccgtgagtgtccagcacagctctggccgaggaagtggaggcagggagccccaggccagggggacatggcttccgagtctgacatccgcagcgtgctgcaccccgaccctccctcaggtgcgtcccgtgcgtgtctgcagcatttgccagggtcttgcattcagccccgtggctggagctgggtccgtgtaaccatgcgtgtgaggcggccctgtcaacagctggccatgcccccacatggggtgcagtgggaagccccggggaggttaaaaggctgaactggagctgtgagcgtctgcagttagttgttttgccatttaattcgaggcgagttgtttgacatttgtgcatgttagtgactcacctgtgacccccacgtagctctttgtgtgagtggatcacatataataccataaatggggcagggaacatgtttcaccatgtccaggaagggctgtatttttaaggtctgttttttccttttttccaacaaacaaaaccaaaacaaaacctagcccagaactgcacgtgacacatgcgctcacaagaaccagactacttgacagtattcttttaaaacaggcaaatgaaagtcgcaggtgggttctgccgccgtcccgttctcacatctccctctccgtcgcagatgcagaagctcgtgaaggccgcgaaggacggcaccaaggacgggctggagaggaccagggcagccgtgaagaggggccgctccttcatcaggaccaagtctctcatcgcacagggtccgtgcctgcaggtcttcttgcggggaggacacggggttggggggggcggccacatcttgtggggaggactcggggtggggggcggccgcgcaggctcccacagccttagggagcaccagcctgctcagtgcttgggtctgaatcagccctgctgaccccagcctccccgtcctgcaggggtggcgttttagaccgagggcacccagcagcagagaatcattgagaatcattgagaatcactggctggacataggaagggctgtgcaggggcctctgtcactgtggattcttagtattggactctgtatttatagcacattggccctcctgggcatggtcccgcagggactgaggtcgtgagcgtcctgaactggcatttcaggaatcttttccttggtgaggggagatttggagtagacagctgaagttccaggtttttctaaacatctaacgaaggcgcagtggtctgtgcagttatgtgtggaaaaggcaggtggtgtggaggtgtcgtgcacggcggcaacaagcagcaggctggggtcatttaccgtccgaggagacttctcggagcctttgtgcacggatgtcctaaggtcgagttacgggagggtgactgagacttcactgtcatacaggggtcgctgtgactctgacctggcatttcctggttgtttctccagctttctaatgtgcctgtctggtgctaggacgtgggtagcatttgctaatatctgtacttggaagggactttgcagtcacgttgtccctcaaggaacggcctcggatacgatgtgtaattggtatgacatggtgtaactcaggaggccttttcctctttcagtcctaatgaagccctcggcatctcagacaaggtgggggtaagctgtcagcatccccgaggggtttatttggtgatggagacgggcaggtgcattctaataaaatgtgcagtagtatcatgccctgatgaggtgccatgaggtgctcagggcagcaaaggacagcctttgaggaggtggccatattacacagcccctggaaagcacaggcagctctgtccagtgaggagttgggatttggggccacattcactgcctcaaggagtgtgtctgccaccagcagcaaccccccaactggagcccagattccaggagctgatcacaactgcccacctggagcccatgccaggcccctgagccaggatttgcaggctggcagagtcccccgggactgggtgtgtgggacagtctgagaagcccggagtcagcccctgggagcaggtcatgctttgtctctggtttaggggtactcttttgcgggtcagttgtagagatgcggcagtttaataggcaaatccttggccgggcacggtggctcatgcctgtaatcccagcatttttggaggccgaggcgggcagatcacgaggtcaggagatcaagaccatcctggctaacacggtgaaaccccgtctctactaaaaatacaaaaaaaaattagctgggcgtggtggcgggtgcctgtagtcccagctactcaggaggctgaggcaggagaatggcgtgaacccgggaggcggagcttgcagtgagccgagattgcgccactgcactccagcctgggcgacagagcaagagtccatctcaagaaaaaaaaaaaaagggcaaatccctaacctcccaacccgagtttcctaagccataaaatgagaggcttggacagaatttcgttcttcgtcctggttgtacctaagaattaactagaaagcttttaaaacaggctggtgccaggccctccttccctggctgatccgttgatctctgagggaaaagtctgggcatcagtaggttttaaagccccttagatagatgtttctgtgcagccagggtttgggatctttgaactagaaaaactcaggtttctatcatctaaaagtgcctgtgcttttctgatttccagccattttgtggatgctttaatgtagttagctgtgttttaaaaaaatgaatgtaggcgttttcttgttttttagagacagggtctcactctgtcgcccaggctggagtgcagtggcacgaccacagctcactgcagcctccacctcctgggttcaggcgatcctcctgcctcagcctcctcactagctgggagtacaggtgctcacaaccatgcctggctaatttttaaattttttgtagagatggagtcttgctatgttgcccaggctggtcttgagctcctaggctcaagcgattctaccatctcggtctcccaaagtgctgggattaggggagtgagccaccccacccaactgtgaatttagtttttgtttaaactgttttgagttttggaaagctgtgcttcttaaggcatccagtgagagagacagaagaaatatactaagtgccacctcagttttcaatgacttttgactcacctcagttttcaatgactgttcttagccattcttagctgtgtttccttgtttctgattgtgatattttatagattaagaaactaaaatatttaatttaggaaatattctaaaacactaagattccaaaatattgccactttgctatctagctattcaaatggcacttctcctttttgaagttaaactttaaatactgaaaattttaaatacagacaaatattgtattaccctctggaaagaatattttattggatttgttaaaaattcaacttaataatagctgggtgtcaagtaagcatggaaaattgaaaggtctacacaaaatatttatttgacttttttttactgtactgtagtgttgtgaatatattatttgaatgtaaaattcatgcattttgactttttttttaagatcacagatcttctcttgaggaagaacagaatttgttcattgatgttgactgcaagcacccggaagccatcttgaccccgatgcccgagggtttatctcagcagcaggtgagatgagcagagctgacaggggctgttgaccagcagagctgtgctagtttttaaatatttgtgtgtttgatgctggttggtaaatatttgctgtctcaaactctgcatccactcgggccctccactgtaggttcctggcccagcacttagaggcttactgctgggctcagcaagggtctggggggacgctggtcagcagctgtggcctggactcaggcccttctggtccttaaatattttggacagcacccctgcccctgagtgtagctgtgagaaaggggaggaacttgcattcttcgtgggagtcagtcacacagtttttactttcacagagacagagtgtgggtttgtatggtcagtatgtgtatgtagctacctgagactgagatgaaaatgacagattttcagtaactaattaaatctgaatataatgcatttcttaaaaatctgatactcagtagcagaagggaaaaaatcagtggttttcattggattgtcttagggtaaaaggaagagaaaacttgaggaaccagagtgacagcaccaagtttgcaggcctttagcagcaggggctgatactttgggatgatgggagttgtttcccacatgggcagcgaggtgcaaatcatggacaccaggatggataggcagacatatgtgtaatccacggatctggggagatccctgatacaggtaggcagatagagcaagagagagcattgtcagattaaagacaaacaacacagaaatgcttagtgactggccaggtttaaaaagagatgaaaagggatacctgcgagctgttcataattgaccaggctgaaataggaagcttacatttcagtggaattgaacagcgatgactgaagtattagttttgtcagcagcatcacacgagtgacgggatggagtgtcaacagagcttggagacagttgttgaggagctgtcactcatgggtgtgcatgctctgtgcaggccccgtgcccggtccctggtgtgtttcactgcatttcatccttgcaaatcccgttgccatccttgtgtactctgtaaggaagcctggactcggaggaggctgatcatcagaactgcatcctccagctatgcgaggaaggggtcgtgtctgatctcagtctctcccatcgcagcctgctcctaacctgtctgtgctcactggggccatgtgatctgggctgccacacgtccaggggggtggttgacagcctttaccaggaacagaggatctagcgctttctcctgtgcatgctgtccagctcacccacctcacttcatgctcaggagttataaaaggggttcatggctgaacaccttcttgccagtcctatgaggcgctcaataggatgacacgctggccagtcctctactatctggggccctcactgcatgtggggtacctattctggtgaggacacaccatgtgagaggaacttggatcctgcactctgagaacttactgtagcgatgaagccgaaaaccaaaaatagcaaaagaagggaaaagcacaggggaaatgcttcctagcagatgagggactaaacaggaatcataacaggagtgtgagtgactcaggaccagaagagtcaggagaccttgaggacacatggcccaagccaagacagcggcctgagctgaagaccagtgggcaggatgcgggggtgagtgtgaaagaggcgatgccagaccctgagtggggtgtgaggggtctgtgaggagatactgagtggggtgtgaggggtctgtgaggagacactgagtggggtgtgaggggtctgtgaggagaccctgagtggggtgagggatacgtgaggaaacactgagttgggtgaggagtctgtgaggagactgagtgaggtgaggggtctgtgagaagtccctgagcaggtgagggttgtgaggagactgtgagtgagctgagagtctgtgaggagacactgagtgcaatgtgaggggtctgtgaggagacagtgagtgggatgagggtttgtgaaaagacgctagatgggatgagggttttgaggagacacggagtggggtgagggtttgtgatgagacagtgagtggagtaagggttgtggggagatgctgaggagaggtgaaagttctgaggagacactgagtgggatgtgaggggtctgtggggagtcaccaagtgccgtgagagttgcaaggaaacacggagtggggtgcgggtcatcaggagacagtgattggggtgaggggtctgtgatgagacactgtgagtggggtgagagttgtgaagagacagtgagtggggtgagctttgttaggaggcactgagtagggtgagggttgttaggagacagtgagtgggatgagggtttatgaggagacactaggtagggtgaatgttttgaggagacacttagtggggtgagggtttgcgaggagacacttagtggggcgagggttgcgaggagacagtgagtggggtgagggtttgcgaggagacacttagtggggcgagggtttgcgaggagacacttagtggggcgagggttgcgaggagacagtgagtgtggtgagggttgcgaggagatgctgagtggggctgtaggttctgaggaggggtggggtgagggtttgtgaggatatgctgagtgggatgttgactgtgaggagacactgagtggggtgagggttgtgaggagatactgaggtgatagttttgaggagacagtggggtgagagttgtgaggagacactgagtgtggagggctgtgaggaggcactgagtggggtgaggggtattgaggagacactgagtggggtaagaagtctgtggagatactgagtggggtgaggggtctgtgaggagacgctgagtggggtgaggtatggggagacactgagtggggtgtgaggggtctgtgaggtgtcactgagtgtggtgagagttgtgaggaaacacagagtgtggtaagggtcctgaggaaacactgagttgggtgagggtttgtgaggagacactgaatagggtgaggtttgtgaggagacactgagtggggtgagagttatgaggagacactgagttgggtgagggtttgtgaggagacactgaatagggtgaggtttgtgaggagacactgagtggggtgagagttatgaggagacactgagttgggtgagggttgtgaggagacagtggggtgaggggtctgtgacgagacactgagtggggtgaggggtctgcgaggagacactgaggtgtgaggggtctacaaggagtcacggagtgcagtgagagttgtgaggaaacatggagtggggtgcgggtcatgaggagacagtgattggggtgaggggtccgtgaggagacactgagtggggtgtgaggggtctgtgaggagacactgtgagtggggtgagggttgtgaggagacgctgagttggggggttgtgaggagagcgtggggtgaggtttattaggagacactgaatggggtgagggttgtgtgagaattaggggtgagggttgtgaggagacattgagtgggatgagaggtgtgaggagacactgaatgtggtgagggtttgtgaggagatactgcatggggtgagctttcttaggagacactgagtgggtaagagttgtgaggagacactgagtggggtgaggggtatgtgaggagacagtgatgtgaggcatctgtgaggagacactgagtggggtgaggggtctgtgaggagacactgagtggggtgaggggtctgtgaggagacactgagtggggtgaggggtctgtgaggagacactgagtggggtgaggggtattgaggagacactgagtagggtaaggagtctgtgtggagacactgagtggggtgaggggtttgtgaggagacactgagtgtgggtgaggggtctgtgaggagtcatggagtgtggtgtgagttgtgagaaaactcggagtggggtgagggtcgtgaggaaacagtggggtgaaggtttgtgaggagaccctgagtggagtgagggttgcgaggagacattgagtgggatgagggttgtgaggagacactgagtggggtgagggttgtgagcagacacttcatgggaggagggtttgtgagaagacactaggtggggtgaggtttgtgaggagacactgagtgtggtgagggtttgtgaggagacactgcatggggtgaactttgttaggaggcagtgagtggggcgagggttgtgaggagacactgagtgggggaggggtatgtgaggagacactgagtgatgtgagcaatctgtgaggagacactgagtgcggtgaggggtattgagacactgagtggggtaaggagtctgtgcggagacaccgagtgtggtgtgaggggtctgtgaggagtcaccgagtgccgtgtgagttgtgagaaaacggagtggggtgagggtttgtgaggagacactgagtggggtgagggtttgtgaggagacactgaatagggtgagggttgtgaagagacactgagtggggtgagggtttgtgaggaggcactgagggttgtggattgtgaggagacattgagtggggtgagggttctgaggagacactgatggggtgagggttgtgagcagatactgagtggggtgagagttgtgaggatacactgagttgggtgaggagtctgtgaggagacactgaattgggtgagggttgtgagaagacactgaatgggttgaggttgtgaggagacagtgagtggggtgagtgttgtgaggagacactgagtggggtgagggttgtgaggagattctgagtggggcgagacgggtctctgaggagacactgagtggggtgagagttttgaggagtcactgagtgtgtaagggtctgtgaggagacactgagtttggcgaaggttatgaagagacactgagtgcagtgagggttgtgaggagacactaagtggggtgtgaggggtctgtgaggagacactgagtgggtcacggggtccgtggggtgtcactgggtaagagtcgaggttctgtgaagagagagtgagtagtgattggtaggggtgtgtgcacatatcagaggaaagaggtttgacctttttgttgtatggcacttttccaagggcctgtctgttgggtactgattttggtggatttgctcagcgaattggcagtgactgttcattgttttatggtttctgtaaagggtttaagcttcccaaattagtctcacagacctggatgaaattctgttttttgctctgattatctcagttacttttgtctagtagttaatttctgaagttcagttttccttttctttgaagggtggattttaatgtctatttccatcttgcttatcccaccgtaatggttcagtgaagtcctgtatagcaaggtctctgtgttgtgttagcacagtgccgtcactttcaatgagatgatagctgggattaggattagaaacttagcagtatttaggatttctgcattctttcatgcagctttctttattgtagtcatgattcacatcgattttgttttcctcctgccaaatgtgttgtccatgagagttttctcttgagtggttaaatggggggtattgatgctctttaattcttgttctcctctagaattgaattaagggaaacataactctaaaatgctgtatattaaacattctttgcatgcctaatttgggggtggaaaaaggcaaatgttctttttgaaataaagaagggtcgttctttacttggaaagtacccttgatgctggaggacagaggatcctgtcccgtccccattcccggtgaggacatgaggaaggtcaggctgggccaggcccaggcaccatccgcagctctcccagctcaggcctaggagcctctctgattgtcctccagccctggctttgtccagttgccccatgaccttcatgccagggaccctccctgtgggggctgcattcaggatggatttctcctctatgactttaggtcaggcttctcaggaagagagtgacactcttcctgagcactggaggctccctgtcccaccccttagtgggcatataatttgacgtgtcagattgagctgccagaaagactgacatcacgtgcagtagccatgaaacccagaatattggttttgtttttgtattttaatattatacctattccagatcttttgacctgatactatattagtatcatctcaggactttaaaaaatatacatacataatatatatacacatataaataatacatatacataatataggtacacatatcaataatatatatagtataatatataacatattatatatattacatgtatatatacacaaatacatttttatgtttgacccccacaactgtgactcaggagccttgggagagtgtttgggaatctgaatttcagaagaaagactggcctgggtttgatgatgggaggggttgcttggcctttgggttctaagctctcgtttgaaagggaagcctctgtgctctgacgtttcctgtgaatcagtcagtagcagcagctgcagcttcccagcttctggctctgtgtgtgtgtgtgtgtgtgtgtgtgtgtgtgtgtgtgtgtgtgtgtttaatcccagcgatacctgtattttttaaatacattagtatttttttaatacatcagtttcttctttgggtattttagaagggttgatttttgtcttttgcgaatagaataatcctttctctaaaaggagtaatctctccattgttaatcaggttttgtaaatcttggttgccctgcaatctttttaaccagagaaatttcctttgtgaaaaatgctctttgcccgctaggtggcaacgcagtcccttcaaatagcataatccagggctgcaggtagcctgatgctacactggagtacccgtgtgtgtgcatgtgtgtgtgtggtgtgcttccgtgcgcgcacgtgtgtgttatcttgcacgtatatggggtggtgtgtacaggagtgtgtgtggtgtggtgtgcccgggcgtgtgttcatatgcgggagtgcgcatgctggtttaggagaaactccattgccctgttttgctctgttttccatgaattggcaaattggaagtacaatgatcactagctggactgtgtttagaatgagggaaatgccgggcgtcctcataggcctttcacgggatcttacagccacaagtctattgtatgtgcttcagtgatgaaaagcaagatggaaaataacgtcaggttttgattgcaaacatgtcagattgtagagattttttttttgcacctctaagtgacatgaataatttactgtccacattcttggcctcataggtagatctttggatggttgaaagatctttgcaaaaaaaaaaaaaaaaaaaagattcctccacattccacaaactttgttttcttagaactttggaataaatattttagataagtgttgctaataacattcattgatcaagactggaactattttttatcctgaattcataggaagtatcatctacctgaatgttggatacataaaatacaatctgttaattcagtatattatcgttgcataaatgaaggaatttcttttcagtgctgtaattttttttgtcccagctgtagttatagttcatagtttgaggtttaagacattatataattgtattaatggggcgaagtatgttttgtacctgtaatgttatttaattaggctacccttgtgcactgttttctaaaaatagaaaagttacttatcagcaagcctcagcatagaagtaaaatgtatctgtgtgtattataaagcagttttctatcattgtacttccaaatttccaacaggttgtaagaagatatatactgggttcagttgtcgacagtgaaaagaactacgtagatgctcttaagaggattttggaggtacttaagtgtcgtgttacataatacatacatttctattattcttttttacctatatacattttgatccataaatgcaaagcatatatgtttatgaaacataacatgcaaatttgcaaaattctcaaaaggatctaagtattatgtctgtatattgacatcaaaagtcatgatttatgttgaaataaatataatttatgtaagtgaatatttacattcatttatctaagctttaaaaatgtctgggccaggctcggtggctcacccctgtaatcctagcactttgggaggctgagtcaggtggattgcctgagctcaggagttcgagaccagcctgggcaacacagtgaatctccatctctactaaaatacaaaatattagccgggtgtggcggtatgtgcctatggtcccagctactcgggaggctgaggcaggagaattgcttgaacccgggaggcagaggttgcagtgagctgagatcatgccattgcactctagcacgggtgacagactgagactgtctcaaaaaaaaaaaaaagaaaaatgtctgaagcagccatgcccccatggaacatgcctataatcccagttacttgggaggctgaggtgggaggatggcttgagcccaggagtttgaggctgcagtgagccatgatcgcaccactgcgctgcaccctggacaacaaaacaagacccaggctctgaaaaagaaaagtctgaactgtctttgctcattttgtcttagcaatatgagaagccgctgtctgagatggagccaaaggttctgagtgagaggaagctgaagacggtgttctaccgagtcaaagagatcctgcagtgccactcgctatttcagatcgcgctggccagccgcgtttccgagtgggactccgtggaaatgataggcgatgtcttcgtggcttcggtaattaagctgggacacctggatgtccatggggctctccatgcacctgtcctctcttcccttcttaggctgatgttttgcccctgatctcctgcaagctgacaagtgtgcagttctctctaaaggccaggctgaagttgcaatgccctggccaagcgtgtgcgctagggaaatgataaatggatctttaccagggaggccaaggcgttagaaaggcagacactggacagaagctgtatctgaggacatttaacaatatgcactttatcgagtcttggatgccccattagacgatttgctgaagctttttgttgttgaacaaggatgccgtgtgtttggcaatgttgtaaaattgccgtttttaagccctcacacaggttctcttcctgatctaggtgtcactttctgggtgcagaattatctgtgcctgggaaaaatagaaaacacgtgatgggaaaattcctagatgttttctcaaacttttgcccttggctgtagcttctgttgtgtagatacaggctttcggccctatgctgtgacacaggaatatgatgttgcaacagcttgcctgaacacttcctggcaggagaaagggttagctgcctggaaaccactggtggtttctgcattggcagtttcgagtcattttatcctcactccgtgtatgaatcatacttattgtatattggttggattctacctagatgtagaggattatgagtgaaacagattggtttctgtaattatttgagactatgatgctatcaaagggatataagcttgcaagttttgaaaaaagtgttcctcttcttaaatgaatgttataataataatacgtgaaatgttttcctatatagtttgtatatgtacttgatgaggtctataaatgctttgaataaatatggaaacaaaattctttcaaagatatttgcataataccgtttatggatccttaaaaaaagagaaatattggatatttattttgttattggattttttttctggctgttttatatattaggttcaaccttatcactgttctttaaatacctaccttcccaacatttttaaaaatgcaaacagattttttaaagaaatagaattttgatgaaaacattcctgctatcaatgccagtcacaccagagctctgccatccatcctaaaggacttacggtttcttagaataacatggagtgatttttctctctttgaatattgatagcaagggcaaatgtttctgcctcttaacagaaacctttgtgcttttaggaaaacgaacacgtgtagggcattgtatgttacgccagagaagcaggatcagcccccgcccccagcccccatttctagggtgtggttgaggcctgtttctcaggatattgggcccaccatggaatgagttgcatgactttcttgcctggaggttgaacccaccaagtgagacttggcaggaacttaaaatcaccatccttatttgtctgtagtcatgaacattcttaactgaaacccaaattaccatggttttgaacaaggatgtcagaaagtgctctggagtcaaaaaataaggtcaaaccagcaacttaactcctaacacgcttgcttaaagaaaaaaaatcacacagtcataataaagtttatcttatgaaaacatcacagtgaccgaaagagtattttgagggcgagtttcaaatcttctgttttatgttggaaaagggatatctggactctgtgatttctctctgaatttcctcctgtgtttcagttttctaagtccatggtgctggatgcatacagtgaatatgtgaacaatttcagcacagccgtggcagtcctcaagaaaacatgtgccacaaagcccgcttttcttgaatttttaaaggtaagcgcttttttttttcatttgggttttaacaccatctgataacaagttacatgtcaaagcttgactctgaatgcagttattcgttattaagatttcagtatcaatagtgccctagatattggattaatgctagaaatgaagatgaattttaggtcctaatgtagctttttgaaaacaattttatttgcaccttcttaaaagtgtatcagcagacagacagaaagaaagttaaaatcagatccccaaaaaagaagtcaagatcagatcccaaagttacctttccctcactgtccttcggtatggtattaggaatcaaataaactaaacatctcaattccaggcctctttgggatcggggagaggcaccggcctggagagtcagagcctggagcgggccctacccgagggggacgcaggctgtgttcctcccaatgctgaggacagcactgatggccttcctcaggggtctctgacctggcagtgatggggagcacgtcccctgatgggtgtgggttagcgttatttaatcagcaggcaggcagggcttccccagtcgtgggatgcgtgtccgaggctgtgttctgacagtttgctgcacaatgaaccaagctgaaacccccttcaaagacgtcggcggaactgagtctcctttgtggagcccctcatttgcatgataaaccccggggacaaagtgtgttcttgttacttggactgtttcttggaaactgctgctacctggagcgagtgaacacagggcaagtattctcgcccacagcaacgtgtcattgaagctggaattttttccctctgccttatccagcacggcggctcctgctcctcctggagcacagtctgtggcccatggaggtttgctaagggatcggatcgcagttcccactctggacagctgtgagctctgtcctaagggatcggatcgcagttccccctctggacagctgtgggctctgtcctaagggatcggatcgcagttcccactctcgacagttgtgggctctgtcctaagggatcggatcgcagttccccctctggacagctgtgggctctgtcctaaggcatcggatcgcagttccccctctggacagctgtgggctctgtcctaaggcatcggatcgcagttcccactctcgacagttgtgggctctgtcctaaggcatcggattgcagttcccactgtggacagttgtggcctctgtcctttggctagggaaccatctctttcttttggggaaagaaaacatggactcacttaagagctcactccctctggggattttgctgtactcccattaaggatgccagccgtggccgtgaccgcagtgcccactcctcagctcggtggctgccacgtggccttgggagatagactctctcatcccatttcattgctccaggacctgagccccaaagagtcgggtgccctgtgagctgagaggccgaggcacagccaggtctgtgctgtctgccctctccactgcacagccccctcagcagagggacctggagactccccccaggtcaacattgcccaacagccttggtagcaaatggccccactgcacatccctgatgtgctcagggagaggagccgtcagcctccaggacgtctttctgcccatggcaccggaagaggttgccagccttttctgggggcccactatggccagaacacagacacccaaggacagcccctggaatctgcccagtcccctggcccggggaattcacccctggagctgaggccaacgtgtgaggtcgggcccctgcagcaaagcggaagcccctagagcaggtgcagaaagtggctggaaggtatttggccaagtttcttcttgtagctgaagacaaggtgcaggcttttgactttcccgagtgttcagtgtggtggggaggaggcggccccaggggcagggagggcatggcagccctgcagggaggtgaccccggtgccttcccccacagcaggaacaggaggccagccccgatcgaaccacgctctacagcctgatgatgaagcccatccagaggttcccacagttcatcctcctgctccaggtaagtgcttcacggagacctcctcaagctagtcctctggctcgcccatgactcatttgaaaatggcgtctgttcctccactttggaatggctgcccctcgggcctcctcatctcctctctaggcagttacaggaggtggagggtagaggcaggtggagacctgcggagagtcaccctacgccgggggcagctgtagggcccagtgcctgcgaggccagccttgggggacagaggggatgggctgcggggaggggtgttgtgggccctggcctgcctcacgtgctctcacagggccccagcactggggggccgcggggcttggttatcagtggcccacaggtcacagctcccttctccagtgtgtctgtgtctggtctaggatcacatgaaaaatgattctcgcctctgtgcccagaggggatggacaagcttggaaagctaagaatagatttaaacaaaacatacccatcactgatttaacagcaaatcaccgaggacagggagatgctgcgatggtgaaaacactgtccactggaccctcatttctctaaactaaggattctcaattggatacctgtggctgtgaacagtaggcctgttctgagtgctgacgtgacgtctcacagcggacggcctctaggtcacgtctgatgcagtgtgtggttgcccgctcgttttccgaccttcccacataacctggagcccaggtgaccctgtaggctgcggggctcagcacccattttatttaaatgaatgccatgcctccagggaggatatttcaaaggagagtctatgctggtttctgcctgtgttgatttttcaatgattgctcagcttgctttttctaattaaatcagaggactttgcttggactgcctgcttattagagccgattaagatgaactggtggagtcatcgccagaaatgaactggcgcctgggaaatagtgtgaagtccccttccattgaggttatttttatttttgaccaaccaaatccatggcacattctttttaaataaatgtagtcatcaaagtatgaaaaaggatacatactaaaatatcgacatgggctctttccatggttaggttgatggctcatgttaattttatcctctggcttatatttttaacaatgtgcagtttgcctgtattacagcattaataacaaaagctgttttttcccaagatcaaaatattcaaagtgtgttttatttctttagctgacaaatatgtactgagttctaatacgtgcgagacgctgttggcttccggcaagcagccacagacgtgatgaatgagcttcctcgtgtgagggagtctggcgcttgggaggaagggggtcaggccgcctgttagacattagttattcagccacagctgggagagtgtcaccaggctgtgaaccatacgggcgggtgaaccagcccacatgccctgtgtttagcgatgcgccagtgagtccctgggtcgttcttggtcgccagggacgacagcaagtgctgactgtgttgtgaggtcacacacgttgttggctttctatgatttatcagaatactttctaaattttttaaatttattaaatttggatataattttcaaacaagcttgttaggttttggttaaatgtaagtaagtaactacaagtaagtaagtaagtaactatttttgcctaggttttttccgaaatacattcttttagacagaaggggtgggcgggctgctggaaacggaacaggacagagaaccgcagggaaaagcctctaccgggattttgaggagcccgagcagctcccacgtttccatccaccttcagccgtcctggggaggtcgttgtcccttttttatgcgctaggaaactgagttacgctctaggaaactgaggtttagggaagctgatgattctcccatggtgacacagcccgacagatgtgctgggattctaacacagttgtctagccacaaatctagtacactgtccacaccccaaaaggatgccagccaggactttgggaaaagcagcagatggaacactgcagacgtgcgctgtcggacgggcatggcctgcctgttacacactgcgccgtttacaaatctgttcttgtaagaattttgtacacttttcttttttgaaaacatacttctaaatatttaagttctctgaggaaggacattcttaaactcagaattccagttatgtaataaactcaagaacttgggtgtcaaaagacttgcacttagaaagattcagtgtgctcttccagatcgtcaccagcagagttacgtaggtcagtttgcacacagctctccccgtcctcctccctccttgcctcgagagaccctctttagaatttccgacacagggtctgttgcccctgaaggagaaaatggtctttgccttgatctgacaaaacaaactgcagatcctagatgtgccgagcagtttccctcagggacactttttgcccacatttgatgaaacgctggcgtatcctagagtgttctcggaggggagcagggtgggtccacgtactttggaagaggcagagttggaaacaaggtggtgtctgtgtctggagtcattgtgtggatgtgcctgaggggccctacctcaggtgtgggtactcagggcacccgggatggggcgaggagacaggctgcagagagtcagcaggtacaagcacataccctccctcctgccttctgccgtagtccgtgtgctgagtgtaggtggatggggagacagtgtggagaggcctggacaccctctgtccccttcctcccagtgactctcctggtctctgctctccggtcttgcctgcgttcttcctggttagtgttcccagaccttctttctaagacaggtgctgtgaagccacagctgtcccctggctcaggcagtgaaaccggctcaccctggctatgctggtactgtcagtttctcccatggatccagaaacatccattggccctgtgacatttgtctttatcccagctacctatttctctccgttgttgtgcaaagataagtaacaatttctgataataacagcagcgagaaacttcacttttctccttccctgagcctccttgggtggctgccagcccggcggatgcccccggctgtgctcagtggccccacggcatgtcggactccaccctgtgctggctgctgtctccatcgcacgcctggtccccggtgccaccaccagtgtgtgggtttggtgcagaactagtgttaagattgttcttttttgccttgatagaattcgttgtgactcataggaaaacaaatgtatagaatagtttatattcattacaaactggaaacatttaatcatttatgcaatgtcctttccagattttaaaaaaaggtttaaaaagataagcacgctgttgaattccatgactactaatattcctataaacatgtcaaagatggtaggcaagacgcagaaccacattttttttttctcactctaagttctgggatatgtgtgcagaatgtgcaggtttgttccataggtatacctgtgccatggtgggctgctgcacctagcaacccgtcatctaggttttaagccccgcgtgcattaggtatttgtcttaatgctctccctcccctcaccccccgccccgcaacaggccacggtgtgtgatgcgcccctccctgtgtccatgtgatctcattgcagaaccacatttaattctgagaaagagtgtttcaagttcacgtttgccccttcagcaaacgtcagcgtgtcgaatgtgaacgaaagctgggaaacaaaaggccctgcataaaaccaaggtgacagaaatgtccttttgttactgcctgttaacgtttatcctgtgattggcagcagtgcgtcattttttgctggctgttgttgttgatttgtgccacataccctccctttgacctcctcgtgcttgtctgaaaccttaactgggagaagaggtagctcaactccctttttttaaagactactttttaagagaaattttagggtcgcagcaaaattgagcggaaagtacagaggtttcccatctacccctcccctaacatgcatagccccctccccccacatctccaccagagtgcatttgtgacaaccaggagcctgcgtggccacgcagccactgcccagcggccacagtcgcaggagggcgtacccttgtgctgtgcattcggtgggttcggatgaacgtttagtgacatggacccaccacgatagtgtcatgcatctttgccgccctaaaatcaggttcctttgtcactgtgagagagactcgatcctgctgtgtgagttgacaccatgggtgcagtattcggcaccacagtactcctgcacattggaaactgggagactggtgttttgaagaaagtagctggacccatctgtgcatgggttcatctgtctgactcaacttgagaaggagaatctatcatcatcgtgagcatcgttccaagtgcacagtatttctgagattgtgatatgttcatatttagcgtgtcctttattgtacagtgctattttttcaattttgtttttgcaaaggaagctgttcagatgttcagccaagtcgtgactcactcagctcatcatcccttcccaagaactgactttatttttccccaggatggcagatgccactgcctcctttccattgtcagctggcgggtgacgcgactgttgttgcactgggagtgtccacgtggtaactgcccacctctcccctgttgcttgtaggacatgctgaagaacacctccaaaggccaccccgacaggctgcctcttcagatggccctgacagagctcgaaacactagcagagaagttaaatgaaagaaagagagatgctgatcaacgctgtgaagtgaagcaaatagccaaagccataaacgaaagatacctgaacaaggttgagagaggttttcttcaactctattccaaaattatttttgctttgtgctaataagctgtcgttgtccagcaatactaatcttttggatcgtttggagtaattcccttcgcccagagttcttaaccggggtggatggaggccttcgggagagtcacaccaatgtggaaattgtatgtaaaaccttaacagcctgtcttaacagcattttcttaggaaagagattcatacattcattagaccctcaaatggatccaggacctcccaaggggttaagagcaactcctttagcttacttttcctttcaaaataacggtatttaatttcagatagtaatagttaaagctgaaaatatttacaggctaggcacagtggctcacacctgtaagcccagcactttgggaggctgaggtgggaagatcgctggaacccaggagttcaagaccagcctgggcatgatagtgagaacccatatctaaaaaaagaaaaaaaaaatagctgggcacagtggcatgcacctatatagtctgagctacgtgggaggctgaggccagaggattgctcgagcctgggaggtccaggctgtggtgagctgttattgaggtgctgcactctagcctgggtgatggagcaaaaccctgtttcaaaaaaaaaaaaaattcacaaacattttttgtcttcacctatgcatgggctaagctgcattgagcgtgaaaagagatgcaggacccagaaggcggcagttcatttgccaggctacatttcagcttgatgcttacataactacttgtctgcagcagtactctgaatttatgtgggctttcccgtattcactgaaggccctggctcacagggagatggtaatttgtatgaactgtgttaagttattgcatctaatattcattattgctaaaaatcattattgctacaaatcattgttttgtcattaggagtagtttcttacgttacaatgacattcagtaatgtaactgtgcgaactttatggtaatacactttaagccacatattttccccatttctccaagtggtttatgtaggaacgtttataagcagcaaattgtattcagttatattcttgacatggttcatgttatttaaaatcatgctccctgtggcacttgaacctccgaatacacatggggcacggagcaagcccagaggcccaggaagaggggatgatgcttcgcactgaatgtcacccacatgcctcatcgttcccgtgcacttggcagggacattcagggaggcgggtgtctcgctggttgctcagagctgggcagcagcgtaggtttagaatcaaaagacagcacagaccaccggggctgaggactctgtttttcttgtgggctgagttgttataagtattggccgggtgcagtggctcacgcctgtaatcccagctctttgggaggccgaggtgggtggatcacgtgaggtcaggagttccggaccagcctaaccaacatgacaaaaccccgtctctactaaaaatacaaaaagaaacaaattagctgggtgtggtggtgcacacctgtggtcccagctactcgagaggctgaggcacgagaatcaattgaacccaggaggtggaggttgcagtgagttgagattgtgccgctgcactccagcctgggtaacagagcgaggcttggtctcagaacaaacaaacaaaaaaggtagtgtgacttctacatcgcataccattgtcttggttcatacaaagcgtctttctgaagaactgatggttttgctttggctcagtgaagtaaaatatggcctacctttaagaagttaagatagtcatttaactatgcttaattaggtttacttggggaaaagtaaaattacaaaacaattccttgcattcctcaccgttcctggttaatgtagtgtttaaatcgcgggagggccaactgcggtgaaagtctgtgaggaaggaggcggatgttcagcgcagtcacggggaacataggaacgatttccgtaaagcgctcagtttggaaaagtcaccctgagactccataccagacttctcctcatctttttcttttccgggtaaactgaactgtggtccctgggctgtgttttgaatgtccagcttctcagcagtggaagccgatacctcattcgatcagatgatatgatagaaacagtttacaacgacagaggagagattgttaaaaccaaagaacgccgagtcttcatgttaaatgatgtgttaatgtgtgccaccgtcagctcacggtaagtgcataaattctctatagtagtcctaccatcatcacatgttacctttgcctaagggcacatgcatgactttgttaattctgtcactcagactgaactggttttttgtgccaaagctctgtcctgtgactaagggaacccttataataagcaagcttatttttaaatagattcagtgtaagtcaccaagtcactgttagtagaagtacgtagaggtttatatactctttaaacagggctgatggcggaactagaaactcaattgaatttcttcataaccctcctaaatcaagagttctttttcttatggtttaaattctctctttacctgcttctctataaatatatttttgataaatgtttaaatataataaagttgggtatattcatatttattgtaaaccaagaaaatgagttattttcacttaaaatagttttacatcagaatcgttctccaatgcatggaatattgtagtgagatgaggatatgtgagaaactaaaaggtcttcaaatacaggtagatgataagggaactgatataaagttaactataacactcctggtgctgtagaaaataatgcaagcgaacgtggtgccaattcgtcatgtcttgcaagagtcaagtgttgaatcttccagagttttgagatccagttgctaaacatttggtagcttgaagtcatccacacgggaacatttacagcatggaatttgcccaacacgatgtgttaggagcctgtcctcccagtgagagccagctgttaaacgtttgccagcacaccactaaacatgccctatttttcatgcccgtcgcccccattttccagcggccagatatatctgcctgccctcctcaccttgccttagagacccaggcagcgagggtgtgcaggtcagcgctcaggagtcggactccttagtgtgaactgcacatccaccttctctgaactctgaaaattaccctctctgactttgcctcggactcctcatccgtgcaatagggttgatcataaaaataatgccagtggtacgctcttgcgggtctcttcagggatcaaggcgagaacgttcattaagctgctgcagggcacctggcacacggcactgcctgcgagggacaggttttcattgttgcttttcatcatcgtcagtgactttgtggcagctacaaaataagtccaaaaaatatgtgagtctttaatgacactccttcttgtaagagaaagaaccctgttcatttgactcataccccatggcttggccttcactgtggacgcctggcgacagccgcaggccacctgccttctgtgtgcagaagtgaagcccactgcaccctgcgttggagaggagctgacggagtgaggccgtgggaggtcgcagctggagaactccaggtgtgggctgctctagaggatgcttagaattgcgaggatgcagagtaaggtgtctccacccgtttccctggtgttatgaggtgcttcccatagtgtggagactaaaggtgtttatcacttaacagtatggcttccaagtttaactgtcccagaacccccctctccatgtaacacctggaaagttagttttcagtgaagtggccccactgtggctgaatccacccagctcctcacctgcaagttggcccacacgatgtgtcaagttggggacattaatgcttgttccacctgccctgggagacaagatcatagaagtgaaatgaccttgtaaacggcaaagtcctaagcaaatataatggtccttgttgagtcttttccgcattcatcactgatgtttgtctgacactgactgctgctccagaacccctcaggctgctgttggggagcgccaggacacacttgactcttgggcagttttaagtacgtttaaaattctcccgctgccagacgtggtgtactttaaagatgaattaaaatggatactttaaaagtaactcagctgtgcttactgctagaggattccttaaaataacgcccctgcctttcccacgatgccagggcttgaatttctttttttgcgaagtgcagtggtgagtcgcaattcctttcccatggacatgttgtcagtgtgagattttcagcgacagtgcccgaaggtgatgagatgagaatgcattttgtttcaaatagctcccaaggaccctttggtcggccctgtgaacattaagattctaaacctcctctgtagggatggagatttttacattcaaagaggaggaatcggaattttggtaagaactcatgggcatttctgtttttctaaattggaggcacagtctaattcacggaacacaacccatctttcctcttactgtgtctgaattgttcttcctcctttcccttcctgtatggactggatgtcctcatggagggcagagtgctctggtgtaagaaggaactggagagcttgggtgcagacgggctcccagccagtcaggtgctcagtccaatgcatagcacccggcattttggttatttctacccacactttgattttttttttttttttttttgagaaagagtctcgctctgtcacccaggctggagtgctgtggctcgatctcagctcgctgcaagctctgcctcccgggttcacgccattctcctgcctcagcctccctagtagctgggactacaggcacccaccaccacacccagctaattttttaaatatttttagtagagatggggtgtcactgtgttagccaggatggtctcaatctcctgaccttgtgatctgcctgccttggcctcccaaagtgctgggattacaggcgtgagccaccgcgcccggcccacactttgatttttaacggcaatatcttgaagaaaagcaaaacgtgatgatcactaagtgagaataatggttgattctggagggtgggatttcctggggctgcggggatgctggcgatgtcacagccttggccttggagtccgctacacagatgttggcgcaggtcgtttccactagactgtacatatgtgttttgtgtttcttcacgtatatgttctatttatgataaaagaagaaaataatctgtataagtcatagggttttttttcggttcaatttccgtatacttgataaatattttagtcatggagtgtaatggtatgatttgattctattaaagtggttacagtgtagccataaaagaataaagcagcaatttgagagttaactcttatgaaaccgccagagaatatctctatccacataggagacttttcctggtaatcgagcacctttgctcagagtcatcagcaagcaccgagctgcttcctgttaagcctttatggaaaacctcggagcttccgggagatccgtcccctgtgcggctcttccctgcactctctctcatccagttcgaggcctctttatggcagcgagtggggactcagtaagaaagtcagaagcacaattactattgtgagaaagtctgaagagttacaattcagcaacgggaagtttctcacttgaacatctgagggatgaacattaccataacgtgttcatgtaattattcgtaaaacaaggatcttttggtcgtttcagcccctctcatgacagccgtgtgatgagcagccagaggtacttgctgaagtggagcgttccactgggacatgtggacgccatcgagtacggcagcagcgcaggcacgggcgagcacagcaggcaccttgccgttcacccgccggagagcctggccgtggttgctaacgcgaaaccaagtaagtgatgctgtctctcacgttcgtgccgtggggccagggtaactctcacgttcatgctagccgtggggccagcgtaagctccaccatcagcaggttcagggtttaacatggcaagtctgcagaggtgatccagtctctagaatctgtatgctgtctgactaacatggccaagtcggctgctcatcactgacttgtcccacgtgcagctggggctccttcgggttcgggccgtgcacctggccagtcagaagtggattccgtcttcccggtccagtgagctcagttttgcgtttccagttaaccaaatcaggacttggcagtgctggtctcttgagtgtgtggagctggcgtgcaggaagtcatagagcttgaggcggtggtggttccagctcggctctttgctcacctgctcacactgctgggcagcgttgtgatgtctttactcagtttccccatggaggcagtgcttgtccatgaacttcccaaggtgaaaggagaggagtcagaatgctttggcaatgtcttagcattgcacatgatttatgattattattacctaacattgttcagactgcagattttaatcttagtgtaaaaatcattaccttctcttcattattaaaaaaaaaatccaaagaacgactggctaagttttattcactttttgggctctacccctgaattgtagaacaatttaaaaaacacgatgcatgggaactttcagttaacctttcataggttaaatatgcatgaatttttcagattattttgtttctgacatgttcagaagcaaggaaaccacgtgagaacgtttaaccttttctgattgaatttgcatattcacctggatttgcagaacatgatgtaaggagtattaggtctaattcgctttgggaccgcttttatttttctcattcccctgatgttaatagtcattctgtttggtaatctgcctagtaggctaattcgtcaagcatattattacaatttgtaatctcttaaatttctgactcttaaatcctcgtcctatttaaagtggtatgcgtctgtatcaaaccctctccacaaataactgaagtaccaaaacccagatttcccaaaagagctgttctggggggtggtatggagagcgagagggaggagccgggggagaggggacatggggacagagaaatcatttctgacatgattcattaacattttattcaagagcaaattggatgccttgttaaagatttttaaaaatccttttaaattatttggaaacattgattggcaatcaaatttatattgtggttttgtgaacaaaaacaccttcatgtattttataatgctagcaatcttagaatttattcataattaagatggccttattgtatttaaatagctaaaggtgactttgatccataaaatagtatgtattccatgcaatgttatattttcttattcatcttattatttatgatttatgctgagctaacttagattgattcagttagcaatgtgaaaaaagcataaagcagggtgattcaacccatttttaaaatactatgtggaggaaataacctggagtgagtttatcattgcatttgcaccctggatttaactatgagcttcctatcagccacagcaagaggagaaacactgagtatggacaagttctcattgtctattaaaaagaaatatgccacattggagagtaaatgtttttctttattctgaattcaaggaggtctttggtgttatatctccagttaaggggactttgaaacacacttgaaaacgtatatgattgtgttttgcatacctgcattgattttttttttatcacgtctctatggaaaagcacctagttaacctcagtgaaaccatttttccatgggacatctttttgcccaatgccttaaacagagagcttaaatgataaacttgttttgccatcaatagtgttttgttcttctagattaaaaaagaaacttttaaaacaaattatttaaaatgtgctaattctgtatgtgtctgaagatagaactcaagtcagaattctctggggcttttttccggcgtcaggtaagagcatggtgctgtcttgcatttacagagaaggtgaaagtgggcaccgtgcttggtgctgggactggcagggcttctatcccgacacgtctggattcatccagggtggaccgacagtctcttgttagcattgatcttgagtgggtctacgtggtatcacatccatcatgttgatcccatgagtgccacgctgcagccggtgaatgacgtcccttcactctgctcatctcagctcactccttaccgtttatgctgacaaaacccaggtacatccatgaaccacatctccatggggctgcctgtaatacctccctcagagttttcatcaaatggcttcaaattcactctcagtgtttgtttcttccggttctcttggtttgtcacttctaaattatatcgagaagctaagtcagaaattctcattctcagtcgatagtcataggacttctgctgcttgaatgactgttctaaaattcagtgttggaaatgttggtgtgttacttgatattgacagagtgtaggcagcactgcccagcaacctctgcttgcagagcgggcagcgtggtaaccacctgagaccagtgagcagctgcagcagggagctccctgtccctgcaaaagcgccgtgtcgattgtgtgtttgccgtgtggtgttagactcagcaggaagctcgctgtccccgcagaagcgccatgtggattgtgcgtttgccgtgcggtattagactcagcaggaagctcgccgtccctgcaaaggcgctgtgtggattgtgcatttgctgtgtggtgttagactcagtaggaagctcgccgtccctgcaaaagtgctgtgtggaatgtgcatttgctgtgtggtgttagactcagtagggagctcaccgtccctgcaaaagtgctgtgtggatcgtgtgggttgagtgtttgccgtgcagtgttagactcagtagggagctccccatccctgcaaaagcaccgtgtggattgtgggtttgctgtccgatgttagattcagcagggagctccctgtccctgcaaaagcgccatgtggatcgcgggtttgctctgtggtgttcgacatccggagttatgatgtggcactttcctctcttgcagaggctgcaggctggtgaccatgggtcccctggtccatggattggtttaagctcccaaactccctgatgctgttttgaaaaatgtcgtgtcccctatggatccatggattggtttaagctcccaaactccctgatgctattttgaaaaatgctgtgtagttttctggggtgattttaaaggttttgccagcctccccgattgggactggtggcggggaggaggaagatcgagcgtgagccgtcagttgctctggcctggtgcagcgtctttgttggtgcactccacccggccgctgttccttctcacgttgcgctccatcctgtctggcaggtggatttatgagaaagtaatgttcactgttgccattctgtgggggggtttcttcatgcaggatctttataacctcaattcattttcaacagatggactgtcaagcgctcctagttctcgaggtctggtactaagtaggagttgtgggggtgggtggggaggtggcgcatagccccacctttgggagcctttagaacgggaggagaggtgagatcagttgctctagccgggctctggccttcaagggtgtttcagaagaatggccactggagagctgttaccgcccatccttcccagggagaagttcttcgtgtgtgtgtgtgcacttttattcaactggtctcaagtcagtgtacaggtgaagttcttaaaatgtttagagaaatgtgagtacaacttgaatctacttgaaaggaaacactccttcagatgtgcaaatattcatcatttacttttgtaaaaatcagtcacattactttgtagttatttaatccttaaaaatgaatgaaggtaaaaagcatctgtgttcctcgctgtaaggtcaccttttaacggaacaggattggcctctgatgtttctggctttgcttgttattggaccagcatctacctggtccaataccagcgtcccgtccctgcactggcagcttgcctagaaggggccctgcagcttccagaaggccgctgcctccctgtgtgttctcagaactttgcagcaagaggggaagtccactcagaccgccctgctctggcccattccgctttctgtcccggaagcgtgtcctgagtgccaggagtgcttctgtacagttgagctggatatggcggttggtacaggaggatttgtaacaagacacagtcattatgaacaggtagctggaggagctgccagcaagcttgtaccgtgaggagggtgagagacagctcctgaaacctcagggtccctgctgagcatagagaggggaacttccaggcaaacgcggaaagggtcgtgggtgaggtcacagagttgagggagctcccagaaaacacagtacctcccccacaaaattcacacggttttaaaaaacaaagcaaaacactactagcaaagaaccagcaccaaggagggaggaaggcgggcgtgacttacagtctttaaatagaagtgagcccggccgaaggaagcttgaacagctgaatatacacctgactgatcctcctgaagtagaaggcagcaggagaagcggagctgtatttttaaaacgtgaaacggttcctcatgaggctcccctgagctgcatcctccagggatgtgtggccaagtggccgttctgtggaggcacggaggggtctgagcagcgcgtccagccacagccctgagggttctggacacagtgaccgatgtgggaccccaggagtgacgggttagccccgatttctctccctggcccctgcccgatgcactgcatggcctcgcctgtaggcagggacagtgcctggtctccaacgtgtcctctccagagtaaggtacttctgggcggcaagggtcactgttcttgctccttatgcctgtaagagtgaacttcgttttgaaggtgagaggacaggcacagcggaagcccaccatggcaaagctgtcgtgttttgaaatacacagcagtcgaaatgaaggaaacagaacaaaatgcctctgtgctccattgctgtgggaagggctgcttctgcgtcatctgaacgttgtactgtaaaacagcacgtgtgtgtgtgtgggagatgaggccaggactcggcgctggttttcctgtatggcgtgtggatttgcaggtccttcccacgactcaaaagtgtcattataacccttgaacgagtactgagagcaaacacaccacctggccaaaggtagcagggaggttggctttccacactgaataccgtggatagtccggaaacagtcttcagtagctttcctgcaatgcgacactgaggtcggcgtgcctgtggaatgtgacaccaacagatgagcccctcactgggggagcggatgcagctgctcattactgtgaagctgctgacctcctgccaccactctctgtgtcctgtgcccctgtgtgctcatgcggcgtgttcagtgcagatgaacggcctcccttcgtacagacaacatctgtatgctgagaaaggccttcaaacatacatagggagtaaaaccacaaagagctctcagagaggatgggcgctgactccggatggaaggcagagtgaaaacagggtaggcgtgccatggcttttcagggatttttgatgaaaatggcatctgaagtgaatggagcaaaacagtcacatcacagattctgggcagtgggtaaaaatgtgtccatgagttattctacttttttacatttaaagagtatttcatactttcacaaaatgagagcccattaaggaagcccagagccagcctgggacttgggtccctgttagaatggctgttccaagcccatccccaggcccagcctctgtctgggggaggaaacgggggcagcatggcagatggacggaaagtgggaaagggtcttccagcatcacacgtgctttcaggacagtcccacagtggtggcgatgccacatgcgtggctctgttctccatgcaggtggctgccgccttctccgtcactgtgtctgtttatatctcccgttacctcagggacaaacactggtgtgaattttctgggtattcagtaacacacccttcaaactctctgtctttaggagctcaacaggaggcagggagaagtggttccatgcaaagagggatacccatattttctaaatatgacatgcacactagtccacgtgatctgctgatgccaaaatactcattctcattcctaacggcctgtatagctgacctgtgaacttagacgccgatgcatccctggagctatgactgtcagtcaagttgacattccagaaaccttctattcagggtcacggccctgtccaggacctgacagccagcgtctcaggaaagctatcatagctcctcagccatggggatgggccagatgagtgccatgcctgtgtgtcacatgccagtcattcccataagtctcgtggagaagactccctcaggaaagtgcagctggcacatgtccctaagtgtggacggccagcccacggaaaggtgcacacgcaggacggcctgtggacagggtcctctctctgtgtcctaagtgcagacggccagccacggaaaggtgcgcatgcaggagggcctgtggacggggtcctatctctgtgggaatcacacacgtgtgtcctactacacatggacacatacaagttaggtgttgagcaaattaatattatgttctgggtttttgaaccccatgaagctatagggatggttttacttgattaaatatctggaatttgagacatgacatgtatcttcgtgacagtgtgatgttcacgttataaaatgcttgggttttgttaaaaaccaaactggattttagtcacgggggagaattcttattgttcttctctgttcagtgctgtggtttcagctttgcacctgggagtctcctaggccttgcgctgggaggagctgccgtaacgtgtccagaaccacataggatttattttgcctgaatatagctgggatcactactggttcataaccaagatttttctatactttccatgttagaaaactacttgcttatagagaaattcaatttgtgcctcttatcagactagggacttatatatgatgctgtttaaaaattaccctctttctcctgggaattaattcttgttctctgttgaaaacactaaaacgtttaaagacagtaagaatgacctgtaattcttgtatctggagactgtattaacacatgagtgatttctctccagccttttcctcacaccattgtccgtataccacagttctctatgtgatcctgtatagggaattttcatttaatattataggctgaccattttctcagtctttaaaaattctgaatcgaagtcatttaaactgactacaggacgttcctcgtgattgaaactgagtttattgcatactgcaagcttcttcagttactagaccactacgaacagtgacgtggagacatccttacacattagtctgataatttccttagaagtggaattttcaggtcaaagagtagaacatttgtatcctcttttagactcctgatgcatgtttgcaagttgctttccaggaagttttccccagtttccatttctactggctatgtctgactttgatgacacaatgaaacttttatgatttgatttgtgaaaaacagttttgtacatttgccttaatttaagttaaaaatttttaacgccttctggctctgacgtctcggtctcacatcgtggaggagaggctttaagatgctgtgagggtgccccttgaacccaggcatggaggttctcagggaccgagcacacccccaggggcttttccagccgtccttgctattgatctggccacacaaacccttccttgtttgccgcacaaattctgtttcactgacagaccctgaattttcaaacagattgcagggatttccatggaaacaagagaagcgtccgtgagaaagactcgggaagtgcttttgcggaagtgcagcaattgtgtgtcactgcagcgacaaagaacttcgctcacagaactgaaaactctagaaactgtcagctagagggctggaagtcaactctaacaaaaattctgatttgcaggtgtttctttctttttcttttcttttcttttcttttttttgagatggagtctccctctgttgcccaggctggagtgcaatggcgtgatcttggctcactgcaacctccacctcctgggttcaggtgattctcctgcctcagcctctctgagtagctggaactactcagagtgtgtaccaccatgcctggctaattttttttttttttgtatttttagtagggatgaggtttcaccatgttggccaggctggtctcgaactcctgacctcaggtgatccacctaccttggcctcccaaagtgctgggattataggcgtgagccaccgcgcctgaactgcaggggtttctttaatcaattttggcctgaaaatcaacatgaaacagtttttctgaaactgagaatcacatttgaaaagcactggccgcactgtgtggtttcttgttattcttgggatgtgagtgcagacgctttctttggcagcgcacattgtccccattcatgaggaagcctcaggttgctctgtggtgtcatctgtgccctgaggtgccctattatgaactgtctgatgatccggcagacataaaacgtcagcacatttccatggtccgtaaggtcgaggaactcctcctcatctcagttcagaaggttctttaatacactagggaaagagtattctcccttcccatgataggttcacatttgatggctgtgtgtgtgtgtgtgtgtgtgtgtgtgtgtgtgtgtgtgttattttaaaaatgtttatgtttttagttgacaaataatcatatacatgtatggtttaaaacatgatgttttgaaatatgtatacattgtggaatggctaaatcaagctaagtagcttatgccttacttcacacacttaccatttgttcatggtgagaaccttaaagtctactcttagtgattttcaagtatacaataccttattaactacattagacgtcttgaacctattcctcccaatgaactgaaatctgtgcacctgtgaatccctgtgacctatcccacatgttctatgggtgatagagctgcctctgtgggtgatggagctgttctgtgggtgatagagctgttatgtggatgatggagctgctttgtgggtgatggagctattctgtaaagtgacggaggtgttctgtgagtgatggagttgttctgtcagtgatggagctgttctgtgggtgacggagctgttctgtgggtgatggagctgttctgtgggtgatggaggtgttctgtggatatggagctgttctgtgggtgatggagctgttctgtagagtgatagagctgttccaggggtgatggagctcttccgtgggtgatggagctgttctatgggtgatggagctgttccatgggtgatggagctgttccgtgggtgatggagctgttctctgggtgatggagctgttccgtgggtgatggagctgctccgtgggtgatggagctgttctgtcgagtgatggagctgttctgtgggtgatgagctgttctgtgggtgatgagttgttttatgggtaatggagctgttctgtcagtgatggagctgttctgtgggtgataaactgttctgtcaagtgatgaagctgttctctgggtgatggagctgttccatggatgatggagctgttccttgggtgatggagctgttccatgggtgatggagctgttccatgggtgatggagctgttctgtccagtgatggagctgttccgtgggtgatggagctattctgtgggtgataaactgttctgtcgagtgatggagctgttctatgggtgatgagctgttctgtggatgatggagctgttctgtgggtgataaactgttctgtcaagtgacagagctgttctgtgggtgatgagctgttctgtcagtgatggagctgttctatgggtgatgagctgttttgtgggtgatggagctgttctgtcagtgatggagctgttctgtgggtgataaactgttctgtcagtgatggagctgttctatgggtgatggagctgttctgtgggtgatggagctgttctgtgggtgatgagctgttctgtcagtgatggagctgtgctgtggatgatggagctgctctgtgggtgatgagctgttctgtcagtgatggagctgttctgtgggtgatggagctgttctatgggtgatggagctgttctatgggtgatggagctgttctgtgggtgatggagctgttctgtcagccctggagttctccctcaggcttactgcggagatgttcacgtgcatttatacatgtgtgaaaatatatagagccgcacaccaaaaatagaagggtcaatttgattggatggtaattgtgaagatcatattttaaaagaagtcaactaattaataaagttaacattgcacttataattttatttactcatttatttattaattttgatacaaggccttgtttggatgcccaggctggagtgcagtggcacaattatagctcactgcagccttgacttccttggctcgagcgatcttcctacttcagcctcccaagtatttgggactacaggcgcgcaccacaatgcctggctaattttttttttaaactcttatgtttttggtttttaaaactatgttgcccaggctggtcttgaattcttggcctttagcagtcctctcaccttgtgctcccaaagtgctgacattataggcatcagttaccacaaccagcctatacttgtgttacaaggttgtgtttatagagtttatcatcaaagtttgcgaatgaaagcaaatatgtgtgttatgaaacattttaaattataagcattctgtaaggataaataaagttgcgatgtgtaactactggatcagtttgctctttcgtttttttttgtttgtttgttttgatggagtttagctcttgttgcccaggctggagtgcaatggcatgatcttggctcaccatgacctcctccgccttccagcttcaagcaattctcctgcctcagcctcccgagtaggtgggattacagcatgcaccatcatgcccagctaattttgtatttttagtagagacggggtttctccatgttgatcaggctggcctcgaactctcgacctcaggtgatcctcctgccttggtctcccaaagcactgggattacaggagtgagccactatgcctggccgctccctttgttacgaaacttcatgatacttcaaatgcagttagtaattgcatttgtctagatagttgatacaaatcaggcttaccatgttcataaataccatgtaatcatgtcttcaacataaagtgcctgcaaaattataaatggttatgctactcctcagttatatagtaaatatttttagatacctatatctgaaatctttttattggaaatatgtaggttctttcagttttgacatatatatgtattatatctgttatatacactaaaagaacaagctgcataatttgtgggacgtagcatagaaggaaaatgcagagtcctttcctcaaaattattaagaatttcaggatgtccaggccaggcacggtggctcacgcctctaatcccagcacttgggaggccgaggcgggtggatcacctgaggtcaggagttcgagaccagccttgccaacatggtgaaccctctactaaacctctactaaaaatacacaaattagctgggcatggtggcaggtgactgtagtcccagcttattcgggaggctgaggcaggagaatcgtttgaacccgggaggcagaggttgcagtgagctgagatcgtgccatcgcactgcagcctgggggacaagagcgacacttcgtctcaaaaaaaaaagaaaaaagaaaaaacagaatttcaggaggtccacatccgagcctgagaccaagttctgggccctgtaagctcaggtccgtgcgattctacagacccatggccgggaagcctgtcctgctgaaacacaaggcactttactcaacttaaatgaatttcttctccttgggtttgaattttggctccttctcttactggttttttgaccttagacaatttatttctatgagaagtggaaaagaaggagcgtattactgcatattgcttaaagtacagacactcaggctaattctgagatcaaatccttctcatctgtcatcagtcagatggggagatgggggaatctgtcctctgagcctgtgggcccgtcgtgggatttagtgaggaagtatttgaacattacttcctgtagtacacaggaagccctctgtgaggggtagagcaattctcacttgggcaaatagaccccgggacacgcgtccttcctctaacccaagtcatcgaagacaaaccatttctattcccttaaaaaaaaaaaaaaactttaggaaagatcattggggaactcattttcatggtagatgaccccagttattggaaatgtggttcagattaaatgtcatttctaagtgcctcttactaatagctgttatgtcaacggtgtctaaaaaatacaaaagggacaaaacatgaatcaaactcaaattgtgagacattctttaactcaccagcatcctccaaaaatgtcagggtcgcgaaagaggaagattgagaaactcccccagactggaggagatttcagggacgtgaccaccgaacgcagtgcgagtccctgggctgaatccgggactaggaaatgacattcatgtgaaagcggtgaggtttgaagacggtctgtaggtcagtcaggagtgccgtgtcattgtggtgtcccggatttgacggtcatgatacgcttgcgtcagatgttatcctctgaggaagccaggcctgggcattcaggaggcagctctttgcaacttttccatctaaaattatttccaaataagtgttagaaaaggaaaaaccactaaatgcttgaaaatgtccactttttaaaagttctagattcacccctcaacttaaaaattatttagtatttgagtcttttcttccctcaagtattggagtaaatatggctttacctttgtattctttttttttctttttgcttattttgtagacaaagtttacatggggccaggacaactgtatcaagatttacaaaacttgttgcatgacttaaatgtaattggccaaatcactcagctgataggaaaccttaaaggaaactatcaggtaacaattgaagcaattggatttaagattctgcctttacttataagtcattgtaagtatgtgattatatctccaagttctaccagaagtgagaattcattttgactttaaaaattaatctgaatgtacattttctcttacgttagataaggtgagactatttaatggtaacttttcttcattttgcaaatagggtttaatatcagttctatcttagaaatgtctcagccccccacagtgtgatctgactcccaaagctttctttttcataatctaatagtttcatttggtctgaatttctcatattaaaattgtgtctttttatcttccttgggatggccctagtttttaaacacttttgaaatgtgcgtatttatttcctttgtagaacttaaaccagtcagtagcccatgactggacatcaggtttacaaaggcttattttgaagaaagaagatgaaatcagagctgcggactgctgcagaattcagttacagcttcccgggaagcaggacaagttagtagtagctttaaaacgaaaccttcttggccaatgctggggagaaaatggttctttgtcatgacatgtatgttttttggtttgctgattctatcagacaggcaaaatgtgtaatttaacctcacaggatgcagcacgttttataaaatgaatgcttgtctgttgtttctggcagatctgggcgaccgacgttctttacagctgtgttcaatacgttcacccctgccatcaaggagtcctgggtcaacagcttacagatggccaagctcgccctaggtaaggcctggctggctgaggctgaatgaggcatgcggcgtgatgatgaattcctgcccacgagggtgaggtcagggttgagaaggaaactcagcagtagatccatgcattgacctgaaagagtgtttctaaacaggaaaattcaccctggcaccggcgattttttagatgttcatattaaaatagagggatcgcatattaaaatggaggggttaaaacggatggtgtttctggtaccagaacatgaatatcagttgaggcagctgaacacagaggaagcccgtggagcctggccgtgagccaggtgctcaaggcgggcggcgggcggcggccttcaaatggcaggggggtcattgttcctcttggcccttctgctcacccctcactgagaagcaaaacacagggctgggctggggggttactaaagatcctcccagcaccaaagatcaaccctatggttttactgtagatggatgtgactttatgatttccttgttcctatgtctcttcagccttgattattttttgctctgtgtgtgtgtgtaatgtacttatacacatgcttacagacctgttacccagaacacactgggatgtcatgtgtgtgtaaaattttccttctgctgtagataatctgaaatgttaacggagtataaaatacagaagagaaatgcagagcgtgggtaacgccattgccccggggagctctgattagtggaagggctttgtcccggacgggaaagccgtcctgactttgtgctcacttgatgaggaagcagaaacacagcccctctctctcttgctgaataatttggtcatttttcaggtcaggttcagagtgacttagcaaacaaggaagtggccactctctaaagagaatgagctgaacgtgcagataagccccctttcgtcttcagatcagctatatattctttaatgctcaggttgacagtttgctttgggagtaaaatatttctccattttgttgtacttttgtttatcccatagcattataccatgttttaaagtttctcagtacatctctggtatttgaatctaaacatttcttttgctttggaaaaactggagaaagataaagggaagtggacctatgtggtttatacagcgacgtttggcagcctttgggtccagcgtattcaggaggcgcaaacagggagaggtccctgccacttagatggggccaggctgccttctaaaataatgccacgaatatacagcctatgctgtaagaagagattgtactgctttccacaagtaaaacatggcgttgtctggccctgtacaaacagaatgccagaaacttcccctgctatgacctgtggagctgcaggtctttgcatgtgagttaactgcattcttgctcatttctctctgaatataattgcagaagaggagaaccacatgggctggttctgtgtggaagacgatgggaatcacattaaaaaggagaagcatcctctcctcgtcggacacatgcccgtgatggtggccaagcagcaggagttcaaggtgaagggaggcagggcccgcggcccggggtgggacgcacctcgcagctctgaatgggccacttgggagatgattcttaaggggcgtggtcagaacatggtcctcccaggttcaccacagtgaccgcttctctagaggtcatttatctggaaataagactgctgttgattgaaacctaaaaaaacgcccagccattgtctctgaagcccagtcctgggccaggaccctggggtattccagcagtgccacagcacctgaggccttgttagttaaagaggggacacgtgtttcacatttgtagctctgttttgcctttgcttggcaagcagtctgtttccacagtggatcgtaactccaggtctcctgtctgcttgaggtaccgtgcccgctctttgccttggcagactccatctccagggtggcgtcttattaatgttcccagtgttgctgactcaggcatcacaggccagggccttcagtgacgctgacaatgtcttattctttaagaaataaagatgtttcttctcaccctgctctctggccagggtttcccagcagctcccctgacccctcctgttgagagttgcaggcggtgcacaggactcctctgggagaggctggggtgggacagggaaggggagaggcacaggccatcacaggctgtacttgatgcctgcagggccagccctcccatctgaagcgccctgagctgccggatttcagtgtgctgatgggatctaaagattaagataccaaaggttgaatctccttaggtgttcacttctaaaaagctaacttctgagagttgtacttttaaactttcatcctccctattttaatctttggtaggtaatgaacctgtaatttctgtgtttatacattggaagtaagtcatccatttaagacgttatgtagtctaggagcctcttagctctgttttatatgtgagcgtttgattttattccattttagattgaatgtgctgcttataaccctgaaccttacctaaataatgaaagccagccagattcattttccacggcacatggtttcctgtgggtaagatgtgtttatttggttttggtacaagttcacagagaatcaacgttcatggtcggtgtgatgagagactgagatgtgaattgctcagtagagagttggcggtggcgtatcccagagtgtacttagaaacatgaaaacttctttgaaagggagctgatcacttttggaaaagatttacagttcttaggaatgcaaatatttgtttcttttccttttcatctaaaacatttaccagataaagttgagtccagagacaactaactaataagagaataattttaatatgtttttccattttggtgtcaacattgcatggattttttttcttgttccaagactggctttttccagtggaaacttagcagttaaaattaatttgttccaaatgaaatattgcatctgaaattaggctggaattgcagtagacgttcctggttcttgcaaaccagaggacattcttgaagctgtgtggtcccaggctctcccctctctggtttcctgtgttccctccctgcagcctcagactcgccctccagggctccactgtgcttttccaaactctcatcctttcctcccaggcgtcctgtgcagcacgccactgcctctcacttctcacatccacagctcctgcttggtcagtgttcctagttgagtgtcagaaattgaacaacccaattagctggtatttcatttgtaccaacctatgaatggaggagtagccttaattcccttgggggcttccacttctaagagaactgttttccgtccaggtaggcagacctgtcatggctgaagcttcatcacctggcctggtcatagcccccaggccctgtaggcaggacaggggcttggcagattggcatccttcccacaaaagcatgaaagtaggatgtctgtatgtagcgacaacaaatacaagaataaggagagtttaacaacattctcaaagttggtggaaaagaaaaagaatcaatgaaaacatcaccctaaaccagctagtgctttctgtttacagggatcagaccccttcccacttaaaaaaaaaaagacaaataaatttaagtttaaattgggaaactaactgtgctatgtgttctcgttgtagagattcaaacacacaggaagttcatgtacactgttgcagcaatgctactttagaaattccacggcaggcgtggtggctcatgcctgtaatcccagcactttgggaggccgaggcgggtggatcacaaggtcaggagtttgagaccagcctggccaaacatagtgaaaccccgtctgtactttcacatagtgaaaccccatctctactaagaatgcaaaaattagccggatgtggtggcacgagcctaaagtcccagtttctcaggaggctgaggtggcagaatcgcttgaacccaggaggcagaggttgcagtgagccaagatcatgccattgcactccagcctgggtgacagagtgagactgtctccaaaaaaaagaaaaaaaaagaaattccacagcataccacatgttgacttccaatgagctacttgggatgcattcttactgatgtttttcctatttgaaaggtttattttcttagcctaggtcattgaatattagtgttaagttattaaaattgataataatctgcttcttaggattttaaattgaggatagatgggcccttaccttcatattgtgatgagtacgtgatttttaaagtatagaaatgtgactttgtagaaatgaaagttacgcttttgctttaaaattttttgaaaactgaattaaatgtgttgaaaagaaaaaggggctctgtgagcaattgtttaagaatttttttttatttttttaagtgtgttgattctcacatgaaaatcgaagcttgtcgtggcctttaagggtcaggttccagcgtattatggaagccgccacatggtcgttttcttctttcctcctaattctctgattcagatcggaagttgcacccatcaaatgggtcagattgccatcgtctcgtttcaaaattccactcccaaagtcattgagtgcttcaacgtggaatctcgcatcctgtgcatgctgtacgttcccgtcgaggagaagcgcagagagcctggggcacccccggaccccgagaccccggccgtgagagcttctgatgtccccacgatctgtgtagggacggaggagggaaggtagggcatgctcactgcgttacagagaattagcaagctctgcccatggagggcgtggtggggagcctgtcctggaaagagtccttgactttgactcaggagtagcccgtgcaggaattaggggataccaggggaaatttttagggtcattgcactttgaaataactagtgaattgggcccatggaaattattctaggaaactcttaaagagaagtggtatttctttaaaggggacagtttggctgtttgccactgaaatgtctcatttatattaatggttttgaaaaggacattccccccttatattttggaataaaacagccatattctatgtcatgatcatactgaattgctgacaccatttaaaggagagttaaaatgattttcctgatgtgaagttccaagatacacagtaggaagaactaagttttttcatatatcccagaatttcccttttaaaaataaagaaatcaaggtggttgcaaattttttaaaagtactggcaagtgtccctaggaatggagaaggaagggcaagagggaagagttgaaatgtttgtgtttatgttaacaggcaccctcgttcttgttacaacgagcaaatatatttattagcttgtatttttctcttaaagcatttccatttataaaagcagtcaaggctccaagaaagtgagacttcagcactttttcactcctgagaagtccacagtcatgagcctggcttgcacgtctcagagcctgtacgctggcctggtcaacggggcagtcgccagctacgccagagccccaggtgaggcgggtctcacggcctcctggccggtccttggggttcactcaggggactgtgcatccggtttagcctccccacctccccaccggcctcctgcctcccgcccctgtgcctccgcccctgcgctcgtcacccttgcccaaggcccgggtgccttgcttcttccccaaaaggtgtttgttgaatatacagacatctttcagaagtcagtctgcccgtctcctcccaccctcccacttctctcggcctgcctgtttctccccctcggatgggggcaccgggccatgcagagcctccttcagcatgtcctgcgctgaccagctgagcagcctgcccgcccggcggggcctcctgtacctgggccagccctctttgccccggtgctgtgccctcggtcccgtgccctcggtccctgctgttctcttggccacagggctaaggactccattgtgttctgctgggtgccttagacgaggccctccctggcccatcccgcctggtccccgcagccgctgggggtgggcagctgctgtgtgtctgttctctctccagcccctgccgcgttggtggcagctgtgctttgcaggctcttcctgtggatctggccgccgctgcttgtgggagctctgggtacggggctttccttccagcttccttggtgctggctgaggctgctctcctggcccctcactcagctctgagcgcaggggtgccgagccccagctggatcccagccagtctcggtgctgccatcctggagtggaacacgcagggcttccctcaccgaaagttgccctgcaccaccctccccacggccgggagcgacgccttggcgggtcctgttatctttcccaggccatccaccacttgttcttgtaccccgagaccatgtcccagctcactcccccatcatcaccaccctggtccacaccgcccagctcccgcctggatggcagcgtagcctcgccttcattcttccgcttctactgattcattctccaaatatttgttattgagctttttaaactgtaaataaggtttttaccctccccgcccccccgctgaaaattgtgtggtgagtccccagtgtacttagaatagaattccagtcctccagtccttgttccttgctcacaaggcattctgccctccaaccacccccgttctctctgctctgagtgctgctattggagttcctccctccttagaaatctgcgccagcccctcccagagcctggggtgttatttgcccccggactttgacacctcctccttggggaggctctctcgacctgctccacggggacggcccctccttctcccgtgtggttccggcctggcctgtgcgcacctgcgccaagaaggcctggacttctttctcactccggtaggtggagtaagcacaggagccgctcctgtctcgtccctcagccatctggagtgtgaccctgctgatccctggccgatccctggctccttggcgggcctctggttgcctccctctcatccggtgggtgccccggcctggattccggtctgcaccccctcttcacttggcctcatgatttcagttctccatggacggttttgtgtcttcggggttgggctctcccattccagtcctgctttgtcattcacctgttgtcataacctctgccagcctccttggccggctttcccgtcctgtctctgctccacggtaggcggaggcccctccgcatgtgcgccgagagccgcctccctgctgcctgtgttcctaccactctgcactcaactctttcatgaagcttcgtggaggaatgtgtgttgataggactttttcatataatctggatttttttctgtttttctaatttctattaaatgcaatagaaataacatttctattacgtaaaatgtattttatgcttatgtcccccttttttcccctgggtttactagcgagcatctctccagcctcttacttggctgcattgctgtcctgtccactgtggagccccgtgcagggctgtgttttcgccttgtcagacgcgttgcatgatctgtaactgagatctgctgaacgtgtctcttcgcatctttctcaccaagagctgtccggcgtaccgtgtgggagcgtgcgaggcggcctgcgcagaagcgcatagcctgccacttcgttcttggtggtgagggacgtggctggctggaggcctcggcccgggcagagggagggggaggctgcttcctagcccctcactgttgccagagctctgagctttcaagggacttaaaaatgtgaaattctgtgggcaatttccagatttttaagtgttagttcaaaacgtcattagcgtgtgcctggttccggctgcgatgtgggcagcctgctgagggctctggcctgggacacatacacagggagaagtcatcccaagaaagacaagcccacactgcagaatgacccacccaggtgctcagagaacaaagttcagttgttggaagttaaaccttaaccgagggaaacgtctgaagtaggccatcgtgtcattgatctttgagttctcgtttcaaaggaatggtgctattggtaggacactgccaagccacacctgacagccaggatccaagcacagtgggcggtgcatagagagagctctgacctaggattcacaaccctgcgttcttgtgccactccatgcccttcagagtgtgtgaatgtcagagaaaattgtagctctgccctgagcccacatatttctggaggttgccgtgtgccgtgctttaaagggctatgagtaccagatgggaaggcccatgcacatgtgtgtatgcacaggagtgtgagggggtgtgcattgtgtgagcaggtgtgtatgcatgtatgcacatgtgtgtatgcacacgtgattgtgagggcgtatgtgtgtgcaggcgtgtgtgtgccttgagtgcacatgtgcagacgtgtgtgtccctgtgtgcatgtgacggcaggtgcacgtacttgtgggtgtgtgtgcacatgtgcatgcctgcatgtgtgtatgtgtgtgacatgtgcacgtgtgtgtgtgcatatggcatgtgcacgtgtgtgtgtgcgtgcatgtgtgttgtgcatgggtgcatgtgcatatttaatcacataatgatagactgggccctgtgcagatattacaaaggaaaagcaagcccatgttcactggggctaataattaccctacaacacttttagcctaattgcaacataaaagcatttccattaacgttgaattataactaaaagtatgccacagaagtcagagcttgcatagttgccttttagtgactgcacacctccacttcagacacttgttttgtattcaaaggttcagtgcttgaaatccagaacaaagagataagaactgaggccgtgttctcctgagtgaagtgtgtttatttgattaggaagtcgacggcattgatggattaataatttagttacacttttaaggtcgatgccttaattaatggttagactgagaattgaagaattcattttaattatttataggataattacattagtcactttagaagtttatggtaaatcttgcctcaaataatttttattggtattcaaggtagcaactcatacttgatataaagtgtgaaagaccttgtcagtagatctttggatatattttcaaaccagaatatttcacgactgtctaggcttcaagaaagggaacaaattcatcaaaagtaaggaattccttttacctcaattttgatttcttaaagtattctgtgaagatatggcctctcttcgtgatgcagtatagagcaaggcacatgttagaacggaagcagctaatggggaaatgtaacatctgcccagttattttggatgcagttccttttaatgatgactgaatcatcttctctgctattattgtaaatggtcgtattgactgaatacctgtgtgctgggtactgtgctgagctttgtacatgcattatttcatttttaacttttgatacaacctttgcggctagtggtaggatggtctcgatcttaccctgaaggaagctgagattcagggtgaatgagtggtttgtctgggacacacatggaggggataggcaggggggcgggtggggggtcttgagggctgcgtgtcccacagctgtctgtgcttcccgactgtgcaccatggcccaactggggtgggtgtcagcttgtcgatccccagacacagccaggatcaggcacaagcattaacattacaggtgatccttcgggtgtcagttacttaaaatgatgtatgaccccattttcccattcctgtgcacagaaaactgaacttgaatgaaatgaaatattttcttttaagatggatcctgggattcagaacctcaaaaagtgatcaagttaggcgtcctaccagttagaagtctactcatgatggaagacacgttgtgggcggcttccggaggtcaagtcttcatcatcagtgtggagactcatgctgtagaggtaagtcacttaggtggctacacggtgtggaaaaaatgcatttcagaaacagctcagctgacttctggtgccgaagtcaaggcttcttgcctgtggctaaatttccttctagccgggcacagtggctcatgcctgtaatgccaacactctgggaggccaaggttggaggactgtttgagctcaggagttccagatcagcctgggcaacaaagtgagatcctgtccctacaaaaaaattagctgggtagggcagtgcgcacctgtagtggatgtggtggttgcacaccggtagtcccaagtactcgggaggctgaggcaggagcatcacttgagcccaggaggtccaggcttcattgagccaagatctcgccactgcactccagcctgggtgacagaacaagaccctgtctccaaaaaaaaaaaaaaaaaaggaaagggaaagaaaattccttctagattttgcttagaaagacaagattagcaagaaaattcaactaaccattttttaaccatttacctgtgttcactggttatctgctaagtaaaagaaacattgctttaagaaatgtgttcagtatgaacctgtagagtcctccaggacttagggaaaatttgcatttgattgaggtgacatttcaattcagtgggctaaatggatcattcaccaaagaatcaggagacaagtgggcagccgtttggaaaacacggagctggctctcaaaccccagccctctcctcctctaaacactccagatggatgggactttcaccatgaagacgaaactataaacctctaagataaaaagcagtagaacagttttattactttgcaatggagaaagcctctccaagcatgccacaaacccagaagttaccataataaataaaatggtacaatttaataacttttttcacattgaaatatgtgtatcaaatatttatggaggaaaaattgggaaaaaaattcctgtatatatgactaagaattaatgttcttaaaatacaaagatttcttattaaactaagaaaaaggtaaccaacccaatagaagatgttcaaaggacatgaacaggcagctcacagaaaaagaaagaaataaacaataaactcatacacatataacttagcctccttagcaactaacattgcctattaaaacaaggtactgttttattaataaactttatttttagagcagttttaggttcactgcaaaattgaatgaaaagtgcggaattttccatgtacccctcctcccacacacgcacaccccccacaaccccccatcagccccgtcctggagtggtgcgtttgttacagtcagtgagcctgcatgggcctgtcatcattgcccagggtccacagtccctcatcactcagggtccactgggggcttactcttggtgccgtgcttctgtgggtttgggcaaatgtatctcagcattgtccaccactacagcatcgcgcagagtgggttcactgccctggaaatcctctgctctctgttcagccctccctcccccagtctcggcaaccactggtcttcagggtgccatttcttcagattgacagaaggtaaacactaagtacgacctggttggaacgtggggacacagggctctcaggaccgcggggtcttagggcagcccctccggagggcactcacctgttaccagttagcactggggctcataacgtcttcctggcaactccgcaccctagagaaatcctctctacagaggagcttgtgcacgcacatctaagggtatccattgcaaccttgttggtatcacaaacacttgggagtgtcctaaatgcatgtgcatgggaggagctggggaaatgagggcatctatgccccacagagcaggtgagctcaggcagcgggaggaggcccaaactctccttgtgggtgttcctaaatgcacgcccatgggggcacgtgcagggaagcaggctgcggaacactgtccgagctcactccgagggaggctgtggtgcctgatgagcccacccgtgtctgctgttagtggccgtgtgacgtgccagcgtgtgtgtgtgaagttggactgacattcctgaaatgatgaggaaaaggctacatacttcccctcacacctgcatttttcagccgtgtcatatgtggtgtttattatgaggttgcgctgtcttgttttttactgtctgttcttggccatctcttgaccccactgtccctaaacaaactgggataacacaggtgtgttttcacccaataaaatggaccaactcatcattaaaaattcctctgggccgggcacagcggctcacacctgtaattccagcacttttggagaccaagataggtggatcgcttgagctcaagagttcaagaccaggctgggcaacatggcaaaaccccatctctacaaaaaatatataagttagctgggcacggtagtgcatgcctgtaggatattcgggaggctgaagtgggaggatcacttgagcccacgaagctgaggctgcagtgagccaagatcgcactgctatactccagcctgggcaacagagtaagaccctgtctcaaaaaaaaaattcctttgaccctcacacaaaatgtcacaggaaagtgtcttcagttggggcaaggggtctaatttcatctctttgaagcctctgaagacgttctaatgactaaatctacacaaatccagaaagaaatgttatcattaagagcttctaaaaatacttctctagaccatcgttaggagggatgtatcagttccccaggttaggaactttaagacattttgctgacatttcatgaatcatatttgcacacactgacgagaccggtttcaggatgtgcctaggctgcatcctctgtcatctcagagggaaagtggctcctgagctgccacgtggacaccgctttggcttgcagcacagtgggatgcgggctaatgccgtcttcagccaggaaagggctctccggctggcccctggagacgtgggtttggttaggaatgcgaggtccacactggggcaaggtgcagatgggacctgggtcctgagcctcctggaggccgacgctctgccgtggatcatgaatagcattcccgcgtgagtctttttttgacacagcctccccgacgtccttcgagacctggtctgctagacaggaacagaaaatagctggacagggaggttggggtacatgttagatgatttttggcagtattgttcctgttacttttcatatccatctgacacttcttatttcacgtgccctgagaatgagaagccttcagtttcgtggggagccagggattagctagtgcggccatgcagggtagccccgtggatgcggtcacagcttcttgagtttttcacagcccttgtaccccatcagtacagccatcctagtaattgcgtatttacagagggagctcagccatatagtatacggtgatcttggatcagccgcctacctgggtctcaattgtctgagctgacagctgggggtaattcccctttctcaggctgcttgtaatttatatgctgtaaatctcgaagactcagagagaagcaatgtgtttggatccagatatagggctctttccttgcatttttagtaccaaaataactaaatacatttttagaaagaagcaaaaatctgctctctgaaaacatgatattcatcctgtcgttcccgttgtgcaggggaactgtggccaggggctggggcagcccacaggacctgagcccacaagattcgagccctgggtatgtgtccgccttgctgacagcgagggcagcagctgcggggggatccgtcccgaatggccatatgctgtcagaacagtgccggcctgggagctgcatgtgatctgggcttgggttgagcgggttgggagatgctagccatatttggaagaaaaaggcacctgaggctctgaggcttcggtgttcctggagtgactgtgccagtggaggagtcagcataccggtgggggtggctggccccgtcccagctctggcgccataacaaagcagcactgggcgaaccagtagagacgctgagccgggtgcttggtgcagcacccccaacgtggcagggggcacccacctgtctgtcagggccgtcaggagcagatgggaagacatgccatggacgctgagctgccgcacggtgccagtcacagtcacctggatgctttaggggaggggaagtatctctttttctccaactgcaaatggccctttaccctgggtttgtccaattgctgtttaaatctcatagtgttaggaacacgatgcagtgctaagggatctgacgtctgacgtttaggaaaagggtgaatcattctggatttctggggggcgttgcctggacaggtttcttgcttagagccttgagtcacagctagtttcagtggaatgactacagctgcttaaagtgcaaaccttttcttcctcactcttgattttctgcaatatgcagtgctcttgactgaagacagatggaaggaaggaaagagaggaaaaaggtttctggccctcatcctccactgaagggaaaaacaatgaaataataaaataggcgagatattaaagatgacctaaatagtgcaacatagtgatttgctgcagcaatgcgttttttttctcataggaagttaattcttgtcattgtgtagaaagaaacacagggcaacaaaacaggcctaagcgggcacggtggctcacacttgtaatcccagccacttgggaggctgaggcaggaggactgcttgaggctaggagttcaaggccagcctgggcagcatagcgagaccctatatctaaacacagaaaataaaacaacaggcccaggtcagcagaagaggccagagatccccgaacactgtggaatctcagtccccagaaaatctgaacactgtggaatctcagtccccagaaacccccaaacactgtggaatcccagtccccagaaaccctgaacactgtggaatcccagtccccagaaacccccgaacactggaatcccagcccccagagacccccgaacactgttgaataccagtccccagaaaccctgaacactctggaataccagtccccagaaaccctgaacactgtggaatctcagtccccagacacccctgaacactgtggaatcccagtccccggagactcctgaacactgtggaatccatagcctgctttctttcagacaccttcagaatcacacaatttcaaggcaaacggagacttagagatcctgtggcccagtgttcttattttcgagaaccaaggcttagagaaaggagaagccatgcccaacatcagtgctaaggtaatacccatataatctgtcctccagaagaaacatagcaaacatttaccaagtacctagcactgtgcaaaaacagagcaaccacagatggttaagacattgatgacacaggcccggctctcagtcccaggatggctgggctgccagcgtgagtgagggtgctgtgggagttttgggggcaacactccctccaggcctcaggctggcacagtgagccgaaatccaggggcattgcatcccacggttactacgagtttcacgacggcagcagcaaagcgtcaagccaagcatgcgtccctgcaggcacagggccctcggcagctgcctagggatggtgcccatgtggctagctggtcgagggtgaggagggattcactaggagaaaaaccgggatgccacctcagagagggagagatgcatcaggcttcgagactactggtccccaaggggctgctggaagcagagggtgggtctgcgagcacagtaggggacaaggagcttaggtcctgtcactggctcagctcccggggactggggggaagcatgggcagtgcaggcatccccatgccgctgaaggtagccagcagcctttgacttgacttcttggagcacagttctgtgtagttttcttttaaacagcacttttgcagcagacggtgctgagccattgaagggttttcagcgtggaacagatgtcaaaatttgttttcagaagagtattttgccagcaacgtaacggggtgcgagacgcttggatactagaacaaaggaggttgcgctgggttaaaaactccatgggtttggtttttttaaatcatctttccagaagtttggattgtgattgtgaaagagtcaaaagcccgaggaaagaaagaagctttgctcctctatagtcacaccagagttctgtcatacgccacggttgtttgttttgctttttaaaatcctctctatggaagtcgccttcctctgccccaaacagttttccagggagtaatttctgctttattctgaactagctaaagaaaccagctatgatggagacttgtgtgtgaaacaggcagcaggtggccaacaaattagataatctagaagagatggacagactctagagtggcacaaactaccaaaactgaatcatgaagaaatagaaatagaacatttgaatagacctaaaagtagtaaggaaattgaatcagtaatcacaaacttctgaacaacaacaaaaagcccaggaccagatggcttcattggtgaattctaaccaaacatctttaaaaagaattaacagtactctttcccaaactctccaaaaatattgatgaggacggaacaacacttcctactcattctgcagtcagcatgaccccgataccaaagacatgacaagaaaaccacagaccggtatccactgtgagcacggatgcaaaaatcctcaacggaagacttgcaaattgaaatcaacagcgtactgaaaggattgtgtaccctggaaaaatgagatggattcctgaaatgcaaagatggttcaggacgtgaaaatcaatcagtggaatgcatcacattaacagaataatggggaaaaaacccacatgatcatctcaattgatgcacaaaaagtacttgacatgatttatcacccttttatgataaaaacaatcaaactaagactagaaggtgatttttcctcaacctgccaaaggacatctataaaacactcacagctaacatcatactttatggttaaagaagaaaagttttcccctgaagatcaagaacaagacaaagatgccttctgccatttttattcacagtagtaccggaggatctgccagagcaattagacaagggaaaaagagtggaggactcagatgaaaggaagaagtaaagttgcatttgcatatgatatcctcttgtatgtagaatattctgaggaattcacagcaaaactactagactaataaacaggttgagcaaggttacagggcacaagatcggtatacaaaaatcaattaaatttctatacactagcagcaaacaacctgaaaatgagacaagaaaacaacttcatttataatgctgtcagaaagaaaaatacttggagaaatttttaatcaaaaagtgcaagatttatactctaaaaactacaagacatcattcagagaaattaaagaatacctaaataaatgggaaggcatcctatgttcatagattggaagatgtactattgttaagaagaaaacagtccccaattggatctgcagattcaacataatccctatctaaatttctgctgcctttttttttttaaacaaaacttgacaagcacatcctgagattcatctggaaatgcaggggatccagaatagccaaaacaatctagaaaaagaacaaaattggaggcccacacttcctaatttcagattttaccacatagccacagtaagcaagacagcatggtgctggcacgggacagacacatacatcagtgacatagaccggagaccacgtgtgtctatgttcacataattttcaacacggtgccaaaactattccatttgaatgttgaatggcctcttcaacaggtgctgctggcacaacaggtgctgctggcacaacttcattcttccatgtgcagaagaatgaagttggacccctgcctcacaccacatacaaaattatctcaaatgaattaaaacataaatgtaaaagctaaaactataaacaccttaaaagaaattataggggtaaatcctcatgattttggactagacagtggtttcttagatctgacacctcaagcacaagcaaccaatgtggaaaaataagatacactgggcttcattaaagttaaaacctttttgcttcaaaggacactatcagcagggtgaaaagacaacccacagagtgggagaaaatacgtacagctcatgtgagaaggatctagtatgcagagcatctaactcactcttagatcttaataaaaagaaaagtaacgctattaaaggcaagggaactgaatggatatttctccaaagaagatgtacagtcgacccataggcacacgagaagatggtcagcatcgttgcttgttagggaatcatggagcgaaaccacagtgagacactgtgtcacacactaggatggcaggaataataatgttagtggagccagcacgcactgcagagtacgtgaggacgctgggagactcttgctggtgggaatgcagaatggtacaatttctgagaagacagtttgtgatttcttcagaaagtaactcgtggcatgaccaggtgacccagcatttccagtcgtaggtgtagattcagaagaacctgatactcatgcagacacgaattatcatagcagtgttatttatagtcaaaaagcggatgcagtccagacgcccaggaactggtgaatggacaaacagaatgtggttccttcatacatgaggattggtttcagccatagaaaggagtgaagccccaactcacgtcacgtggatgaacctggaaaatgccaaattcagtgaaagaagccagacacaaaaggccgaacattgtaggattttgtttatatgaaatgtcagaacaggcaaatccagagacagaacgtggatgggatgagtggttgtcaggggctggggaagggggcataagggtgataaaatgttctggaattcaagagtggttaaagttggcaacttcccgaatatactaaaaagcacagaattgcgccctatagaagggtgaacttcatgatatgtgaattatagctcagtgttttcaaaaggaggtggcagttttggaagtagctgagaagttagcagaagttagcctgaagcaatggctgcggggagcggcctgcctagcacaggcaggaggaggggaaccctacagcccagccggaaaggggcacaggcttttcttccttttctttttccctatttttctttttaatttgagtgagacttgtgcatgctttggggctcaatgacagaagccaggagagacagggccccattccaggaggagggcgaggagcaggggaggaaggagccagtgccgcgaggaggccagattcagggagctctgcaggttggaggtggagtgtcagggaagtgtgggcctgcacaccttctcctctgtgacgcaggaggccaagtcagagggaggagggatcaaaaacagacccacgctagaaccatctggaatccgaaccaagacttcccaactcccaggcagatgctctgtctcccacgccgcacagcccagatagtttagactgtgaagatcctgtgaagcttcagttcataaaaacacttgggatctttgtgtgtgagattcgtgttccgctggggagtaagagctggattatctgcctaggaaccaagtcacaagtcagtgatgcagactcctttgcaattgtgagcaccagttccttctcattgacaaatatttaaattcaacttgtgattattgaagaaattttctatgaggaaactacgggcatatggcgagaggtattacacggctgactctagaatgggcattttatgaggaaactacgggcatatggcgagaggcatttacacggctgactctagaatgggcattttagaggtggggctctcacttcacatcaggggacctggggggttccagtttgctccaggggggtggacagtcagatgtggagcccgctcaagacccacagtgatgggacttggggccgtgtgggccagcctccctgactgtgtcacctccctggggaccccagcctcccgcaccgtgtcacctccctggggaccccagcctcccgcaccgtgtcgcctccctcgggatcccagcttcccgcaccgtgctacctccctggggaccccagcctcctgcaccatgtcgcctccctggggaccccagcctcccgcaccgtgtcgcctccctcgggaccccagccctgcgtgcccagcctgaggacacagtcctctcctcagctctcaggccctgcagcgcccctgtgtaggctggagtcctctggcccctgtccctgatggaatctcaactgaaataagaggcgatgccatgggagaagggatctcccatccactgaagtcgcatccctgaattcctgcccgccgggttcactgggctctgggcgcggcgtagtgccgcaggatggggtttggtgccacggggcatgtgtgtggagtcagcagtctccaccatgggggctgtcgtcttttcccttattctcagattgtgggacaactcgtagggccaagatgtcagtctggttatttcctgtgggtttttatgagtttcatcactttactttagataactgtgcaggatcgtgagtttctttaatttcaagagctgtgaggctgctggttcctggggcacgcagtgtctctaagcttcatcccagccctcaccctctgtcaccccctccaatccctgatgggcaaggcgggggcagtcctcctgggactgatcccagagagcctgaactccaggcagcccctgaggccatgtgggggggtcgctgtgttagcagctcctgctggctgtggggtgacgagggcccaggcccaggcacccgtgggacccctcagagcaggccgctgggatgcactttcggagctgcggggctgcagctgagcctggaagctccagaaggaccaagttgcttggagaagcagaaggtgcctttccaggacagcagagctaagaggaggcacagactcagaaccagggtcaggctgcaggcaggcagtggggccccatgccatagcttggagacatcgaggaaggttccagcaggttctgatgggcctggggggatggatcctgtgcctcccctcgccagcctgcccatgtctcctttaggacacaagctcagtggcccctcggcaggcgcaccatgcctgtgtctttggaatggccattttctgggctcacaaaggagccaggatgattggaaaatggcaggcagttgggttgctggtgtttggttgctggagacgcctgtgatttggagcaaagcctgctactgtgttgcagccactgaatggcgctccagctggacgccacgtggacccaacaggccccactcagactcactccacggggctagcagacttgacctctcgatttcacagggtcagctggaggcccaccaggaggaaggcatggtgatctcccacatggccgtgtccggcgtcgggatctggattgccttcacctcagggtccacgctccgcctttttcacacggaaactctcaagcacctgcaggacatcaacatcgccacccctgttcacaacatgctgccaggtaaggggacgggacggggcccagggatgggacagcaaccggggacggacgtggggggtgcggagcgctgtcagcccaccttagcgcttcccagtgcaggacactgttcacaacatgctgccaggtaatggggtgggacaaggcccagggacagacgtgggagtacggagcatggtcagcccactttagcgcttcccggtgcagggcacaggtcctgaaggagccgcgtgctgggaggagccgcgtgctgggaggagccgcgtgctgggaggagccgcgtggcagtgccatctctgtaggtcagagtgggtgggagacgatttctcatcatcggtgcaacaaggccctggggaagccaggacctgaggctgaagaacacagaacaggaggcctccctttggctgggagggctgttggggagaggccaacagaggcctatgtttgtgaatgccctgttgctggtgggtgtcactgaagtttctgggcaggggagaaggccattacacattgagttttgggaggatcatcctacaacaggatggaggaaagaaatgaggagggggcccaaccggcttctttcacgggtagccggaggccgctgtggggtccgtggaagggctgttttgcttctttgcctgctggtgggtattggaagacatttgcagttttaaggggaaggcatgaagtaagggctctgcctccgagcccttcggctgctgtgacacacgccacagacgggctggcttacaagccagagaggctgcccctccgcgttctggaggcagcatgccggggagcacggtgcctgcagggccggtttctgggaggatctgcttcctgctttgcagttggtgccttctggctggggcctcatgtggtgaagaaagagccctggggtctcctccgcttcctataagggtgctaatcccatcatggggaccctatcctcatgagctcatctaaccctaatcacgtccccaaagccccgcctcctcgcaccatcccactgcgggcagggcttcaacatcgaaatctggggagacacaaacattcagtccatgacgggccatttatgatacgttgaaaaaaaccacaatgattaggggtctggttctagaacgggtgtgaggccgtcctttgacaaggggaggatgaggaggccgaggaggtgttgaggatgttcctcggggcctccgtgtccccgccgcactcccactggagatgggagggtgaatatattcggtgcacggtgggtccatgatagccgttcttttctcaggggctaactgtacaagtcattgttaaaatactacaggagatttctcttagtgagaaaaggaggtttatgtaacatgcaagtttatatttagagaaccaaaatggttaagtccctgtggctcagaaagcagacgctctgctgtggaccttgtgttttctttggagcactcactgctagagcaaatgtttgctgcaggaataggctgtccttgttgggacaaaaccaagtcacatccgtaattgccaaagcacgctctcacgcggcagtgagtgtccatgtgttcaaagttctgtacacaaggggaggtgaggagggtgttatgagaaaaacctctccactcgacctcccgtgggctccagcacccgagcctccaaatcctgccccagctgccctgcagcgcagacctccctccggggcgaagcagcccacggttaccctggttccagagttccgagagcagccacggaaatgcagcggccctgcaggatccttggtgtttatccctctccgggtgggatcagaaagaaactcctaatcaagggaaggctctggcaagtgtgagtggagtttgtattttgaatttgatttcttaataaaataacccttgcacacgatttaataaaacccaacagcactcacgcccaggctatgaaaagcaaagcaggataggaaagcctgcgctctggggactcacagccccgcccccatcccagcaccccacccactgtcagcacccaaccctgcccccatcctcacaccccaccccgcattcagcacccaccctctcatcccagcatcccacccactgtcagcacccgccccggccccccgcactgtccccataccccaccccgctgtcagctgcctctcccgcccgcctccctactgctgctgctcgaaagccactcctgtatggcaggttcttgatgttttgttttagatactgtctttgacctctcctgtagaagagaaagatggaattatcctgcttccctccaagcatagagcacccaacacagtcctgcacccacccagaaacagaatgcagaccccttgccggctgctcaggtcgcaggttctggctaaatcgcagctgcctgtgttgcgtgttttggatgatgaagttgtctgtggctgggcgctgagccttccttgggacttttcacccttcagctcatagtttccaggcggccgatgatggatccatcccaagcccaccacaagcctctcacttggcagcagatgcatggggctctgcagagccaccatcccctggcgcccactctcccgggcccctccaacatcctgggctggctctccatggccacagtgcgtgctctcagccccctgctccgggggcccctgaatcgtgggtctttacttattcctacacgacatagtcaggtctgcattttagacccgcatgaaagcaaacacatgagtctgtccagatggagtgccgtgcttctcgttggcaggtttctccggcatttcggtactaagttggaaatagctccagcttcactgatttctggggtacactgactgctttacccacattcagttctctgctcccaggctgtggtctgctgccaccgtggccttgtcagcaggagaaaggtacacgggttagaggcaacctcggtgacaccagaagttcagttttgtttgtgatgcttctgacagtgattctctgtaagatcctcagtgcggcatagactgaaatggttctgattttcattgcattttgtgactcagagggaatgagcaggccagagagtcctttcctccagagagtcctttcatctcatctcctctgtctagtcgtctttgcctttcagctaatatttcatatatttcatagaaataagcattattgcatttcatgctgtatttagacattccggtgggggcatgctcataccgtgctgaagtgcgcggatgctgaggtcgccgggccgtcactgctcctgggttcttctcctccttatcgtccaagatggttcctggaggcccacacatgtcctctgtgctctgttcgcacacacacaaaaccttcattctagagttgtattcatgacgatgctcaaatgggttttcatgtgtgtgtgtgtgtgtgtgtgtggcaacaagacataaaattatctttttgtgctattgctggaatataaaagtcaggtagcttctgcaaatgaagacttgccaagccgaaacaacaaaatttgaaaaaaacaaactgtattataactcatgccttttgtgtaagttcacacaacgtgatgaaacctccttccttcctcagggtctcagcacgctggcccctggggaatccgtgaatctgtagctaaggccctggcttttctccttctatttggaattcacttctgaaaaccatttagctcacgttctttcacataagctacatcagattcaacacagactaacagttgatgaaggtctgtgattaacatacacattcgttagagcggtcgttacctttctaagttataaaggagtagagtttacagcgagtgagttcacggcgcctcagcttttaggttgtgagcagttgcagtaggttacatcaccaggcagatgtttcctgctctgtcccgcatgttcaaaggaggatatttttgatgggaaagtgctgagacacatggtaaattgcgcctttctgagtctccaccgagcgaatacagagcctccaggaactatgtgaccaaataaaatggccaaaatttccattagaaaaaaaaagacaaaaaacgtgtaacttttctgaagaccatggactacaccgtaagggaattcagtaaatgaaaccggactcaagatggtgagttaacgaacgagactgaggacttgggagccacagcctttctcggtggccggtgtggccctggcctgtcctttgttttatgttccaggctgggaagagcagagggcgaatccccctggtagcattccctcccatacttgggggacgtattgcttcttctactcactgttctgtctctgaggttatttgaatgaacctggatggtgttgtttacacccccagcttctcccagcctccagggcgggagatgcgtctgcctctgtggctgcctgcagaaggccctggtgactccccacggagtcaccatccagcagccgctcaagtgcagtcagtcccacttcacacgtgtaacccatttaccaacctcactgtgcagctgcatcaccgttcaccacctcagctgcccctgcctcccacctcgccagcagacctcacgtgggctccagctcccgggacccagccccatctgggacacgccctgctgtcctgttctaggtcactgttggtgcttccggacgggcacgggacgcctggatagcggcactcaccgcagcctctggaatcggaaaatgaccgcatgacctcgtgactgtggccctcagctttcccatgtaaaattaaagatgttgattggcagactgcttggaaaatgcaatggaaaaccactctctggaacttaactcttttacgtcgttcctgggtactttgaaaccagttaaaaacattcatatcgggtttctacctgcttttaccctttttattatttatttatttatttatttatttatttgaaacggagtttcactccttttgcccaggctggagtgcagtggtgcgatcttggctcactgcaacctccgcctcccgggttcaagcaattctcctgcctcagctcctgagtagttgggataacaggtgcctaccaccacgcccagctagtttttttgtatttttttgttttgttttttaggtttttttttttttttttttgtatttttagtagggatggggtttcactatgttggccaggctggtctcgaactcctggcctcaggggatccacccacctcggcctcccaaagtgctgggattacaggcatgagccactgcgcccggcctaccctttttattaaatgcaagctttggccagcattacaggagcccttccagaagccgggccatcgtttcagtcacgcagccgcagccttgcccggcacgcaggtggggcttctccccttcccagtatctcacatccctgctcccacagcggggctgcttcccatcctagtgccacacggagggccggggaggccgggttcaggtttgatgctgaactcatatgcacaccggttttctctctcataagacaatcatgtttcatgcttaaaatacttactgttgagtcaaactgctgctctagaaagatcatccacactccctttgcggctgcgccccgggctgctccccgtgttgtagagcggtcagcacttcggagcagctgggaatcgcgtaccctgcgtatcagctttgaagctgctgccgtgtttctcattagctttagaaagtaacagcaccggcttacgtacaggacagcgctgtggattcactatcgccctgaccaagtcacgccgaccaggccaacattcagaattcctgggacatgcatattattgagcttttaaaaataatatgaatcggcgtttagaaatagaaccaaatgtctttctttttctgtagtgagggttttttgttttgggggaggctgtttgacctctgtcgatacggagtctttggctctggtgtgaggttgtttttcatgctctttatcagagatgaactttgggtcaaatgcagggatatttaaaatagcttttatatctacagaaaagaatcaaactgtttttaagtgttcaccgtcacttctcaggagcaagctaaatgggcctactgtgctcctcagctttggggctaaacagagaaacactggggattagcttttctgtgtgtgaaggccgcgatgctgacgattgtgtcagagttgtggtggaatgatgtgacagtccagacccaccctgaaaccacagtgaggcggggtctttggagcaggtgatgtggctcccaccctgtaactgcagtgaggtggggtcttccttgtagccaccgtgaggcggggtcttccctgtaaccaccgtgaggcggggtcttccctgtaaccgccgtgaggcggggtcttggaataggccatgcgtctcccacattgttttgcagccactttctagccttgtcactgccggagcaaattgtttagtttctctgggcttcagatccttggctgtaaagcaaatcaaaaccaaactaacaaagagcctcaaaggcccttctcaccccaccatccaccgtgatgtttccctgctgtgtccagcgctgaggctgtgtgacgatgttgttcttcacgcagagccctggagagaccgttcagttcccctctagggtccaactgcggctgagggtcggttactcgagtccagccgcgcccattaagagacctctcctcacttgtaaaggggtctctctgctcccaaagaaccacaggccgctgtgtatgtcgggggctcacgagctcacgtgctacacggcccagaagcaaaaggtttagacagattcatccaggggcttgattcatggctgaagcggccaagcagagccatgcagacgacagcccaggagacccaaccagacatctggcctgttctgttcaggtgcaggtgcagggtatgccctcaagacccttgtcttgctcatgtggttgagggagcctggtgctcgggtttgggaactcctgtgccacatcctgcccctggcggatttggtggtggcacgacaggcctgtggggtttccagcaccccgtcaccgccccaccaactctgctacacaaaccagacccgaagccactcgtgtctttccgcccagggcaccagcggctgtcggtgacgagcctgctcgtctgccacggattgctgatggtcggcaccagcctgggagtcctcgtggccctgccggtcccacgtctgcaagggattcccaaagtgaccggtgagtggcacctgcagtctgagtggctgcatcctgtcttgcaggctcgtggagcatagcagtgtgtagtgtgatttaacatcctaggattctttaaacaattcatattatctgtgctttttcagtgtattataatgacttaatagactgtttaattggaattatcaatttatatatttttccgttttttaccttagtagtccaaggagaatcttatgtttttatattctgtttactgccagaattagtttccatcattcctttctgtgttttatattgtggagaaggaagccgggatctccgttgttcctttgtgtgttttatattgtgaagaaggaagccgggatctccgtcattcctttctgtattttatgttgtgaagaaggaagccgggatctccgtctttcctttctgtattttatattgtgaagaaggaagccggggatccgaaaaggctccattgtgctattgcaatgtcagtaagagctcaggctggaacacatggcctttctggacacagtcccgttagggattggaggccttaaaacatgcttgtgtgtctggaatcaggattcccaatccagggaattggcccaggaaacagcctaagctaggaacaaagtatgatgcaagaagacatttgccacagcatttaatttttaatttttaacagcacgaaacaggaggtgacccgcagttcgtaatgagggattgggccatttaataaaatggtggcattgccggtaatgggtagaacacagccagcagaagtggtgtgtgcagagcctgcagtgacgcggaaaactcctcgtcctgttaagttcagtaaaccacagccttagattctatgtgggttactatgtcagccagggggaaatactaacagagaaaacgctttgcaggaagcttgtagagcagaactgttcctacgggctccatttctgtgatttcctcccaggccgacctgacggtggcttccgtgcactcagattttggcaggtccacccacaaggattaaggaattctagttttgccattcatttcctaatttatgtttttattatgatatatgggattgtacatgttgaggaccccaaatccaaaaacaaaatgcgaaatgctccaattttttttttttctttttgagacgtagtctcactctggcacccaggacggagtccagtggcacagtctcggctcactgcaccctctgcctgccaggttcaagctattctcctgcctcagcctccctagtagctgggattacaggcaccagccaccatgcctggctaatttttgtatttttagtagaggtggggtttcatcatgttggccaggctggtctcgaactcctgacctcaagtgattcgcctgccttggcctcagatgctccaaattctgtgtcgacgtgatgctgaaaggcagtgctcattggaggaattcagattttggatttcagatttgggatgctcaaccggcaagtgcaatgcaaatattccaacattaaaaaaaaaaatccaaaacacttgtggtcccaagaatttcagataagtgacactcagcctgtaaatacatagaattgtgcataacgcacagtttcacagtttaaatggtaacgagaagaggccacctgcctgtgcccaggtcagaaggggctgtgactcacacactgagcctcagctgccccttctcagcctcagccctctctgctcacaaccctaggaaatgatgatgctgagttttacgtcaattattcctttggtcctcctctgtagttgtaccaatttgtatcttaaagggtacttttcacctttccggcttttgcattttcctagctgtcccatggtgcaagcagcctctgttgctttttctctcagccttgctggggtcagtccctgctggtgccacagctatagtgctttcctctccctgcctgcagcctgcctctgaaaggaggtgccctcattgcctctggatggatagccaggtgctccctgaaaggaggtgcactctcactgttcctctggaggatagccaggtgctccctgaaaggaggtgcactctcactgtttctctggatgggtagccaggtgcttcctgaaaggaggtgcactctcactgttcctctggaggatagccaggtgctccctggaaggaggcgcactctcacagtttctctggatgggtagctaggtgctccctgaaaggaggtgcactcactgtgtttctctggatgggtagctaggtgctccctgaaaggaggtgtactctcactgtttctctggatgggtagctaggtgctccctgaaaggaggtgcactctcactgtttctctggatgggtagctaggagcatcctgaaaggaagtgcactctcactgtttctctggatgggtagctaggagcatcctgaaaggaggtgcactctcactgtttctctggatgggtagctaggtgcatcctgaaaggaggtgcactctcactgtttctctggatgggtagcgaggtgcttcctgaaaggaggtgcactctcactgtttctctggatgggtagctaggtgcttcctgaaaggacgtgcactcactgtgtttctttggatggtagctaggtgctacccatttgcattacacatcaagcctctgtatatttgtgtggctggctctgctgacatgggcagaagctccttctgggggcttgcccaggggcagcatcgctggtgtgcagggatcacaggtgtgtgcttcgccaggtgatgagcgggcctgtccctgcacagtccccccagctcctgctccctgcagacttcactttgccactctcctctttgggaaatggactctcaccacggtggaagattcagtgatgtcatttgccttggccagagtaggatgatggtgagggctggggcctgtttcatctgaaagcacttggggaaaggacacgtgcccctgtccatatgtcatgtcacccacaaagtatccagaagacacgccaggtccacgtgatgcttacagaatcagtgtgggggttgcggggctgtgtgtggctttaagaagacctgcaggtgtttctgatacgatcgtgactttaaaatttgaatcacatcacctgaaaactgaaagtcctaattttaatcaaattatagagttaaattgttctgaaccccagaacgtttttgtaatgaaaaatggcaggcagccggtagtttagtcatttctttcccaaaccaacacatttcaggcgttaatatttctaatcaagacttaggaaaatttgggatatttccatagggtaagtaagaaggtattttatgcagaatggaaaaatgactattttattactttgaaaagtacagtaggagtattagaactgaaatagtgctgaggaaaacacaactttctattttagaaaatcatttttaaagcctttttcacattaagtaaaaacccagaggaatataatccagatattttcatcgtagcttattattcatgtatgcaagttacttacaggctttgttatttgggcagggaggaatgcgttggggttaagccctgcactttttgcttccttgtctcaaattttgcctattttaaaagacagctgttgaactgtttcccttttcaggaagaggcatggtctcctaccatgcacacaacagtcctgtcaaattcatcgtcctggccacggctctgcacgagaaagacaaggacaaatccagggacagcctggctcctggccccgagcctcaggacgaagaccagaaggacgcacttccgagtggaggagctggttcatctctgagccagggtgaccctgacgcagccatctggttgggagattcgctgggatcgatgactcagaaaagcgacctgtcctcctcatctgggtccctgagcttgtctcacggctccagctctctagagcacagatcagaggacagcaccatctatgatctcctgaaggatcctgtctcgctgagaagcaaagcacgccgggccaagaaagccaaggccagctcggcgctggtggtctgtggagggcagggccaccgccgggtgcacaggaaggcccggcagccccaccaggaagagctggcgccgaccgtcatggtctggcagatccctctgctgaatatataagcaggacggccgccttctgctgtcagaatttgcaatcaagggtgacttctcagctaatcctacagcctgagtggttaagctgtgtctacactggttgggaataaattaaaaacagtatttgggggagaaacgtgcaatagcgtaatggtggtgtccctgccaattccttccttctcttctgtacagcagaagtaattacaagcacttctcacgaaggcagaagactgatgcaattttcgagtaattgagtgcagttctgggaaaataccacattctttttgactgctgtagtccatatatgaatactaaatgttaaacttcatcagcgtcagacctattgtatcatattagagaatttgcagactaagaatttatgagaaaatatatgtattcagtagtgcaggcatttattaacaattcttaaaagttttacctgattcagattcacgacttttatttatattctatatttttgaatttcagagtaaaatttgttaacaattttaaaagccaggtaacacctaccagtccagttagcatgatttgctttcagaagtgagctgggttttccaaagtggtataatgtgtgtactgtatattttaacaaagtaatatttttgtattgcatttttctattaaaaaattaacagttaatgtttcagtcaatgtattatctgtagcatttcacaaataatgtttgctttgaaccaaaatgctcagtgcctatcaacatttggactcaagcatcaacaccaaattattcctcccttctcgtataaatagagtgactatccacaggagaaaagtgtgtgctttagtattagaggagataggcagagaagtcttgcttagttccttcgtgcagcttcttgcccctgttgacgtggaatgctgtgtctgctttagcacgcacgctccgaatgactcctggtgctaggccatgctggctgctgtcactgagcgggactcaggccaagaggcgtgacctcgggccagcctgtctgttgtgcagacgcctcctctgcagaacgcatcagtttctattctgcagttgcagagccagccccgcgtgagaacgtgcataatgagtgcacaccatcatgtcaaggtgcatacttagtgagcgccatcctgctgaacgtgtatttcagtgtttcacttactggacggataacaagaaaaaaatcctaacacaggcagtcaccagaaataaatgtctcagcactttacagatgactaaaaatgttaattttatgacttagccaaatatgttctaggttgcatatatcccccatgtgaaagtgatttcttcccaagcttctcaaactgttagctgctgtctgacttcatcaataaagtatttttattttaaaatgcagtaggatgagttgcctcttttctgtgtcaagtggaaagggacatcaacctcggggggctgggtggggggcttggcctgcccgttcctagctgcatcaccacttgctgctttggggagactccgtgtctgaatcccagcaacgcacccaactgcgtggagcaccgcgctctgaattggaagtaggcactgggaatctttcaagcaactcatgtacttgttctttatttgtttgaagagacaaagtctccctctgtcgcacaggttgcagtgcaggggcgtgatcatggctcaccataaccccctgggctcccacagtcactgcagtctcaacctcccaggttcaagcagttctcccacctcagtctcctgagtagctgggactacagatgcacacaaccacacctaactctttttttctttttaacattttgtagagatggggtctcgctatgttgtccaggctagtgtcaaactcctgacctcaagcagtcctcgtgtctgagcctcccaaagtgctaagtttcctagtgtgagccaggagttggttggcagaattttgccacccttcaagcctctgatggcggctctgatctctgcgattcttccaggaaggcaggatggatttactaatttggtagaaaaggggaggggggttcagaggcttccaattgatgttcctaattcagtggttctgacttcacagtcatgcccagcctacacttggccattccattttgagttatgagtagaatgagtttcctgtaaaatgttcctattgtgggtgttttaccagaccagggccaacaccttacatggagagatgaaatggatgtgtaaagttaacttgctgggacagaaatctttccacacgattgatggtgcgggacatggacagagtggggtctgtgtaactgactccttaactccctctgccctcctagagaagagagacttccagagatcctgagagaggcagacgcgggagggctttgagggaggaagaggttggagaacgtgggctacaaagaactcccgctatgccaggacacgggttctgctttcacagtgaatgaggaaaacaagcatatcaccaacaaatgaagccgtgcagacaggcaagtgcgttctctaagcaacaagcttctactgagcacctgatgagtgtgagaggtgaggccaagctctgtcttaggccctgaggatgggacaagagagaaaaagcctccctttggggttgccactgccggtttattccccctctcctctgcagagccctgggctcttcctggacagggattaacccagtgacagcaggacacttgggagcccagggccaaatggctgcgtctcccccagcttccgggcccccatctgctgggtagaccctcggtaacttgatcaacaaggagcctggctggcatcacgatctcacctcctgatggggcccctgtcctctggggcgtggccaggcttggtgtttcatcacagcagcccgaacggagacaggaaggcaccaagaggcattgctcagcaatgaacaaaaacctgcaggtcatggtccaagtcccacacctgagtcagctcacaggctcggagctcactgactgaagggggagtcaggttcacctgaggaaggaccccacacgtaggctgcaggtccctttggtcaatgcttccccaaagggacctgcatgcgtgtgctgggaagactgcagtggtaacgggaaagagcagaccttggaaactgtccaggctctgagtcgccgctgagcagacaagcagagcggcaccttgggctgtagaggggtcttatgaaagccacatggcgcgtagagttaggcccatgtccgtctcacaagggcctatgggtctccaggtgtataattgggatggacagagctggcagctggcagaaaccatcactggttccttaacctgtgaagtcagagccactgaattagggaccatcaattggaaggctctgaacacccctccccattcctaccaaattagtaaatccatcctgccttcctggaggaatcgcagagatcagagccactgtcagaggctcaaaggatggtgaaattccagtgcccaccaattcccatgtaattcatggaactgggcactgcagacaccaggctgtgatggaaggtggcggtggggtcctgcagcgtgaccaggtagtctctccagtcacagccgctgtgacaaatagcgtctttaccagaacagatcagcacagctgccgattcagcaactgcactcttctccacaccctatccatggagagaagacagtttgtgttgacttggcgaggactgcagtacacttactgccttgcccactgtgctgtcaacactggctttactataaggccacagggtcactactgtgtcgatgatctcatgctgcctggacctgggagaacccaggtgacctaggaatgcaggtacctgcctcaggctgggagatatcggaggcctgccacatcattgaagcttctggggtttcagcatctgagcatgccctgatacaccctatgaggtaaagggcaaaccataccccacgctccatgccattctggggagcagtgactgggggacctctggagtttggacccagcatgcactacacatgggaagactgctccaactcatttctggggagcctctaaggctggcggttttgaatggggccaagagcggggaaaagcctgctgagccacttctgcagcacagacgccttgcccggcctcatggtgatgcagatatgactatgctgagacgttgctgtaacagcacggcccacagagctgcggagccaggctctcagttatctcccgtttgaaaaatggagcttgggtggtactaggcccagtcaaaattgggcgccaggatccctgcagaggccactgtctctgcgcgggctgcagaacaaaccaccatagactgggcagcctcaccacgttgatttctccctgtgctggaggctaagtcagatccgggtgccggcacggttgggtcgtcgggagggctccttcctggcctgcagccagccaccttctcaccatgtcctcccatcggggagaggaagcaagttctcttacaaagacacgatcccatcgtgagggccccacgctggtgacctcatcccctcccagaggccatcacactgggaattagggccttggcatattaatttggggggatatgaacctgcagcccagaacagatgccgactcagctaagcagcccgtggaatgctgtcgtgagatgggtgagttgcaggctggggtggacacgataccttagggacagcaccgagcaggttcagaaagtgaagtaaaatgcaggaagcaggtggctctgaccgtgtccatcgcactgccccacccacacccagccacatgcagcagccggcccctgggggagcatggggacgctcctgtccttgctacatgaactgtggccctggctgtctcgtcctatgcgaggaaggcccagtgggaagctgtggaggacacgcctctgcacacaacggctgcacacagggcacgcagtcatcctttcagttggaaggaggatgagcaaaagcctgtgtctttgtgtctgcgttaatgccccccagagagaaagcccccgaccccggggtgagcagagtggtctgtctggggctgttggccagagtcggtttgtgcaatgggtgtaggaacacacgggccactgcggtggggtcgtgtgtggccccccagctcagcatcgtgggctccctggcaccaagcctggccttgctaagaccccaccgagtgtccagcctgccggtaacagagagccttgtggctccttcaatttggcatcatttcctgggaagaccagcccagtaccagtcagattggtattgggcaggaaacggtgctccccgccaggcccctgcggccctgtttgagcagtgcgcactcgggtgggaagccagtggctccgtcagctccctgctcccatctgctctttcaaggggccttgagaagaactgaccgttggagcagggcggtgaactcagcatccccagctgctgtggggagggacgcacgtgtgctgctgtggacgcggaggcctctggtggctgaaaacaccatcatgctcccaggggtcccccggtgcctacctgacctcccgggcctgcgtccgatggcttctgctgtttctaacaaaaatgcaccaagttctgggctcctggttagaaagtggcagagctagggcaggaaccggaaagtccatgctctttggttttctgtcagctgtcaaatcagagctacgagctgcctcctccatctgcagagtgagggtgacagggacgacgcaaggcacgtgtcccctcgggtgcgctggccgctgcagccccttccccatgatcagtgcatttctgagcacggccctagtgatgcgaggtgtcattcactcctatcttgcacacgaggacaccacggctccgtgtgtgggagtctcgccacgggctacttggccaggggcggtaggagctgctctcctgctgggtggagcagcctggctctgtggcacgtggccgccctcattaccagaattgacccgagtcaggatgacagggttgggattacagagtaaaggggcagtgagacaggccctggaaagctgtaggctcagccagggcccataaccgcacggcctggagcccggcctggacacgcagcaaacaaacaaaagggctggaagcagaaaccaaacaaaagctgcccacaggaatccgtgccctggtgccatccgggggctcttccctccggcgtattgtaaacggtggtgacaaagcccggcttgctggctggaaagctgccctccagtcccaaagagccggcagcctctgagatccagagggttctgtacattccggttctaagcgggcaccctgtgtagatggcacatggccaagggtggcagaaccgccttttccaaggataaagaagagacggggccattttgcaggcttctagaatgatgcttgaccatcgatgacaaaagcctagagctctgtggtggaggtaggggtgtgtggagggcgctggggtagggcaggcctgcgatgcggaggaggcacctgtgtgtgccgttggcccccagtctctgtcctgccctgctgggcctctgggacagggtctttggacacagtgctggaggcaggctcaaatgccatggtgcaagaatcagggtgacccagaaggcacctttcccctcgacacccacaggcttgcccagagtccaaccccttggattgtgggtgcgaggcacaggctcaagaagcaaagtggagagaaagtaaagtgggggctactcttgttagcaatgaggggcttgcgtttattttcttctgctcatgaaaaaaataattgcttttttggtgctaacatacaagagtcccgttccatctccagttcagtgggtctcacccagggcaatttccaccttccaccaccccctaggagacattcggcaatgttgggagacaccttggtggtcaatacagggagaggtcagggaaagggtgggcgccaggcttccacgtgcagagaccacggacaccccaagcatcctgcagtgcccgaacagccccagacgccgatggcacagaggctggaagaccctggtcggtcggttaagtaagggacgattcatcttcaccatcttccacccaatcaaaaatcaacggcttggtttcccttttgttgccagcatgtggggtcctggtctggtctctaacgtcccccctgttctcactgtgcctgtctcatttcggcactgttggtctattttgaatttttaaaagtttcttctttaggtcatgaaatggaattctcatacaggctagcaggagttagcagtgccaattagcccatatgtgaacactcttccattcattcatctctaagccaaacccaacagtacattcacagcctaaagggatctggatccatactcagccgagacagaaagaacaatttctggtggcaggagacattttagtttaccttattttgagcaaattcaacatatgtacatctggctcgcacaagcagtaaatttgggcttggtttttcacatattcaaagtttacaacagacccctcttgattttctggaggaggtgcaggctttagatgggaactcttcacccaggttccaggatctgtgggtccacggttgcccaccgggttgtgagctccagggacaggcgtgcccacggctgcctccccgtgtgaccagaatcactcaatgctgctgtcctggggcccgaagatcgtgtttgccattctggaacttttattcatctcgcttttcagaaacacaaatgacggatgaagcacacaggccctgaaacccaaacgttaacttggacttagagctgcttgagctagttacttcacatctgtttcaacggagccagtaggagctgcctcacacagctagtaggagatgtgaatgaatcaggcatgggaaggtgtctgcgtgtcacccatggtcggtaggtaggagctcttacgtagtaacagtttcccccaaactccatctcagtcatgcatccctatgggccgcgattgcttcgattatcccataatttcctcactcctgacttagatggtttcgatttttcaacaaacgtgtactgcttgcttgcagtgggtcggctctgagcagcggttggagcttggaggggagcagggcctgctgggccctgacccgagatgcagtcccgtccgtggtgttctgcttcctccctaacacctctctgcagtgtcctgcggctgggcagcggccccctcatggatgtccatgtcctcattcctggatacagtggatatgtggccttatgtggcaaagggactttgcaggtgcggctgagctcaggatcctgagatgaatagatgaccctggactatctgggctggcccagcctgatcagaggggtctgtttaagaaggaggcagagacggagaaggagatgtgaaaatggaagcagaggagaaagagacacaatcctccaggccagacagagccacctgcctgccgccgctcaccttcctcagcatgtgctttggttcaagagttacctgagagctgtccattccaacaggcgcccccaacactgcccaccaccgctccaggtctgtggttccctaggatccagagtccctttcctgtctcagctctgtctggtgggaccccggtacggcaggcgacttctctggagactctctggtgtgttaaaatttggacacaggagttctgatcgcagcagggtcctgctggaaggtgcagaggccaaagcagtttgaggattgcaggtcctttccagcaaagaacccactgaagctggggactgctgagcagctggggctgcccagaaggagggcaaagccatctgaggaaacgcccagggcagaaggtcctgccaacccccctctgacccggtctcctccgagtcctctcctctgtggctcccagagctccctgcaggctcccgcctgggatgccaggaacaggggctctcaggatggtgtgggggcttcagggctgcagggaccacagagccaggtggagctgggagaggctctgtggtcagccccccactctcctcacttcccacgcctcctgctgcagaagacacccttggagctgggggaggggcagccggggaggaaggtcgggtctgaccactccctgtgacccagccccatgcagctgcacaggcggctgacctacctcccagggcgcccgagcagaagctctgcagctgatcagtgtcccgcacccccctaagtacacaaccccgtgcatccccacatcccgaaaggcctgggtgttacacagggaggccatccgagtttcactgttagtgttttttaaagtgatttcctggcaccctacaaacagtagcattttaatcccagacagcagccggaaggagcgattcgtcatcctggtcagaagacatcgaggtctatttggctgagcacttagatatcctcttatattgatggaaatagtttagagccattttcaaacatttataccccacaagtactttttcccaagtgtattgcctaattcggccggaagactttgtttggaaaaactgagtctgggaagcactccagctgcgcccacctggcacggtgaggcctttgccaggacacggattcgcattgcgtttctccgggaccagccaattgctcagtcattacccggtgacccttagctatgcagctcaaagtgtgacaattgtgggccatgaaccctccaggaaggaccaacatcgccaccagtactaaaactaaaaccagtgtttagaaagttgtgtaccagtttgacagcgtgattttgcacctgtttaacctaaggtaatggttttgtattttgtatgtcttttacaatttttatttgtattgcaaattgaaatgctgtctgtctataaaggattgaaaactttaaaatcataaactgacatgtcactcccaatagcgtggaaagccctgcctgtatggaagagacacaaaaccctgggatgagcgtcctggcactgctgtgacacagtaccacacgcggggggacgggggaaggggtgctgaaaaccacagaggtggattctccgcagttctggaggccagacactgacgatcaagacgtcagcagggccacgctccctcaaaggatctggggagcaggcttcccatctcttccagctgccagtgtggacaggaaccctccccactttctgtggctggcaggtcatcgctgcaatccccgcctacccgcacccccctcctccctgggcacccccacatcatcttctttctgtgtgtgtctctgtgtctgaatttccacttctttccactcatgctggatgagggcctgccctaacgaactcacactaacgcaatcacctctaaaaaagcctctttccaaatacagtcaccttccaagggacgaggcttaggtcttcaacggatgttgttcttcaggacacgattcaacccttaacaatctttaaactgtggctcacaataatgtgttatttggcagatggtcctactggatttatacgtttgaggatgtattacttatacctattctaagtaactagtggcttgaaaatgaaatctgtttgcagtcactgtattaccagcagtgggatcaggaacaccacagatacacttttactcgggtttttgtcttgttgagccttgcacagcatcaaagctatggctaatactcttttctagtgatagcagcatggtttagaactgatttatgggacaacaggacacacccttgcggaggtcctgcctcgctggcaggatggccaaccctggccgcatcccagttcctgggctgtaccagccacaggccacctcctgctgctgacgtcgaactcggggttcctgccatctcgggcgacccagacaagttcaagaggatgcacgctgggacatttacactctaaggataactttcaactcatagcacgaaatattttcaggattggtatggaaacccatggggtgaaattaagctataggaggtgctgggacgccagttttagttatttttagcatacagattcctgctgtacgaagcacgtcctgtagcacagacctgctcacccctccggacagcagttctccttggcgactgctgtaaacaagggccctgagttaggatctgagccctagctccgcctcacggaaaaggcgtgcccctgaatgagttaggcagacctcttcgaatgttaagtttcctcaactgagaaatggaaatagtcgctaccacctgttatttttggaaccgtagatagaccacatatagatataccatgaatatttatgtggaaattgtagataacttgttttaacattattaaaagataccttgaaaaaaatacattttgtatgtttcagatttaaaacatctatttta

SEQ ID NO: 1006 - DNA, 8213 bp, Homo sapiens
ttccccaaattgatggacataaacccatatgcttatctcagcatgtgtttaaaaagcacttgctgagattcagtgaccatccaacattaaaaactgctgatagaaggaaactcacttagctgaattaaggacgtgttcttaaaatctaccgccaacgtaatggggaggagctcacggcgttcgttaatttattcattccgcaaatatgttttgggcagttacataccgaatagtagatggaggtgtgcctgctgtcatggagatagggtgatttcatcctgttgatcaggaaaactcctaggtgcttgcaggtaaatgtgccacaaagaaagtgaggaccaaaggttagttgatgtaaaaacaagtttgaaatgcattttggggtaatttatccggtcgcttcgggcattcctcgcggaaggcgtggtctggtgactcagaagccaacacactgcgggagtccagccgtcggccccctgccgtgtggcgaggcccagtgtgtcccctttgtaaggacagcacaagcaggagttaatggaccggccatccatagcggtggtggggcagggagccagtttccgaaagaaactcacgccgccgcaggagggccctgtgggatgctctgtgcagagctgttgtgcggaccgggagacgggaaagcctggtggctgcaggagggcaccgtgcagaagtatccagtaaaccacccacagcacggcagcagaaaaacgagtaaattatatgtgtgtatgtttatgagaactcagaagcaatggtgagcaaaaagcaaaagcaagaggagaaagtcacagtgtgctggcatcaagttgcattgagaggagcccgcggggtagtgcacccgcatttcctcgttgcgttgagaggcgcccgcggggtagtgcacccgcatttcctcgtttgagaggcgcccgcggggtagtgcacccgcatttcctagttgccttgagaggtgccgcggggtagtgcacccgcatttcctagttgccttgagaggtgcccgcggggtagtgcacccgcatttcctagttgccttgagaggtgccgcggggtagtgcacccgcatttcctcgtttcattgagcggtgcccgcggggtagtgcactcgcatttcctagttgccttgagaggtgccgcggggtagtgcacccacatttcttcactcgtttagagttcggggctctcagaacacagggagaatatgggagaattccttactagatgttacagaggccacacagggccacttttttcttttttttttattgtgtcaggtatacgtaaatattcctttcggtcagttcagcacgtaggactgagtggcattaggtacgctcactgtacagccaatgcctccataggccactttttaaatacgcggggctaagggccaacgacaagattgtcatcgaggacaataagtcgatggcgctgcctggtcactggcttggtcagaatacacatgccagggtgactggatttaacgttcagttttagaaccacaaatctgccagcccaggcattcaagaggaagtgagtaattcactgaattgatggttagcaagacccttcaaagtccttggaagttccgtgtttgctgggggtcacaacagcaattgcgtttctaaaacattgaaaaccacccggttttcacacatctgaatagcctgagttctaacagacctaagtaaaggcgtccaaacgtgcctgatcctgtggctgggtcccaggagccttaacaaggcattgagagagctggattgattgattagactcttgccaactgctgtgcggaatacagaaaatgcagctccagctctcaaagggctgaaaatctaattgaggtgaaaaaggtaacatgtgtgaaaaccatgtctgtgtagacttgttttgtatggaccagaaaagttggaagtccagagatggatgcgaggaaataggggatggagtttccttataacctctggagggacagtccagatacataccggggtgtgtagcgggtggaggttctaagacaggctggaggaacagtgcagacacacaccagggtgtgtagggggtagaggttctaagacagtctggagggagagtgcagacacacaccgggggcgtgtagggggtagaggttctaagacagtctggtgggagagtgcagacacacccggggccgtgtagggggtacaggttctaagacagtctggtgggagagtgcagacacacaccagggcgtgtagggggtggaggttctaagacaggctggaggaacagtggagacacacactggggagcataggggtgcttttctctgagtcccctagtacatggtagaggctgtagaccctccgctcttgggcacgtgggtaggctctcaggatgactcttggctcttgggcatgtgggtgagctctcaggatgatgcccagccccaattttcaggcaattgtgcaaggacttgacccattcatccgctgagctgagttgctgagactgctgggtgcccgggtggtgatcattgtccgtggcatacagaacacactgcagcttctgcaaagtgagctcatttcacgcattttatggctttgccaggctgctgttgacctgccagaacttttaatcagacatttggaggacctgttttgtagtcagtggagaaatattacaaggatagggtaatttgaaatatctaaggattgtaagtgacaagttcatgtctaattttgcatttccagtgaaagcaagtgttggctttgaatgttacttatgtgctgagatgtgtatattcctcagtgcttaattactaaggatttttaaggccaagttttgttacagtgaatgactgtggatgcataaagaataaatttaatatttttaaggcatggagattatttgtatctaagaaaccaggtaaaataaagaaacatttatgcttgtgtgactgataaaagagttagagagacactcatattctgggagtttgaagaatgtcattttcattctctaaaagtcttgttagtgtcacagcattgaaaatttaaaaatccgtgtgtattttcttgctagtgctggtacttgaatatctgtatcatccacctatccatccacctacccatatttctataatccaccgtccatcgacatgcctatcatctgtccaccatttctctctgtctaattttcaaaacatcctgtaagtttatataaaggaagatttttcttcttgtgaagttctctaaggctgacaagttacctggcatgactgtggcggatgcccatagccaggtggtcctcggggtacagatggggcaggggcacttgtgagaaacacctgaagtgcttttccccagcctccccggccctgcccgggtggtggaggcgctgcacggtgccttccatggagcaagccccgggctccgcagggtcctcagcatgattcagatttccttccacccccagctctagatgatttggtaaaaccacaaacaggcacaaaacagcccacatggaattctaaagttttaatttcattttggaatttatgcactcagatgaaatgatttatgatgatgttgagaatggggatgaaggtggaaacagctccttggaatacggatggagttcgagtgaatttgaaagttacgaagagcagagtgactcggagtgcaagaatgggattcccaggtccttcctgcgcagcaaccacaaaaagcaactttctcatgacctaacccgtttaaaggagcactatgagaaaaagatgagagatttgatggcaagcacggtgggcgtggtggagattcagcagctcaggcagaagcatgaactgaagatgcagaagctcgtgaaggccgcgaaggacggcaccaaggacgggctggagaggaccagggcagccgtgaagaggggccgctccttcatcaggaccaagtctctcatcgcacaggatcacagatcttctcttgaggaagaacagaatttgttcattgatgttgactgcaagcacccggaagccatcttgaccccgatgcccgagggtttatctcagcagcaggttgtaagaagatatatactgggttcagttgtcgacagtgaaaagaactacgtagatgctcttaagaggattttggagcaatatgagaagccgctgtctgagatggagccaaaggttctgagtgagaggaagctgaagacggtgttctaccgagtcaaagagatcctgcagtgccactcgctatttcagatcgcgctggccagccgcgtttccgagtgggactccgtggaaatgataggcgatgtcttcgtggcttcgttttctaagtccatggtgctggatgcatacagtgaatatgtgaacaatttcagcacagccgtggcagtcctcaagaaaacatgtgccacaaagcccgcttttcttgaatttttaaagcaggaacaggaggccagccccgatcgaaccacgctctacagcctgatgatgaagcccatccagaggttcccacagttcatcctcctgctccaggacatgctgaagaacacctccaaaggccaccccgacaggctgcctcttcagatggccctgacagagctcgaaacactagcagagaagttaaatgaaagaaagagagatgctgatcaacgctgtgaagtgaagcaaatagccaaagccataaacgaaagatacctgaacaagcttctcagcagtggaagccgatacctcattcgatcagatgatatgatagaaacagtttacaacgacagaggagagattgttaaaaccaaagaacgccgagtcttcatgttaaatgatgtgttaatgtgtgccaccgtcagctcacgcccctctcatgacagccgtgtgatgagcagccagaggtacttgctgaagtggagcgttccactgggacatgtggacgccatcgagtacggcagcagcgcaggcacgggcgagcacagcaggcaccttgccgttcacccgccggagagcctggccgtggttgctaacgcgaaaccaaacaaagtttacatggggccaggacaactgtatcaagatttacaaaacttgttgcatgacttaaatgtaattggccaaatcactcagctgataggaaaccttaaaggaaactatcagaacttaaaccagtcagtagcccatgactggacatcaggtttacaaaggcttattttgaagaaagaagatgaaatcagagctgcggactgctgcagaattcagttacagcttcccgggaagcaggacaaatctgggcgaccgacgttctttacagctgtgttcaatacgttcacccctgccatcaaggagtcctgggtcaacagcttacagatggccaagctcgccctagaagaggagaaccacatgggctggttctgtgtggaagacgatgggaatcacattaaaaaggagaagcatcctctcctcgtcggacacatgcccgtgatggtggccaagcagcaggagttcaagatcggaagttgcacccatcaaatgggtcagattgccatcgtctcgtttcaaaattccactcccaaagtcattgagtgcttcaacgtggaatctcgcatcctgtgcatgctgtacgttcccgtcgaggagaagcgcagagagcctggggcacccccggaccccgagaccccggccgtgagagcttctgatgtccccacgatctgtgtagggacggaggagggaagcatttccatttataaaagcagtcaaggctccaagaaagtgagacttcagcactttttcactcctgagaagtccacagtcatgagcctggcttgcacgtctcagagcctgtacgctggcctggtcaacggggcagtcgccagctacgccagagccccagatggatcctgggattcagaacctcaaaaagtgatcaagttaggcgtcctaccagttagaagtctactcatgatggaagacacgttgtgggcggcttccggaggtcaagtcttcatcatcagtgtggagactcatgctgtagagggtcagctggaggcccaccaggaggaaggcatggtgatctcccacatggccgtgtccggcgtcgggatctggattgccttcacctcagggtccacgctccgcctttttcacacggaaactctcaagcacctgcaggacatcaacatcgccacccctgttcacaacatgctgccagggcaccagcggctgtcggtgacgagcctgctcgtctgccacggattgctgatggtcggcaccagcctgggagtcctcgtggccctgccggtcccacgtctgcaagggattcccaaagtgaccggaagaggcatggtctcctaccatgcacacaacagtcctgtcaaattcatcgtcctggccacggctctgcacgagaaagacaaggacaaatccagggacagcctggctcctggccccgagcctcaggacgaagaccagaaggacgcacttccgagtggaggagctggttcatctctgagccagggtgaccctgacgcagccatctggttgggagattcgctgggatcgatgactcagaaaagcgacctgtcctcctcatctgggtccctgagcttgtctcacggctccagctctctagagcacagatcagaggacagcaccatctatgatctcctgaaggatcctgtctcgctgagaagcaaagcacgccgggccaagaaagccaaggccagctcggcgctggtggtctgtggagggcagggccaccgccgggtgcacaggaaggcccggcagccccaccaggaagagctggcgccgaccgtcatggtctggcagatccctctgctgaatatataagcaggacggccgccttctgctgtcagaatttgcaatcaagggtgacttctcagctaatcctacagcctgagtggttaagctgtgtctacactggttgggaataaattaaaaacagtatttgggggagaaacgtgcaatagcgtaatggtggtgtccctgccaattccttccttctcttctgtacagcagaagtaattacaagcacttctcacgaaggcagaagactgatgcaattttcgagtaattgagtgcagttctgggaaaataccacattctttttgactgctgtagtccatatatgaatactaaatgttaaacttcatcagcgtcagacctattgtatcatattagagaatttgcagactaagaatttatgagaaaatatatgtattcagtagtgcaggcatttattaacaattcttaaaagttttacctgattcagattcacgacttttatttatattctatatttttgaatttcagagtaaaatttgttaacaattttaaaagccaggtaacacctaccagtccagttagcatgatttgctttcagaagtgagctgggttttccaaagtggtataatgtgtgtactgtatattttaacaaagtaatatttttgtattgcatttttctattaaaaaattaacagttaatgtttcagtcaatgtattatctgtagcatttcacaaataatgtttgctttgaaccaaaatgctcagtgcctatcaacatttggactcaagcatcaacaccaaattattcctcccttctcgtataaatagagtgactatccacaggagaaaagtgtgtgctttagtattagaggagataggcagagaagtcttgcttagttccttcgtgcagcttcttgcccctgttgacgtggaatgctgtgtctgctttagcacgcacgctccgaatgactcctggtgctaggccatgctggctgctgtcactgagcgggactcaggccaagaggcgtgacctcgggccagcctgtctgttgtgcagacgcctcctctgcagaacgcatcagtttctattctgcagttgcagagccagccccgcgtgagaacgtgcataatgagtgcacaccatcatgtcaaggtgcatacttagtgagcgccatcctgctgaacgtgtatttcagtgtttcacttactggacggataacaagaaaaaaatcctaacacaggcagtcaccagaaataaatgtctcagcactttacagatgactaaaaatgttaattttatgacttagccaaatatgttctaggttgcatatatcccccatgtgaaagtgatttcttcccaagcttctcaaactgttagctgctgtctgacttcatcaataaagtatttttattttaaaatgca

SEQ ID NO: 1007 - protein, 1080 aa, Homo sapiens
MHSDEMIYDDVENGDEGGNSSLEYGWSSSEFESYEEQSDSECKNGIPRSFLRSNHKKQLSHDLTRLKEHYEKKMRDLMASTVGVVEIQQLRQKHELKMQKLVKAAKDGTKDGLERTRAAVKRGRSFIRTKSLIAQDHRSSLEEEQNLFIDVDCKHPEAILTPMPEGLSQQQVVRRYILGSVVDSEKNYVDALKRIQYEKPLSEMEPKVLSKLKTVFYRVKEILQCHSLFQIASRVSEWDSVEMIGDVFVASFSKSMVLDAYSEYVNNFSTAVAVLKKTCATKPAFLEFLKQEQEDDRTTKLMMKPIQRFPQFILLLQDMLKNTSKGHPDRLPLQMALTELETLAEKLNERKRDADQRCEVKQIAKAINERYLNKLLSSGSRYLIRSDDMIETVYNDRGEIVKTKERRVFMLNDVLMCATVSSRPSHDSRVMSSQRYLLKWSVPLGHVDAIEYGSSAGTGEHSRHLAVHPPESLAVVANAKPNKVYMGPGQLYQDLQNLLHDLNVIGQITQLIGNLKGNYQNLNQSVAHDWTSGLQRLILKKEDEIRAADCCRIQLQLPGKQDKSGRPTFFTAVFNTFTPAIKESWVNSLQMAKLALEEENHMGWFCVEDDGNHIKKEKHPLLVGHMPVMVAKQQEFKIGSCTHQMGQIAIVSFQNSTPKVIECFNVESRILCMLYVPVEEKRREPGAPPDPETPAVRASDVPTICVGTEEGSISIYKSSQGSKKVRLQHFFTPEKSTVMSLACTSQSLYAGLVNGAVASYARAPDGSWDSEPQKVIKLGVLPVRSLLMMEDTLWAASGGQVFIISVETHAVEGQLEAHQEEGMVISHMAVSGVGIWIAFTSGSTLRLFHTETLKHLQDINIATPVHNMLPGHQRLSVTSLLVCHGLLMVGTSLGVLVPVPRLQGIPKVTGRGMVSYHAHNSPVKFIVLATALHEKDKDKSRDSLAPGPEPQDEDQKDALPSGGAGSSLSQGDPDAAIWLGDSLGSMTQKSDLSSSSGSLSLSHGSSSLEHRSEDSTIYDLLKDPVSLRSKARRAKKAKASSALVVCGGQGHRRVHRKARQPHQEELAPTVMVWQIPLLNI

SEQ ID NO: 1008 - DNA, 8476 bp, Homo sapiens
ttccccaaattgatggacataaacccatatgcttatctcagcatgtgtttaaaaagcacttgctgagattcagtgaccatccaacattaaaaactgctgatagaaggaaactcacttagctgaattaaggacgtgttcttaaaatctaccgccaacgtaatggggaggagctcacggcgttcgttaatttattcattccgcaaatatgttttgggcagttacataccgaatagtagatggaggtgtgcctgctgtcatggagatagggtgatttcatcctgttgatcaggaaaactcctaggtgcttgcaggtaaatgtgccacaaagaaagtgaggaccaaaggttagttgatgtaaaaacaagtttgaaatgcattttggggtaatttatccggtcgcttcgggcattcctcgcggaaggcgtggtctggtgactcagaagccaacacactgcgggagtccagccgtcggccccctgccgtgtggcgaggcccagtgtgtcccctttgtaaggacagcacaagcaggagttaatggaccggccatccatagcggtggtggggcagggagccagtttccgaaagaaactcacgccgccgcaggagggccctgtgggatgctctgtgcagagctgttgtgcggaccgggagacgggaaagcctggtggctgcaggagggcaccgtgcagaagtatccagtaaaccacccacagcacggcagcagaaaaacgagtaaattatatgtgtgtatgtttatgagaactcagaagcaatggtgagcaaaaagcaaaagcaagaggagaaagtcacagtgtgctggcatcaagttgcattgagaggagcccgcggggtagtgcacccgcatttcctcgttgcgttgagaggcgcccgcggggtagtgcacccgcatttcctcgtttgagaggcgcccgcggggtagtgcacccgcatttcctagttgccttgagaggtgccgcggggtagtgcacccgcatttcctagttgccttgagaggtgcccgcggggtagtgcacccgcatttcctagttgccttgagaggtgccgcggggtagtgcacccgcatttcctcgtttcattgagcggtgcccgcggggtagtgcactcgcatttcctagttgccttgagaggtgccgcggggtagtgcacccacatttcttcactcgtttagagttcggggctctcagaacacagggagaatatgggagaattccttactagatgttacagaggccacacagggccacttttttcttttttttttattgtgtcaggtatacgtaaatattcctttcggtcagttcagcacgtaggactgagtggcattaggtacgctcactgtacagccaatgcctccataggccactttttaaatacgcggggctaagggccaacgacaagattgtcatcgaggacaataagtcgatggcgctgcctggtcactggcttggtcagaatacacatgccagggtgactggatttaacgttcagttttagaaccacaaatctgccagcccaggcattcaagaggaagtgagtaattcactgaattgatggttagcaagacccttcaaagtccttggaagttccgtgtttgctgggggtcacaacagcaattgcgtttctaaaacattgaaaaccacccggttttcacacatctgaatagcctgagttctaacagacctaagtaaaggcgtccaaacgtgcctgatcctgtggctgggtcccaggagccttaacaaggcattgagagagctggattgattgattagactcttgccaactgctgtgcggaatacagaaaatgcagctccagctctcaaagggctgaaaatctaattgaggtgaaaaaggtaacatgtgtgaaaaccatgtctgtgtagacttgttttgtatggaccagaaaagttggaagtccagagatggatgcgaggaaataggggatggagtttccttataacctctggagggacagtccagatacataccggggtgtgtagcgggtggaggttctaagacaggctggaggaacagtgcagacacacaccagggtgtgtagggggtagaggttctaagacagtctggagggagagtgcagacacacaccggggtgtgtaagcagtggaggttctaagacaggctggaggaacagtggagacacacaccagggcgtgtagggggtagaggttctaagacaggctggaggaacagtggagacacacaccacggcgtgtagggggtagaggttctaagacagtctggtgggagagtgcagacacacccggggccgtgtagggggtacaggttctaagacagtctggtgggagagtgcagacacacacggggctgtgtcggggatagaggttctaagacagtctggtgggagagtgcagacacacaccagggcgtgtagggggtggaggttctaagacaggctggaggaacagtggagacacacactggggagcataggggtgcttttctctgagtcccctagtacatggtagaggctgtagaccctccgctcttgggcacgtgggtaggctctcaggatgactcttggctcttgggcatgtgggtgagctctcaggatgatgcccagccccaattttcaggcaattgtgcaaggacttgacccattcatccgctgagctgagttgctgagactgctgggtgcccgggtggtgatcattgtccgtggcatacagaacacactgcagcttctgcaaagtgagctcatttcacgcattttatggctttgccaggctgctgttgacctgccagaacttttaatcagacatttggaggacctgttttgtagtcagtggagaaatattacaaggatagggtaatttgaaatatctaaggattgtaagtgacaagttcatgtctaattttgcatttccagtgaaagcaagtgttggctttgaatgttacttatgtgctgagatgtgtatattcctcagtgcttaattactaaggatttttaaggccaagttttgttacagtgaatgactgtggatgcataaagaataaatttaatatttttaaggcatggagattatttgtatctaagaaaccaggtaaaataaagaaacatttatgcttgtgtgactgataaaagagttagagagacactcatattctgggagtttgaagaatgtcattttcattctctaaaagtcttgttagtgtcacagcattgaaaatttaaaaatccgtgtgtattttcttgctagtgctggtacttgaatatctgtatcatccacctatccatccacctacccatatttctataatccaccgtccatcgacatgcctatcatctgtccaccatttctctctgtctaattttcaaaacatcctgtaagtttatataaaggaagatttttcttcttgtgaagttctctaaggctgacaagttacctggcatgactgtggcggatgcccatagccaggtggtcctcggggtacagatggggcaggggcacttgtgagaaacacctgaagtgcttttccccagcctccccggccctgcccgggtggtggaggcgctgcacggtgccttccatggagcaagccccgggctccgcagggtcctcagcatgattcagatttccttccacccccagctctagatgatttggtaaaaccacaaacaggcacaaaacagcccacatggaattctaaagttttaatttcattttggaatttatgcactcagatgaaatgatttatgatgatgttgagaatggggatgaaggtggaaacagctccttggaatacggatggagttcgagtgaatttgaaagttacgaagagcagagtgactcggagtgcaagaatgggattcccaggtccttcctgcgcagcaaccacaaaaagcaactttctcatgacctaacccgtttaaaggagcactatgagaaaaagatgagagatttgatggcaagcacggtgggcgtggtggagattcagcagctcaggcagaagcatgaactgaagatgcagaagctcgtgaaggccgcgaaggacggcaccaaggacgggctggagaggaccagggcagccgtgaagaggggccgctccttcatcaggaccaagtctctcatcgcacaggatcacagatcttctcttgaggaagaacagaatttgttcattgatgttgactgcaagcacccggaagccatcttgaccccgatgcccgagggtttatctcagcagcaggttgtaagaagatatatactgggttcagttgtcgacagtgaaaagaactacgtagatgctcttaagaggattttggagcaatatgagaagccgctgtctgagatggagccaaaggttctgagtgagaggaagctgaagacggtgttctaccgagtcaaagagatcctgcagtgccactcgctatttcagatcgcgctggccagccgcgtttccgagtgggactccgtggaaatgataggcgatgtcttcgtggcttcgttttctaagtccatggtgctggatgcatacagtgaatatgtgaacaatttcagcacagccgtggcagtcctcaagaaaacatgtgccacaaagcccgcttttcttgaatttttaaagcaggaacaggaggccagccccgatcgaaccacgctctacagcctgatgatgaagcccatccagaggttcccacagttcatcctcctgctccaggacatgctgaagaacacctccaaaggccaccccgacaggctgcctcttcagatggccctgacagagctcgaaacactagcagagaagttaaatgaaagaaagagagatgctgatcaacgctgtgaagtgaagcaaatagccaaagccataaacgaaagatacctgaacaagcttctcagcagtggaagccgatacctcattcgatcagatgatatgatagaaacagtttacaacgacagaggagagattgttaaaaccaaagaacgccgagtcttcatgttaaatgatgtgttaatgtgtgccaccgtcagctcacgcccctctcatgacagccgtgtgatgagcagccagaggtacttgctgaagtggagcgttccactgggacatgtggacgccatcgagtacggcagcagcgcaggcacgggcgagcacagcaggcaccttgccgttcacccgccggagagcctggccgtggttgctaacgcgaaaccaaacaaagtttacatggggccaggacaactgtatcaagatttacaaaacttgttgcatgacttaaatgtaattggccaaatcactcagctgataggaaaccttaaaggaaactatcagaacttaaaccagtcagtagcccatgactggacatcaggtttacaaaggcttattttgaagaaagaagatgaaatcagagctgcggactgctgcagaattcagttacagcttcccgggaagcaggacaaatctgggcgaccgacgttctttacagctgtgttcaatacgttcacccctgccatcaaggagtcctgggtcaacagcttacagatggccaagctcgccctagaagaggagaaccacatgggctggttctgtgtggaagacgatgggaatcacattaaaaaggagaagcatcctctcctcgtcggacacatgcccgtgatggtggccaagcagcaggagttcaagattgaatgtgctgcttataaccctgaaccttacctaaataatgaaagccagccagattcattttccacggcacatggtttcctgtggatcggaagttgcacccatcaaatgggtcagattgccatcgtctcgtttcaaaattccactcccaaagtcattgagtgcttcaacgtggaatctcgcatcctgtgcatgctgtacgttcccgtcgaggagaagcgcagagagcctggggcacccccggaccccgagaccccggccgtgagagcttctgatgtccccacgatctgtgtagggacggaggagggaagcatttccatttataaaagcagtcaaggctccaagaaagtgagacttcagcactttttcactcctgagaagtccacagtcatgagcctggcttgcacgtctcagagcctgtacgctggcctggtcaacggggcagtcgccagctacgccagagccccagatggatcctgggattcagaacctcaaaaagtgatcaagttaggcgtcctaccagttagaagtctactcatgatggaagacacgttgtgggcggcttccggaggtcaagtcttcatcatcagtgtggagactcatgctgtagagggtcagctggaggcccaccaggaggaaggcatggtgatctcccacatggccgtgtccggcgtcgggatctggattgccttcacctcagggtccacgctccgcctttttcacacggaaactctcaagcacctgcaggacatcaacatcgccacccctgttcacaacatgctgccagggcaccagcggctgtcggtgacgagcctgctcgtctgccacggattgctgatggtcggcaccagcctgggagtcctcgtggccctgccggtcccacgtctgcaagggattcccaaagtgaccggaagaggcatggtctcctaccatgcacacaacagtcctgtcaaattcatcgtcctggccacggctctgcacgagaaagacaaggacaaatccagggacagcctggctcctggccccgagcctcaggacgaagaccagaaggacgcacttccgagtggaggagctggttcatctctgagccagggtgaccctgacgcagccatctggttgggagattcgctgggatcgatgactcagaaaagcgacctgtcctcctcatctgggtccctgagcttgtctcacggctccagctctctagagcacagatcagaggacagcaccatctatgatctcctgaaggatcctgtctcgctgagaagcaaagcacgccgggccaagaaagccaaggccagctcggcgctggtggtctgtggagggcagggccaccgccgggtgcacaggaaggcccggcagccccaccaggaagagctggcgccgaccgtcatggtctggcagatccctctgctgaatatataagcaggacggccgccttctgctgtcagaatttgcaatcaagggtgacttctcagctaatcctacagcctgagtggttaagctgtgtctacactggttgggaataaattaaaaacagtatttgggggagaaacgtgcaatagcgtaatggtggtgtccctgccaattccttccttctcttctgtacagcagaagtaattacaagcacttctcacgaaggcagaagactgatgcaattttcgagtaattgagtgcagttctgggaaaataccacattctttttgactgctgtagtccatatatgaatactaaatgttaaacttcatcagcgtcagacctattgtatcatattagagaatttgcagactaagaatttatgagaaaatatatgtattcagtagtgcaggcatttattaacaattcttaaaagttttacctgattcagattcacgacttttatttatattctatatttttgaatttcagagtaaaatttgttaacaattttaaaagccaggtaacacctaccagtccagttagcatgatttgctttcagaagtgagctgggttttccaaagtggtataatgtgtgtactgtatattttaacaaagtaatatttttgtattgcatttttctattaaaaaattaacagttaatgtttcagtcaatgtattatctgtagcatttcacaaataatgtttgctttgaaccaaaatgctcagtgcctatcaacatttggactcaagcatcaacaccaaattattcctcccttctcgtataaatagagtgactatccacaggagaaaagtgtgtgctttagtattagaggagataggcagagaagtcttgcttagttccttcgtgcagcttcttgcccctgttgacgtggaatgctgtgtctgctttagcacgcacgctccgaatgactcctggtgctaggccatgctggctgctgtcactgagcgggactcaggccaagaggcgtgacctcgggccagcctgtctgttgtgcagacgcctcctctgcagaacgcatcagtttctattctgcagttgcagagccagccccgcgtgagaacgtgcataatgagtgcacaccatcatgtcaaggtgcatacttagtgagcgccatcctgctgaacgtgtatttcagtgtttcacttactggacggataacaagaaaaaaatcctaacacaggcagtcaccagaaataaatgtctcagcactttacagatgactaaaaatgttaattttatgacttagccaaatatgttctaggttgcatatatcccccatgtgaaagtgatttcttcccaagcttctcaaactgttagctgctgtctgacttcatcaataaagtatttttattttaaaatgca

SEQ ID NO: 1009 - protein, 1109 aa, Homo sapiens
MHSDEMIYDDVENGDEGGNSSLEYGWSSSEFESYEEQSDSECKNGIPRSFLRSNHKKQLSHDLTRLKEHYEKKMRDLMASTVGVVEIQQLRQKHELKMQKLVKAAKDGTKDGLERTRAAVKRGRSFIRTKSLIAQDHRSSLEEEQNLFIDVDCKHPEAILTPMPEGLSQQQVVRRYILGSVVDSEKNYVDALKRIQYEKPLSEMEPKVLSKLKTVFYRVKEILQCHSLFQIASRVSEWDSVEMIGDVFVASFSKSMVLDAYSEYVNNFSTAVAVLKKTCATKPAFLEFLKQEQEDDRTTKLMMKPIQRFPQFILLLQDMLKNTSKGHPDRLPLQMALTELETLAEKLNERKRDADQRCEVKQIAKAINERYLNKLLSSGSRYLIRSDDMIETVYNDRGEIVKTKERRVFMLNDVLMCATVSSRPSHDSRVMSSQRYLLKWSVPLGHVDAIEYGSSAGTGEHSRHLAVHPPESLAVVANAKPNKVYMGPGQLYQDLQNLLHDLNVIGQITQLIGNLKGNYQNLNQSVAHDWTSGLQRLILKKEDEIRAADCCRIQLQLPGKQDKSGRPTFFTAVFNTFTPAIKESWVNSLQMAKLALEEENHMGWFCVEDDGNHIKKEKHPLLVGHMPVMVAKQQEFKIECAAYNPEPYLNNESQPDSFSTAHGFLWIGSCTHQMGQIAIVSFQNSTPKVIECFNVESRILCMLYVPVEEKRREPGAPPDPETPAVRASDVPTICVGTEEGSISIYKSSQGSKKVRLQHFFTPEKSTVMSLACTSQSLYAGLVNGAVASYARAPDGSWDSEPQKVIKLGVLPVRSLLMMEDTLWAASGGQVFIISVETHAVEGQLEAHQEEGMVISHMAVSGVGIWIAFTSGSTLRLFHTETLKHLQDINIATPVHNMLPGHQRLSVTSLLVCHGLLMVGTSLGVLVPVPRLQGIPKVTGRGMVSYHAHNSPVKFIVLATALHEKDKDKSRDSLAPGPEPQDEDQKDALPSGGAGSSLSQGDPDAAIWLGDSLGSMTQKSDLSSSSGSLSLSHGSSSLEHRSEDSTIYDLLKDPVSLRSKARRAKKAKASSALVVCGGQGHRRVHRKARQPHQEELAPTVMVWQIPLLNI

SEQ ID NO: 1010 - DNA, 8300 bp, Homo sapiens
ttccccaaattgatggacataaacccatatgcttatctcagcatgtgtttaaaaagcacttgctgagattcagtgaccatccaacattaaaaactgctgatagaaggaaactcacttagctgaattaaggacgtgttcttaaaatctaccgccaacgtaatggggaggagctcacggcgttcgttaatttattcattccgcaaatatgttttgggcagttacataccgaatagtagatggaggtgtgcctgctgtcatggagatagggtgatttcatcctgttgatcaggaaaactcctaggtgcttgcaggtaaatgtgccacaaagaaagtgaggaccaaaggttagttgatgtaaaaacaagtttgaaatgcattttggggtaatttatccggtcgcttcgggcattcctcgcggaaggcgtggtctggtgactcagaagccaacacactgcgggagtccagccgtcggccccctgccgtgtggcgaggcccagtgtgtcccctttgtaaggacagcacaagcaggagttaatggaccggccatccatagcggtggtggggcagggagccagtttccgaaagaaactcacgccgccgcaggagggccctgtgggatgctctgtgcagagctgttgtgcggaccgggagacgggaaagcctggtggctgcaggagggcaccgtgcagaagtatccagtaaaccacccacagcacggcagcagaaaaacgagtaaattatatgtgtgtatgtttatgagaactcagaagcaatggtgagcaaaaagcaaaagcaagaggagaaagtcacagtgtgctggcatcaagttgcattgagaggagcccgcggggtagtgcacccgcatttcctcgttgcgttgagaggcgcccgcggggtagtgcacccgcatttcctcgtttgagaggcgcccgcggggtagtgcacccgcatttcctagttgccttgagaggtgccgcggggtagtgcacccgcatttcctagttgccttgagaggtgcccgcggggtagtgcacccgcatttcctagttgccttgagaggtgccgcggggtagtgcacccgcatttcctcgtttcattgagcggtgcccgcggggtagtgcactcgcatttcctagttgccttgagaggtgccgcggggtagtgcacccacatttcttcactcgtttagagttcggggctctcagaacacagggagaatatgggagaattccttactagatgttacagaggccacacagggccacttttttcttttttttttattgtgtcaggtatacgtaaatattcctttcggtcagttcagcacgtaggactgagtggcattaggtacgctcactgtacagccaatgcctccataggccactttttaaatacgcggggctaagggccaacgacaagattgtcatcgaggacaataagtcgatggcgctgcctggtcactggcttggtcagaatacacatgccagggtgactggatttaacgttcagttttagaaccacaaatctgccagcccaggcattcaagaggaagtgagtaattcactgaattgatggttagcaagacccttcaaagtccttggaagttccgtgtttgctgggggtcacaacagcaattgcgtttctaaaacattgaaaaccacccggttttcacacatctgaatagcctgagttctaacagacctaagtaaaggcgtccaaacgtgcctgatcctgtggctgggtcccaggagccttaacaaggcattgagagagctggattgattgattagactcttgccaactgctgtgcggaatacagaaaatgcagctccagctctcaaagggctgaaaatctaattgaggtgaaaaaggtaacatgtgtgaaaaccatgtctgtgtagacttgttttgtatggaccagaaaagttggaagtccagagatggatgcgaggaaataggggatggagtttccttataacctctggagggacagtccagatacataccggggtgtgtagcgggtggaggttctaagacaggctggaggaacagtgcagacacacaccagggtgtgtagggggtagaggttctaagacagtctggagggagagtgcagacacacaccgggggcgtgtagggggtagaggttctaagacagtctggtgggagagtgcagacacacccggggccgtgtagggggtacaggttctaagacagtctggtgggagagtgcagacacacaccagggcgtgtagggggtggaggttctaagacaggctggaggaacagtggagacacacactggggagcataggggtgcttttctctgagtcccctagtacatggtagaggctgtagaccctccgctcttgggcacgtgggtaggctctcaggatgactcttggctcttgggcatgtgggtgagctctcaggatgatgcccagccccaattttcaggcaattgtgcaaggacttgacccattcatccgctgagctgagttgctgagactgctgggtgcccgggtggtgatcattgtccgtggcatacagaacacactgcagcttctgcaaagtgagctcatttcacgcattttatggctttgccaggctgctgttgacctgccagaacttttaatcagacatttggaggacctgttttgtagtcagtggagaaatattacaaggatagggtaatttgaaatatctaaggattgtaagtgacaagttcatgtctaattttgcatttccagtgaaagcaagtgttggctttgaatgttacttatgtgctgagatgtgtatattcctcagtgcttaattactaaggatttttaaggccaagttttgttacagtgaatgactgtggatgcataaagaataaatttaatatttttaaggcatggagattatttgtatctaagaaaccaggtaaaataaagaaacatttatgcttgtgtgactgataaaagagttagagagacactcatattctgggagtttgaagaatgtcattttcattctctaaaagtcttgttagtgtcacagcattgaaaatttaaaaatccgtgtgtattttcttgctagtgctggtacttgaatatctgtatcatccacctatccatccacctacccatatttctataatccaccgtccatcgacatgcctatcatctgtccaccatttctctctgtctaattttcaaaacatcctgtaagtttatataaaggaagatttttcttcttgtgaagttctctaaggctgacaagttacctggcatgactgtggcggatgcccatagccaggtggtcctcggggtacagatggggcaggggcacttgtgagaaacacctgaagtgcttttccccagcctccccggccctgcccgggtggtggaggcgctgcacggtgccttccatggagcaagccccgggctccgcagggtcctcagcatgattcagatttccttccacccccagctctagatgatttggtaaaaccacaaacaggcacaaaacagcccacatggaattctaaagttttaatttcattttggaatttatgcactcagatgaaatgatttatgatgatgttgagaatggggatgaaggtggaaacagctccttggaatacggatggagttcgagtgaatttgaaagttacgaagagcagagtgactcggagtgcaagaatgggattcccaggtccttcctgcgcagcaaccacaaaaagcaactttctcatgacctaacccgtttaaaggagcactatgagaaaaagatgagagatttgatggcaagcacggtgggcgtggtggagattcagcagctcaggcagaagcatgaactgaagatgcagaagctcgtgaaggccgcgaaggacggcaccaaggacgggctggagaggaccagggcagccgtgaagaggggccgctccttcatcaggaccaagtctctcatcgcacaggatcacagatcttctcttgaggaagaacagaatttgttcattgatgttgactgcaagcacccggaagccatcttgaccccgatgcccgagggtttatctcagcagcaggttgtaagaagatatatactgggttcagttgtcgacagtgaaaagaactacgtagatgctcttaagaggattttggagcaatatgagaagccgctgtctgagatggagccaaaggttctgagtgagaggaagctgaagacggtgttctaccgagtcaaagagatcctgcagtgccactcgctatttcagatcgcgctggccagccgcgtttccgagtgggactccgtggaaatgataggcgatgtcttcgtggcttcgttttctaagtccatggtgctggatgcatacagtgaatatgtgaacaatttcagcacagccgtggcagtcctcaagaaaacatgtgccacaaagcccgcttttcttgaatttttaaagcaggaacaggaggccagccccgatcgaaccacgctctacagcctgatgatgaagcccatccagaggttcccacagttcatcctcctgctccaggacatgctgaagaacacctccaaaggccaccccgacaggctgcctcttcagatggccctgacagagctcgaaacactagcagagaagttaaatgaaagaaagagagatgctgatcaacgctgtgaagtgaagcaaatagccaaagccataaacgaaagatacctgaacaagcttctcagcagtggaagccgatacctcattcgatcagatgatatgatagaaacagtttacaacgacagaggagagattgttaaaaccaaagaacgccgagtcttcatgttaaatgatgtgttaatgtgtgccaccgtcagctcacgcccctctcatgacagccgtgtgatgagcagccagaggtacttgctgaagtggagcgttccactgggacatgtggacgccatcgagtacggcagcagcgcaggcacgggcgagcacagcaggcaccttgccgttcacccgccggagagcctggccgtggttgctaacgcgaaaccaaacaaagtttacatggggccaggacaactgtatcaagatttacaaaacttgttgcatgacttaaatgtaattggccaaatcactcagctgataggaaaccttaaaggaaactatcagaacttaaaccagtcagtagcccatgactggacatcaggtttacaaaggcttattttgaagaaagaagatgaaatcagagctgcggactgctgcagaattcagttacagcttcccgggaagcaggacaaatctgggcgaccgacgttctttacagctgtgttcaatacgttcacccctgccatcaaggagtcctgggtcaacagcttacagatggccaagctcgccctagaagaggagaaccacatgggctggttctgtgtggaagacgatgggaatcacattaaaaaggagaagcatcctctcctcgtcggacacatgcccgtgatggtggccaagcagcaggagttcaagattgaatgtgctgcttataaccctgaaccttacctaaataatgaaagccagccagattcattttccacggcacatggtttcctgtggatcggaagttgcacccatcaaatgggtcagattgccatcgtctcgtttcaaaattccactcccaaagtcattgagtgcttcaacgtggaatctcgcatcctgtgcatgctgtacgttcccgtcgaggagaagcgcagagagcctggggcacccccggaccccgagaccccggccgtgagagcttctgatgtccccacgatctgtgtagggacggaggagggaagcatttccatttataaaagcagtcaaggctccaagaaagtgagacttcagcactttttcactcctgagaagtccacagtcatgagcctggcttgcacgtctcagagcctgtacgctggcctggtcaacggggcagtcgccagctacgccagagccccagatggatcctgggattcagaacctcaaaaagtgatcaagttaggcgtcctaccagttagaagtctactcatgatggaagacacgttgtgggcggcttccggaggtcaagtcttcatcatcagtgtggagactcatgctgtagagggtcagctggaggcccaccaggaggaaggcatggtgatctcccacatggccgtgtccggcgtcgggatctggattgccttcacctcagggtccacgctccgcctttttcacacggaaactctcaagcacctgcaggacatcaacatcgccacccctgttcacaacatgctgccagggcaccagcggctgtcggtgacgagcctgctcgtctgccacggattgctgatggtcggcaccagcctgggagtcctcgtggccctgccggtcccacgtctgcaagggattcccaaagtgaccggaagaggcatggtctcctaccatgcacacaacagtcctgtcaaattcatcgtcctggccacggctctgcacgagaaagacaaggacaaatccagggacagcctggctcctggccccgagcctcaggacgaagaccagaaggacgcacttccgagtggaggagctggttcatctctgagccagggtgaccctgacgcagccatctggttgggagattcgctgggatcgatgactcagaaaagcgacctgtcctcctcatctgggtccctgagcttgtctcacggctccagctctctagagcacagatcagaggacagcaccatctatgatctcctgaaggatcctgtctcgctgagaagcaaagcacgccgggccaagaaagccaaggccagctcggcgctggtggtctgtggagggcagggccaccgccgggtgcacaggaaggcccggcagccccaccaggaagagctggcgccgaccgtcatggtctggcagatccctctgctgaatatataagcaggacggccgccttctgctgtcagaatttgcaatcaagggtgacttctcagctaatcctacagcctgagtggttaagctgtgtctacactggttgggaataaattaaaaacagtatttgggggagaaacgtgcaatagcgtaatggtggtgtccctgccaattccttccttctcttctgtacagcagaagtaattacaagcacttctcacgaaggcagaagactgatgcaattttcgagtaattgagtgcagttctgggaaaataccacattctttttgactgctgtagtccatatatgaatactaaatgttaaacttcatcagcgtcagacctattgtatcatattagagaatttgcagactaagaatttatgagaaaatatatgtattcagtagtgcaggcatttattaacaattcttaaaagttttacctgattcagattcacgacttttatttatattctatatttttgaatttcagagtaaaatttgttaacaattttaaaagccaggtaacacctaccagtccagttagcatgatttgctttcagaagtgagctgggttttccaaagtggtataatgtgtgtactgtatattttaacaaagtaatatttttgtattgcatttttctattaaaaaattaacagttaatgtttcagtcaatgtattatctgtagcatttcacaaataatgtttgctttgaaccaaaatgctcagtgcctatcaacatttggactcaagcatcaacaccaaattattcctcccttctcgtataaatagagtgactatccacaggagaaaagtgtgtgctttagtattagaggagataggcagagaagtcttgcttagttccttcgtgcagcttcttgcccctgttgacgtggaatgctgtgtctgctttagcacgcacgctccgaatgactcctggtgctaggccatgctggctgctgtcactgagcgggactcaggccaagaggcgtgacctcgggccagcctgtctgttgtgcagacgcctcctctgcagaacgcatcagtttctattctgcagttgcagagccagccccgcgtgagaacgtgcataatgagtgcacaccatcatgtcaaggtgcatacttagtgagcgccatcctgctgaacgtgtatttcagtgtttcacttactggacggataacaagaaaaaaatcctaacacaggcagtcaccagaaataaatgtctcagcactttacagatgactaaaaatgttaattttatgacttagccaaatatgttctaggttgcatatatcccccatgtgaaagtgatttcttcccaagcttctcaaactgttagctgctgtctgacttcatcaataaagtatttttattttaaaatgca

SEQ ID NO: 1011 - protein, 1109 aa, Homo sapiens; identical to SEQ ID NO: 1009

SEQ ID NO: 1012 - DNA, 5286 bp, Homo sapiens
caggtgtagtaccagcctctcagtttggcagcgttcctcttggctcgcacggtgtttcttcaggaggtgaggatggagctggagcagaaaccaccccagtggcagagcctactaagctggtgctcccgatgaaagtcaacccatattctgtcatcgacatcacgccattccaggaggaccagccgcccacccccgtgcccagcgctgaggaggagaatgtgggtctccatgtgccctgcgggtacttggtgcctgtaccctgcggctatgcggtgccctccaacctgcccctcctgctgcccgcctactccagcccggtcatcatctgcgccacgtccctggacgaagaagcagaaacaccagaagtcacagaagatcgccagcccaattctctgagttccgaggagcctccaaccagtgaagatcaagtcggtcgagaggacagcgcacttgcccgctgggccgcagacccggccaacacagcctggatggagaatccagaggaagcaatttacgatgacgttccaagggaaaactcagactctgaaccagatgaaatgatttatgatgatgttgagaatggggatgaaggtggaaacagctccttggaatacggatggagttcgagtgaatttgaaagttacgaagagcagagtgactcggagtgcaagaatgggattcccaggtccttcctgcgcagcaaccacaaaaagcaactttctcatgacctaacccgtttaaaggagcactatgagaaaaagatgagagatttgatggcaagcacggtgggcgtggtggagattcagcagctcaggcagaagcatgaactgaagatgcagaagctcgtgaaggccgcgaaggacggcaccaaggacgggctggagaggaccagggcagccgtgaagaggggccgctccttcatcaggaccaagtctctcatcgcacaggatcacagatcttctcttgaggaagaacagaatttgttcattgatgttgactgcaagcacccggaagccatcttgaccccgatgcccgagggtttatctcagcagcaggttgtaagaagatatatactgggttcagttgtcgacagtgaaaagaactacgtagatgctcttaagaggattttggagcaatatgagaagccgctgtctgagatggagccaaaggttctgagtgagaggaagctgaagacggtgttctaccgagtcaaagagatcctgcagtgccactcgctatttcagatcgcgctggccagccgcgtttccgagtgggactccgtggaaatgataggcgatgtcttcgtggcttcgttttctaagtccatggtgctggatgcatacagtgaatatgtgaacaatttcagcacagccgtggcagtcctcaagaaaacatgtgccacaaagcccgcttttcttgaatttttaaagcaggaacaggaggccagccccgatcgaaccacgctctacagcctgatgatgaagcccatccagaggttcccacagttcatcctcctgctccaggacatgctgaagaacacctccaaaggccaccccgacaggctgcctcttcagatggccctgacagagctcgaaacactagcagagaagttaaatgaaagaaagagagatgctgatcaacgctgtgaagtgaagcaaatagccaaagccataaacgaaagatacctgaacaagcttctcagcagtggaagccgatacctcattcgatcagatgatatgatagaaacagtttacaacgacagaggagagattgttaaaaccaaagaacgccgagtcttcatgttaaatgatgtgttaatgtgtgccaccgtcagctcacgcccctctcatgacagccgtgtgatgagcagccagaggtacttgctgaagtggagcgttccactgggacatgtggacgccatcgagtacggcagcagcgcaggcacgggcgagcacagcaggcaccttgccgttcacccgccggagagcctggccgtggttgctaacgcgaaaccaaacaaagtttacatggggccaggacaactgtatcaagatttacaaaacttgttgcatgacttaaatgtaattggccaaatcactcagctgataggaaaccttaaaggaaactatcagaacttaaaccagtcagtagcccatgactggacatcaggtttacaaaggcttattttgaagaaagaagatgaaatcagagctgcggactgctgcagaattcagttacagcttcccgggaagcaggacaaatctgggcgaccgacgttctttacagctgtgttcaatacgttcacccctgccatcaaggagtcctgggtcaacagcttacagatggccaagctcgccctagaagaggagaaccacatgggctggttctgtgtggaagacgatgggaatcacattaaaaaggagaagcatcctctcctcgtcggacacatgcccgtgatggtggccaagcagcaggagttcaagattgaatgtgctgcttataaccctgaaccttacctaaataatgaaagccagccagattcattttccacggcacatggtttcctgtggatcggaagttgcacccatcaaatgggtcagattgccatcgtctcgtttcaaaattccactcccaaagtcattgagtgcttcaacgtggaatctcgcatcctgtgcatgctgtacgttcccgtcgaggagaagcgcagagagcctggggcacccccggaccccgagaccccggccgtgagagcttctgatgtccccacgatctgtgtagggacggaggagggaagcatttccatttataaaagcagtcaaggctccaagaaagtgagacttcagcactttttcactcctgagaagtccacagtcatgagcctggcttgcacgtctcagagcctgtacgctggcctggtcaacggggcagtcgccagctacgccagagccccagatggatcctgggattcagaacctcaaaaagtgatcaagttaggcgtcctaccagttagaagtctactcatgatggaagacacgttgtgggcggcttccggaggtcaagtcttcatcatcagtgtggagactcatgctgtagagggtcagctggaggcccaccaggaggaaggcatggtgatctcccacatggccgtgtccggcgtcgggatctggattgccttcacctcagggtccacgctccgcctttttcacacggaaactctcaagcacctgcaggacatcaacatcgccacccctgttcacaacatgctgccagggcaccagcggctgtcggtgacgagcctgctcgtctgccacggattgctgatggtcggcaccagcctgggagtcctcgtggccctgccggtcccacgtctgcaagggattcccaaagtgaccggaagaggcatggtctcctaccatgcacacaacagtcctgtcaaattcatcgtcctggccacggctctgcacgagaaagacaaggacaaatccagggacagcctggctcctggccccgagcctcaggacgaagaccagaaggacgcacttccgagtggaggagctggttcatctctgagccagggtgaccctgacgcagccatctggttgggagattcgctgggatcgatgactcagaaaagcgacctgtcctcctcatctgggtccctgagcttgtctcacggctccagctctctagagcacagatcagaggacagcaccatctatgatctcctgaaggatcctgtctcgctgagaagcaaagcacgccgggccaagaaagccaaggccagctcggcgctggtggtctgtggagggcagggccaccgccgggtgcacaggaaggcccggcagccccaccaggaagagctggcgccgaccgtcatggtctggcagatccctctgctgaatatataagcaggacggccgccttctgctgtcagaatttgcaatcaagggtgacttctcagctaatcctacagcctgagtggttaagctgtgtctacactggttgggaataaattaaaaacagtatttgggggagaaacgtgcaatagcgtaatggtggtgtccctgccaattccttccttctcttctgtacagcagaagtaattacaagcacttctcacgaaggcagaagactgatgcaattttcgagtaattgagtgcagttctgggaaaataccacattctttttgactgctgtagtccatatatgaatactaaatgttaaacttcatcagcgtcagacctattgtatcatattagagaatttgcagactaagaatttatgagaaaatatatgtattcagtagtgcaggcatttattaacaattcttaaaagttttacctgattcagattcacgacttttatttatattctatatttttgaatttcagagtaaaatttgttaacaattttaaaagccaggtaacacctaccagtccagttagcatgatttgctttcagaagtgagctgggttttccaaagtggtataatgtgtgtactgtatattttaacaaagtaatatttttgtattgcatttttctattaaaaaattaacagttaatgtttcagtcaatgtattatctgtagcatttcacaaataatgtttgctttgaaccaaaatgctcagtgcctatcaacatttggactcaagcatcaacaccaaattattcctcccttctcgtataaatagagtgactatccacaggagaaaagtgtgtgctttagtattagaggagataggcagagaagtcttgcttagttccttcgtgcagcttcttgcccctgttgacgtggaatgctgtgtctgctttagcacgcacgctccgaatgactcctggtgctaggccatgctggctgctgtcactgagcgggactcaggccaagaggcgtgacctcgggccagcctgtctgttgtgcagacgcctcctctgcagaacgcatcagtttctattctgcagttgcagagccagccccgcgtgagaacgtgcataatgagtgcacaccatcatgtcaaggtgcatacttagtgagcgccatcctgctgaacgtgtatttcagtgtttcacttactggacggataacaagaaaaaaatcctaacacaggcagtcaccagaaataaatgtctcagcactttacagatgactaaaaatgttaattttatgacttagccaaatatgttctaggttgcatatatcccccatgtgaaagtgatttcttcccaagcttctcaaactgttagctgctgtctgacttcatcaataaagtatttttattttaaaatgca

SEQ ID NO: 1013 - protein, 1245 aa, Homo sapiens
MKVNPYSVIDITPFQEDQPPTPVPSAEEENVGLHVPCGYLVPVPCGYAVPSNLPLLLPAYSSPVIICATSLDEEAETPEVTEDRQPNSLSSEEPPTSEDQVGREDSARWAADPANTAWMENPEEAIYDDVPRENSDSEPDEMIYDDVENGDEGGNSSLEYGWSSSEFESYEEQSDSECKNGIPRSFLRSNHKKQLSHDLTRLKEHYEKKMRDLMASTVGVVEIQQLRQKHELKMQKLVKAAKDGTKDGLERTRAAVKRGRSFIRTKSLIAQDHRSSLEEEQNLFIDVDCKHPEAILTPMPEGLSQQQVVRRYILGSVVDSEKNYVDALKRIQYEKPLSEMEPKVLSKLKTVFYRVKEILQCHSLFQIASRVSEWDSVEMIGDVFVASFSKSMVLDAYSEYVNNFSTAVAVLKKTCATKPAFLEFLKQEQEDDRTTKLMMKPIQRFPQFILLLQDMLKNTSKGHPDRLPLQMALTELETLAEKLNERKRDADQRCEVKQIAKAINERYLNKLLSSGSRYLIRSDDMIETVYNDRGEIVKTKERRVFMLNDVLMCATVSSRPSHDSRVMSSQRYLLKWSVPLGHVDAIEYGSSAGTGEHSRHLAVHPPESLAVVANAKPNKVYMGPGQLYQDLQNLLHDLNVIGQITQLIGNLKGNYQNLNQSVAHDWTSGLQRLILKKEDEIRAADCCRIQLQLPGKQDKSGRPTFFTAVFNTFTPAIKESWVNSLQMAKLALEEENHMGWFCVEDDGNHIKKEKHPLLVGHMPVMVAKQQEFKIECAAYNPEPYLNNESQPDSFSTAHGFLWIGSCTHQMGQIAIVSFQNSTPKVIECFNVESRILCMLYVPVEEKRREPGAPPDPETPAVRASDVPTICVGTEEGSISIYKSSQGSKKVRLQHFFTPEKSTVMSLACTSQSLYAGLVNGAVASYARAPDGSWDSEPQKVIKLGVLPVRSLLMMEDTLWAASGGQVFIISVETHAVEGQLEAHQEEGMVISHMAVSGVGIWIAFTSGSTLRLFHTETLKHLQDINIATPVHNMLPGHQRLSVTSLLVCHGLLMVGTSLGVLVPVPRLQGIPKVTGRGMVSYHAHNSPVKFIVLATALHEKDKDKSRDSLAPGPEPQDEDQKDALPSGGAGSSLSQGDPDAAIWLGDSLGSMTQKSDLSSSSGSLSLSHGSSSLEHRSEDSTIYDLLKDPVSLRSKARRAKKAKASSALVVCGGQGHRRVHRKARQPHQEELAPTVMVWQIPLLNI

SEQ ID NO: 1014 - DNA, 5199 bp, Homo sapiens
caggtgtagtaccagcctctcagtttggcagcgttcctcttggctcgcacggtgtttcttcaggaggtgaggatggagctggagcagaaaccaccccagtggcagagcctactaagctggtgctcccgatgaaagtcaacccatattctgtcatcgacatcacgccattccaggaggaccagccgcccacccccgtgcccagcgctgaggaggagaatgtgggtctccatgtgccctgcgggtacttggtgcctgtaccctgcggctatgcggtgccctccaacctgcccctcctgctgcccgcctactccagcccggtcatcatctgcgccacgtccctggacgaagaagcagaaacaccagaagtcacagaagatcgccagcccaattctctgagttccgaggagcctccaaccagtgaagatcaagtcggtcgagaggacagcgcacttgcccgctgggccgcagacccggccaacacagcctggatggagaatccagaggaagcaatttacgatgacgttccaagggaaaactcagactctgaaccagatgaaatgatttatgatgatgttgagaatggggatgaaggtggaaacagctccttggaatacggatggagttcgagtgaatttgaaagttacgaagagcagagtgactcggagtgcaagaatgggattcccaggtccttcctgcgcagcaaccacaaaaagcaactttctcatgacctaacccgtttaaaggagcactatgagaaaaagatgagagatttgatggcaagcacggtgggcgtggtggagattcagcagctcaggcagaagcatgaactgaagatgcagaagctcgtgaaggccgcgaaggacggcaccaaggacgggctggagaggaccagggcagccgtgaagaggggccgctccttcatcaggaccaagtctctcatcgcacaggatcacagatcttctcttgaggaagaacagaatttgttcattgatgttgactgcaagcacccggaagccatcttgaccccgatgcccgagggtttatctcagcagcaggttgtaagaagatatatactgggttcagttgtcgacagtgaaaagaactacgtagatgctcttaagaggattttggagcaatatgagaagccgctgtctgagatggagccaaaggttctgagtgagaggaagctgaagacggtgttctaccgagtcaaagagatcctgcagtgccactcgctatttcagatcgcgctggccagccgcgtttccgagtgggactccgtggaaatgataggcgatgtcttcgtggcttcgttttctaagtccatggtgctggatgcatacagtgaatatgtgaacaatttcagcacagccgtggcagtcctcaagaaaacatgtgccacaaagcccgcttttcttgaatttttaaagcaggaacaggaggccagccccgatcgaaccacgctctacagcctgatgatgaagcccatccagaggttcccacagttcatcctcctgctccaggacatgctgaagaacacctccaaaggccaccccgacaggctgcctcttcagatggccctgacagagctcgaaacactagcagagaagttaaatgaaagaaagagagatgctgatcaacgctgtgaagtgaagcaaatagccaaagccataaacgaaagatacctgaacaagcttctcagcagtggaagccgatacctcattcgatcagatgatatgatagaaacagtttacaacgacagaggagagattgttaaaaccaaagaacgccgagtcttcatgttaaatgatgtgttaatgtgtgccaccgtcagctcacgcccctctcatgacagccgtgtgatgagcagccagaggtacttgctgaagtggagcgttccactgggacatgtggacgccatcgagtacggcagcagcgcaggcacgggcgagcacagcaggcaccttgccgttcacccgccggagagcctggccgtggttgctaacgcgaaaccaaacaaagtttacatggggccaggacaactgtatcaagatttacaaaacttgttgcatgacttaaatgtaattggccaaatcactcagctgataggaaaccttaaaggaaactatcagaacttaaaccagtcagtagcccatgactggacatcaggtttacaaaggcttattttgaagaaagaagatgaaatcagagctgcggactgctgcagaattcagttacagcttcccgggaagcaggacaaatctgggcgaccgacgttctttacagctgtgttcaatacgttcacccctgccatcaaggagtcctgggtcaacagcttacagatggccaagctcgccctagaagaggagaaccacatgggctggttctgtgtggaagacgatgggaatcacattaaaaaggagaagcatcctctcctcgtcggacacatgcccgtgatggtggccaagcagcaggagttcaagatcggaagttgcacccatcaaatgggtcagattgccatcgtctcgtttcaaaattccactcccaaagtcattgagtgcttcaacgtggaatctcgcatcctgtgcatgctgtacgttcccgtcgaggagaagcgcagagagcctggggcacccccggaccccgagaccccggccgtgagagcttctgatgtccccacgatctgtgtagggacggaggagggaagcatttccatttataaaagcagtcaaggctccaagaaagtgagacttcagcactttttcactcctgagaagtccacagtcatgagcctggcttgcacgtctcagagcctgtacgctggcctggtcaacggggcagtcgccagctacgccagagccccagatggatcctgggattcagaacctcaaaaagtgatcaagttaggcgtcctaccagttagaagtctactcatgatggaagacacgttgtgggcggcttccggaggtcaagtcttcatcatcagtgtggagactcatgctgtagagggtcagctggaggcccaccaggaggaaggcatggtgatctcccacatggccgtgtccggcgtcgggatctggattgccttcacctcagggtccacgctccgcctttttcacacggaaactctcaagcacctgcaggacatcaacatcgccacccctgttcacaacatgctgccagggcaccagcggctgtcggtgacgagcctgctcgtctgccacggattgctgatggtcggcaccagcctgggagtcctcgtggccctgccggtcccacgtctgcaagggattcccaaagtgaccggaagaggcatggtctcctaccatgcacacaacagtcctgtcaaattcatcgtcctggccacggctctgcacgagaaagacaaggacaaatccagggacagcctggctcctggccccgagcctcaggacgaagaccagaaggacgcacttccgagtggaggagctggttcatctctgagccagggtgaccctgacgcagccatctggttgggagattcgctgggatcgatgactcagaaaagcgacctgtcctcctcatctgggtccctgagcttgtctcacggctccagctctctagagcacagatcagaggacagcaccatctatgatctcctgaaggatcctgtctcgctgagaagcaaagcacgccgggccaagaaagccaaggccagctcggcgctggtggtctgtggagggcagggccaccgccgggtgcacaggaaggcccggcagccccaccaggaagagctggcgccgaccgtcatggtctggcagatccctctgctgaatatataagcaggacggccgccttctgctgtcagaatttgcaatcaagggtgacttctcagctaatcctacagcctgagtggttaagctgtgtctacactggttgggaataaattaaaaacagtatttgggggagaaacgtgcaatagcgtaatggtggtgtccctgccaattccttccttctcttctgtacagcagaagtaattacaagcacttctcacgaaggcagaagactgatgcaattttcgagtaattgagtgcagttctgggaaaataccacattctttttgactgctgtagtccatatatgaatactaaatgttaaacttcatcagcgtcagacctattgtatcatattagagaatttgcagactaagaatttatgagaaaatatatgtattcagtagtgcaggcatttattaacaattcttaaaagttttacctgattcagattcacgacttttatttatattctatatttttgaatttcagagtaaaatttgttaacaattttaaaagccaggtaacacctaccagtccagttagcatgatttgctttcagaagtgagctgggttttccaaagtggtataatgtgtgtactgtatattttaacaaagtaatatttttgtattgcatttttctattaaaaaattaacagttaatgtttcagtcaatgtattatctgtagcatttcacaaataatgtttgctttgaaccaaaatgctcagtgcctatcaacatttggactcaagcatcaacaccaaattattcctcccttctcgtataaatagagtgactatccacaggagaaaagtgtgtgctttagtattagaggagataggcagagaagtcttgcttagttccttcgtgcagcttcttgcccctgttgacgtggaatgctgtgtctgctttagcacgcacgctccgaatgactcctggtgctaggccatgctggctgctgtcactgagcgggactcaggccaagaggcgtgacctcgggccagcctgtctgttgtgcagacgcctcctctgcagaacgcatcagtttctattctgcagttgcagagccagccccgcgtgagaacgtgcataatgagtgcacaccatcatgtcaaggtgcatacttagtgagcgccatcctgctgaacgtgtatttcagtgtttcacttactggacggataacaagaaaaaaatcctaacacaggcagtcaccagaaataaatgtctcagcactttacagatgactaaaaatgttaattttatgacttagccaaatatgttctaggttgcatatatcccccatgtgaaagtgatttcttcccaagcttctcaaactgttagctgctgtctgacttcatcaataaagtatttttattttaaaatgca

SEQ ID NO: 1015 - protein, 1216 aa, Homo sapiens
MKVNPYSVIDITPFQEDQPPTPVPSAEEENVGLHVPCGYLVPVPCGYAVPSNLPLLLPAYSSPVIICATSLDEEAETPEVTEDRQPNSLSSEEPPTSEDQVGREDSARWAADPANTAWMENPEEAIYDDVPRENSDSEPDEMIYDDVENGDEGGNSSLEYGWSSSEFESYEEQSDSECKNGIPRSFLRSNHKKQLSHDLTRLKEHYEKKMRDLMASTVGVVEIQQLRQKHELKMQKLVKAAKDGTKDGLERTRAAVKRGRSFIRTKSLIAQDHRSSLEEEQNLFIDVDCKHPEAILTPMPEGLSQQQVVRRYILGSVVDSEKNYVDALKRIQYEKPLSEMEPKVLSKLKTVFYRVKEILQCHSLFQIASRVSEWDSVEMIGDVFVASFSKSMVLDAYSEYVNNFSTAVAVLKKTCATKPAFLEFLKQEQEDDRTTKLMMKPIQRFPQFILLLQDMLKNTSKGHPDRLPLQMALTELETLAEKLNERKRDADQRCEVKQIAKAINERYLNKLLSSGSRYLIRSDDMIETVYNDRGEIVKTKERRVFMLNDVLMCATVSSRPSHDSRVMSSQRYLLKWSVPLGHVDAIEYGSSAGTGEHSRHLAVHPPESLAVVANAKPNKVYMGPGQLYQDLQNLLHDLNVIGQITQLIGNLKGNYQNLNQSVAHDWTSGLQRLILKKEDEIRAADCCRIQLQLPGKQDKSGRPTFFTAVFNTFTPAIKESWVNSLQMAKLALEEENHMGWFCVEDDGNHIKKEKHPLLVGHMPVMVAKQQEFKIGSCTHQMGQIAIVSFQNSTPKVIECFNVESRILCMLYVPVEEKRREPGAPPDPETPAVRASDVPTICVGTEEGSISIYKSSQGSKKVRLQHFFTPEKSTVMSLACTSQSLYAGLVNGAVASYARAPDGSWDSEPQKVIKLGVLPVRSLLMMEDTLWAASGGQVFIISVETHAVEGQLEAHQEEGMVISHMAVSGVGIWIAFTSGSTLRLFHTETLKHLQDINIATPVHNMLPGHQRLSVTSLLVCHGLLMVGTSLGVLVPVPRLQGIPKVTGRGMVSYHAHNSPVKFIVLATALHEKDKDKSRDSLAPGPEPQDEDQKDALPSGGAGSSLSQGDPDAAIWLGDSLGSMTQKSDLSSSSGSLSLSHGSSSLEHRSEDSTIYDLLKDPVSLRSKARRAKKAKASSALVVCGGQGHRRVHRKARQPHQEELAPTVMVWQIPLLNI

SEQ ID NO: 1016 - DNA, 132973 bp, Mus musculus
  misc_feature (1)...(132973): n = A,T,C or G
ctgaacacaaatattcatagcattttattcaacactacccaaattagaagcaaccaatttctaaaaggtaaatgattaaaaaaaaaaaacaaaaacaaaaacaaaacaaaacttgtctattcatgactacaaaagtcatgtcttttcagggaagaacttcagttgttgggttttttttgtttttatttttatgcattagattccctaaaagtgaaggtaaacgtggctgtgagccaccatgtgggtgctggaaactgaatcaggttcctctgccatgagtattaagttctcttaaccactgagccatctctctagtccctcatgggagaactgtaattgcatattgctaagtggaagaattcagtctgaagtgtgtgattccaattgcttggcattctgggaaagacaaaactacagagggaaacatctgtagtcaccagactgaaagagagacacagcagatacaaacaggcacaagacaggtgttttagaacagtgagactattgcatgtgaccctgtgatggtggaccgggaggtcctcagagctgacagacctgggaaccacaaagtgtgaatcccagcgtcagccatgtgctttcattaataacagtgtataatgtattaacattagtcacatgtaccacacggatgcaagttgttatcaacagcaaacccacaggctgtgagagctgaatatgtggaatatggcaactctattttctgtctagttttcctgtaaacctatgaaactgctttaaaaactaaagtctattagttctttaagaaagctttaaaatcccgtgtacctttttggattcactttcaaaagttgatggcaacatgtctgggaagagcttcagaaacactggtatcaagaactccataaaaggtacaattatgaacaccataaatggaaccaagcggaagacatcggcacacgttctcaacagctgaagagacaaacgcacagcaatgttatatatgcaggttatgccccaaccgaaccatccaagacccactgccaaaacaaagcctgcctttgtctcagagtgtggaaacactaaggtttccacagctggaaacacagctctcaagtagtatgtatgggctaccctcaaagaaacctatgacaatatgcattaatgaacatctcttaaaggtccacatttttataaaaccctgtatcagctaagattagttgaaggttactacgttgcccaggctgatcttgaactcctgggctcaactgctgctcctgcctcagtgtcctcagtacctatgattaacattatgctctactgcatttggcttaaaaacgtacacacgaggcaggggggctgagacagggtttctctgtgtagccctggctgacctggctgttgaccaggctggcctcgcactgcctctgcttcagtgcagggattaaagatacgtgccaccactacctggcttatatttttgatatataaaacatgaagcctttcaagaccttgagaagattaaaaacacaattataggactggagagatggctcagaagagcacaggacaggagttcggttcccagcacccacgtcaggggggcttacaatggtctgtaaccccagttccagatcagatgcctctggcttctgcagatgcctacactcacatgcacacacccacatactgacacacgcttatacataatttaaaataatgaaaataaatcctaaaaaaaactcacaattttaacaattctgtaggcaaagttgaagacaagtaagatcagaattaaacaggttcccaggggctgggaggatatatatatacacacatcctgctagatcccgctgggaggatctatacagatccttgctagatcccttgcttagatgctcaaggccctgggtcccaaccccagcaatggcaggaagctttggtttctgatcagtaattatagtttctactttaggagagcggggagtgctctgcatcaacctcagggcctacagcatgctaaggaagttacttaagattttgaagatggagttttcgtttttacttccccatttcaaatctgtttcttgcctacccttcgcctctctcgtctggttagcgcattaccatgcagtagcctccacactattctggcagcgactttggtgtcaatccaaagcaagctgaatcctttgtaatagtatttaagttcattcacaattttttgtctcaacgaccgcttttcttctgtagtctctgtcttggcttctttggtaggctgagggcttgctgcctttggcttccctgtttgctccagctgaggtttgccagggacatgttgtagccagcaggttgtgtgcagtttttgtgggagcctggtccgtaagggatggactttattattgcctgttagactgggataggagtacttcctgcttccgcagtttttaatgtaggctgtacgcaagtgagaatctggcaagtggagaaatgcaagtgatgggaaatgagagcaggaagggtacacagaatggccaggcagtctggaaaagaaggataacactctttcagtgagacatattattacaaacagtaacaaaaggatattttatctggttaaaacaagacaattaggctagaatataagtaactgatgtttattaatgaatgaaatacaattgtgtgtgtgtgtgtgtgtgtgtacttgtatgttgctgggcatcaacccaggaccttatatacttcctgagaatgtactctatcattgagctacaagcctcctctacccccagccagaaatacaacttttttcttttttttttttttttttttttgtttttgtttttttggtttttcgagacagggtttctctgtatagccctggctgtcctggaagccactttgtagaccaggctggcctcgaactcagaaatccgcctgcctctgcctccagagtgctgggattaaaggcgtgtgtcaccacgcctggctaacttttttcttttttaaactgacattgagacagggcttatatagccctggctctcctggaacttgctggtagaccaggctggcttggaattcagagatctgactgcctctgcctccctactgctgagattaaggtgtgcaccattaaaactatactgggaaccaaagccaaaaaaaaaaaaaaaagttcacatatgctaggcaagtgttcaaatagctgagttgtgctcaatcattgaacatattcttatgaaaaatatcagtaagttaattctgaagagtaatttgctatagcaagttccaagttctgaaactattaatgtaaacatctagtggccagtgagatagttcaagggtgtaaaagcacttgctgtcaaaccctggttaaatccttgggacccggatggtagaaggatagaactgactttcataagatgccctgtgatctccaaaagggtgtcaggggcatgctctttttgagtagttaagcaacaaaaagatttaaaatgtcttattagaaaaagtatctattcaaaaacatatttctgtcagggatgatatgacagtactgtctctactctcataaagtagccgaagctctgactgttagctactctactgacaaccaagaacattttgatgaaacaacttcatagtccctgtgaggattaaccaatcaggtgatactgttttgtccatgtgtctatagattccctcaaagggatgaaatataatctccctgaaattactcaagagactttgaaaaataggaattagaattgagcacttcgaccaatggtttttatattctaatcctgtagttaagctagaacataaataaaacacagccaagtagagatagcaccaagcagccagtcagtcaagagtggtgcacacctttaaacccagcactcaggagcagaagtgggcagatgcctgagttggaggccaccttggtctagagtgagttccaggacatagatacaaaacaaacaacaaaaacaaaaccccaagacaaacaaaaagaaaaagaaaggaaggaaggaaggaaggaaggaaggaaggaagaaaaaagaaagagaaagaaaaaagaaagagagaaggggagatttttgttgttgttcttggctaaaggatggccttttcccattctttaatgcaatttttaaacatatcaaaatatagcctataaatggacaaaaggaaaaatatacaatgaatgtggcaagtggtgagtgttcagttaatcttctgaatgcacaagtgagatgacaagggaccttagactggaacatgtcctgggctaagcttgtttaagagccattttacttttccttacacctgaggtcctcgtgtaatcttcatcaataacagaaatgccactctaaaactgtctcatctattttcctctatcatgtatttccaaaattactcagcttacattctaaagcagttcaaattaaaatatgttcttccttgaaatgtattgaaaactcagcaaggttttctgtactaagccaatctttttgttttgttggttacttcctttatttatttatgtatatttttgagacggtcttgatatgtagcccaggctggccttgaactcagagaccagcctgcctctgtctcctgagtgctgggactaaacgcatttgtcaccacgtcttttacaacacatgtttttcatatagatgcatgagtttatatacatttttttttgtgggaaactccaagccttaccttgtccagaaaatagctaagaatgaattataactgtagaaggccatgtttattttttttgtttcaactaaccaacacagagacctaggcaaaagaagcaaacaatttagtattttaaaaaggaatcaattaaacatgagaatttaggtggtttttttttttttttaagaaaaactaaggcaaagagagagatttgcatattcaaggtgtaaaatttccttcaagttcatttacaaaagcctcagtattttcttagctctggatttgaaaatggtactttttcgatccaaacacacagaaatgggttctaagaagatgatcctgaagacgatgtggcctccaaaggctttttttttttttaattttttaaatttctggtcaatagtgtctaataatctgctgcgacggttaaaaggagaaagacatctttatctgtaaccagaaaatacaagtagaaagtaagcaccctggattcatttaccaccaacccaaaagtctaaaagttctcactaatttcatgtgggaacagcgaagacataatggtatctactaaaggctcaagcgcagatgcagaatctccagagtccgaactaagctctgtacctttaactaaaaccgttctccaccccgagccgcttctcagctactggcataacactgcgatctcgcaatcgtgccggaaggaggttccccaggccctcaaccccaccctatggaaacctcagctaaaaagtaaacatcgcgaaccgggcacagcacctcggaaaccagccccaccgcggacagcgctcctccggagggaggccgggcctgttgcggaggctccccagcccttggccccggggctacgggccactcccaggcagtctgcccggcgtttcgggggaaccccacgcccagcgctgcggggttacctctgcaccccgcgctcgccgcaccggtgcaaaaggcgccctcggctctcggccggtagtctccgcggaaagtggggaggactgcggtgggtctggggattgttggagtggggtcaggtacaccgtaggggagaatgtccaaagtttaggggagagatcggggttgacgggagacgccgagggagcccttgtccgctgcgaggtgactaaggccccaaccctaccttcccaattcctccccgcccccacgctaaaggggccggaagcccagtctccatggttccacctcctgcgcctcgccctgtgacgtcactccgagtgacgccactaccatccaatgagctctcaaatcctgggactggctcgcgtccttcacggcagccgcgcggaaggcaacaaggtcccccgcacgagcccgcgaagtcacttctgggtcggagttagttgaggcagcgtctgtactacaggaccaaagctgcgtccccccccccccccctgcctgcccacattctgtagtctagccaactcctcgagaactccttgaatggaggccctaccagagtaaggtctgatagtagcctttgtaacccaaattggagtccctgatgacatcactttgatgattccgttcctcaccctttagtctccgaaactgcctaaaggtcttgggttggcgaaggaggttgtgaggtcctggtggcaaaggggcagccctgagaaaaaaaaaaaaaaaaaaaaaaaaaacctttcttctgcggggtcgaaggctggaatgcttctgaaatcttcatacggaatttgatttttctctttaaaaaatggtttcatgttgtcgcttatcattagttgtgtagaaatctcaacattcaaaaatatattctagagtacttgttaaataagataggcattgtgggtttgaggacgtttacgttcctagggcgggcaactagccatcttgggaaagttaaagttctgaaagcattcttgttcctatttatctgtttttttttttttcaatttctttttattttgcggggttcttatgtaacacgggctgggctggaactcaataggtagtagcagaaagtggtcttgaacccttgaaccacctgcctgcctccccagtgcttagttacaagtgtgtaccactgcagccatctttgactctatattttagtttgcttgcttatttatttatttagagacagggtttcacgatgtaggcctggctggcccagaactcgttatgtagaccaggcttgccttgaactcacagagattcatttgcctggtcctctaaattgctcagatttaaatgtgtgcaccaccatgcctggctcgagctttcttcaacttttctgagaactctgatgataaaattatgagctgtacaaaatagaataagttttgagggctgggcatggtagtgcatgccttttatgccagtacttaatagacaagactggcagatctgtgtgagctcaaggtcactctggtctacaaagtgagttccaagacagccagggctacacagtgggatcctgtttcaaaagaactaaaaaagaaaagaaaaaaagaaatggaggccgtttttaatcctaaaaaaaaaaaaaaaaaaaaaagtatatttcaactaaccgaatggactacttaaaataagcaaaacttttcagtttggccactaggggtccctttgtgcatgtcaggcaattttccactaggggttctgtttcacagtctgatcataaagaattgaaatttacaaaacttaactcctccttccccgccttgagacagggtctcaccatgtagccctggctggcctggaactcactgtgtagaccaggctagtctcgaactcactgagatcctcctggctcctgattaaagagcttattatgtcccataataaagagattatgtcccatgctaaagcttccctctccttgttttctcgctctgataattccaagctctacagtaattattttaatatttgtcaaatgcaaaaacattcttatcattttacaatgaaatatcttatggaaaaattcttatccatgaattatattcacttacaagcaggtacagtaaaatgtattatttaaaagccagatgaactatcccatacccagtatttgaaacataaagaagattttttaatctggtcacaagttaacaatccagttcttttaagaagggttggggggataagaaccctgatgagacccatttgttcaaagcaatgaatactttctccaggtttgtatactttatcaggtttgacaatttggtgtttaggataaattgaatatatttttaccaccataacctggagaaacctcttctgcttctgtcttgataagctgtttgctcgtttgctattgaaaagagtaagcatggtttgaacctcagaataggttagatgatggaaacataaagtattatgtgtgggtaaattggggaaggaggatttctgggtctaacaagacttaacagatgaacagtaaagtggtctaaggaggtagctcatctgaaaaggtgcttgcagtgccactgatgatgggagttcaagccctgtaatacggtgcaagtctggagctagctcccacaagcactcctctcatatttgcacacacacaaaataacacaaaaatcaacactattgttcctgtgcatggtggcacacactttaattatagcacttggcaggcagaggcagaaattatattaggttgaggccaacctggtcttcacaggaagttgaacagccagggaccctgtctcaaaaaaaaaaaaaaaaaaaaaaaagacttttcagggcaattgtggtgcatgcctttgatccaagcactagggaggcaggtggatctctgagttcaaagccagcctggtctacaaagggaattactccaggacatccaggactgttacacagagaaattctgtctccaaaaaccaaaatagagaccaaaccaaaataataataataatgataatatcatcaatggaattattttcatgatcacttttagtatgagtgcccattaaaatcagtgaactgcagagatttttctaaaattctgaggaggtgggctggagagatggatcaatggttaagagcacttgttcttgctgagtgcaagggtttgattcctagcacccaagaggttgctcacaaccatccataacaccagttccagtagatctgacacctttttttgaccttttcggggacatggcatgcacaaggcacacagatatatatgtgagcaaaacactgataaacataaaaatataaaatattaaaaacagttctgaggcagggcagtggtggtgcatgcctttaatcccagcacttgggagtcaggggcaggtggatttctgagttcaaggccagcctggtctacagagtgagttccaggatagccagggatacacagagaaaccctgtctcgaaaagaccaaaacaaaacaaaaaacaaaaaacccgccgggcgtggtggcgcatgccttaatcccagcatttgggaggcagaggcaggcggatttctgagtttgaggccagcctggtctacaaagtgagttagttccaggacagccagggctatacagagaaacaagtctcgaaaaacaaaacnnnnnnnnnnnnnnnnnnnnnnnnnnnnnnnnnnnnnnnnnnnnnnnnnnnnnnnnnnnnnnnnnnnnnacaaaacaaaaacaacaacaacaacaaaaaaaaaaccaaaaaaaaaaaaaaacaaaaaattctgaggtggtatttgaaacacatcaggaaatttcctttaatggtagcaaatgtagtctctatggagaggaggttgacactttttttgttttgttttgtttgtttgtttgtttttcgagacagggtttcactgtatagccctggctgtcctggaactcactttgtagaccaggctggcctcgaactcagaaatctgcctccggagtgctgtgataaaaggcgtgcaccaccacgcccgactggaggttgacactttgtagtgacagggttcggtaattctcagaacagaaagcaagagtgtatcggtttcctcatttgatggctacgtatgtttcctttgtaagttctcgtttctgggttggaccttctaagtaattaccaggccccaagaaactacatctgcacaccccttcaagactgtttacccggccctgtcactggatcactcgtatttcctagaatgggaagggcaaggggtttgcagaggactgcctcccttcctctcactctccggtgatcgctctgggacaaatatccccacgtcactcagtgcggagctctggcccggagcagcgcagggccggggcacgtgacccgcccgcagtcctcgctgtggcccgcggcccgggatgcagtcgcgctgacgtcctcccggctacccacaagcctctgtaccccggtgcgggcaggaagagggcaaccgggtccagtggctgcccgggagatcggggtgccttctgttgctggacgcggactgcccggcaacccccgggcacactggcggctaccggtctctctcccggggaaggagactgccccggctcgggctgtcgtcctaacgtgctggcccgtgtctgggacgccggggccagggcgctctgctgacagctgtcaggctgtcagtgactcccgggcactccccggtctgcgtcaccgcgtaccggtcatcaggttcttcctaacatctaggaatggtagcgcagggccactcgagtaccatatggcgtctagtacgtgctgccgtttagtaagtattagcctcgcaggcccgacctggctgcccctccgcaccagcccttcctgtccctctgcctcatcgcctgcggtctcgcgtctgctccagactctcgcgcgcccctcctctccgcggctgacgagcctcttcctccttcgctctcagcgccgagctccggactgcatttcccggcaggcgccgcggccagtagccaataggagacctaggatttggcggcggcggcgccgaacggggcgggggggctttgtgcgcggaggcggcggcggcggcggcgacggcggcgggagctggcggcgcggagatccggacggaggccgagaccggggctgggttgccgggtgtctgctgggagaggtgtgcagctttcgatcagaaccctgggaccctgctgcccttcggggccgccagcctccggctcctctccggcaccagcagctacgcggcgacccccgtccggccgcctccccttcgctccgcgtcgcccgcagccttccgtctgcccgcaaaacgagcccggccggccgggccgtggccgtcctcagtgccggccgccatggcaggggtgctcggcgcgggggaaatctagtccgaggatttcatgcggcctagctcggttccgtctcctgcgcccgcggtcccggcagctgccggcaacccagccccacttcgggcctcggtgtctctcctgtgatcgcactgacacggcaggggggttagaatggaacaaactgaaggtaaagtgcttgtgtatgtgtgtgttgcgcgtcagggctgaggaggctccttggggtgggggcgacctaagacccaggcacccataaggagtgagaccctggaagagaaggggccgcggatggcctgaaagggttctgggaaggaagagcagatggtaaggtgggtgtggaaggaattgggaggtggggcaggtaggcttgggatatgatgtagtggtgctgagctgggaattgggagtagaggtgggatgggggcggggataaggatggaaacgggggaggggtaggaaaagagaagagttagatttggacattagagacctaatgcaaatgaggataggtctggaatggagtgtggaaactagaagagttggggggaaagggataggggtgatggagaatcgaggcttcttctgggaatcaaggagagaaactagtgaatcaaagtggaggaaaagataagattaggaaatagggatgaaaaatgattgtgtcaggatgcaagagcaggataggaaatagacgcaggaaactgaaagacatacgattgggctagggaaggacattagctgagtgttggaaaggatgagaattatcgaccaggcgtcacagagtgtgaggaaaaggatggggattattgaagtgttagaagggaaagccttttgttcctatgtttgtgtgtattctgtcttgtatttcaaggctagagaaatagagaagctagtggttatggggttgtgattgttgtgaaatgagggaggtgtgggtgttactgttctgagagaagaggagatgtgtttgtgttatggtagggaggcagggaaagacatggccataatttgatggttttggtgagggagtaaagactattcagatttaaagggggcaggggcagccatgtttgttacccggcactgcagtgtaaataaattccttttcctctccgacatctgcgtgaatctggaaccggcagttcacattgttacacctccccttctactcatgaacttctcttacctcttgggtcatttgcaattactcataaccacggaaggacgcggcgatgtttcccatcttgtgtgttttgctgcctcttcctttctttccccctttccttctagttgcaaaaaaaggcatactgataaaccgcagtgtacattttcacccttttttataaatttaaaattagatttttaaaaaaaactaactgaagaaatcattgctatcatatttcaagcttgattgtgaaaagtcttaaatattgattggtttccgacacctcagaagcaagtcaacattttttttttccaattctttaagtaaacaaggaaactgcattggttattttacttggggcgcgttgagaaaggggtggggaagatcagcctgttgtagctcatctgcttgctggacttagggtcttggaaaattagaaatgttccaggtgatatgcatgttgttatgaataatgcttttttattagcttttcccctctcttccctttgctttcatgtagctagttcaatacagtctccaaatgccagttcagcagcgtgatctgtgaagtaggcatgtagtccttagatcctcactgagttgtcagcttttgaggggtgggtggaggggaagttctgtcactcccaggaaagcgccagtaattctttaatgcattcaaatctaactacttgtgtgatctaaatttagactaagggtctaagtcctgacaaagtagataaattggtattgggtgaaatttattttctattcatattgaaaaggattcagtattcaccttacttaaaataattgtaattatggtcatccaaactttagccatgtgttagtattgaaactgttttctaacaccagcaaggcctgctaactatacagtgggcttggtccatttgtactacatacaaatcttaatagtaatgttctctcagtttttgtagagtttggtggaaaacttaaatttaatgttgttggaatggtactatctgagattagactttgaataaatgtcagatttataacttggtgtattttggttgataatatatagcctgaaagaagtttttttgtttttttttttaattctaaagataaattttattcaaagtcattcagcatgtatgtggaatttatctaatttgtagagatattttatttgtattgctctcctggttgacatattatttgtagctagtagacttactttcattgactgtcagtgccatcacttttaggaaaatgagcaactgtatattacagcagagagtatctatttggaagcttgaatgagccctcttagagtgttgtgtctgggttccttggacaggtatccattcagtgaggaaggctactgtatttatcaaacacttgaaacccaaatctgctgtggttgctgctgtgctcatcatctgcccacatgatgtttaaaaacacttttaaaaattattttccttagtgtctgagtgttcttacctgtatgtatatatgtatgtctgtgtgccacatgtggacgtcagaagagcgcatcaggtcccctggaatgagaattatggatggctgtaagctaccatatgggttctgggaattgaacccaagttctggaagagcagccagtgcttttaaccactgagctgtctctctaaccctgataccttttttaaaaaattatttattgagacagggtctcatatatcccattctggcctcaagctttcaatatagctgaggctgaccttgaactcctgattatgcgtccatcttctgagcatgctgatacgtgctagcattgcctgggttatggagtgcttggagtcccacctagggaacaactatactacatccctctccccgccactcccccctccttttattttgagtgacaaattaacagttggtcttgtaatgattagattaaaagagtttggaatgaaggaaacttattgcccacaaaatggttatttttggcccaactctccaaagtgactctaaagacaatagcttctggaattttaaataataatcataatgtaaagaaacagctaatagttacccccttgccgtatactgtgctaagtgtcctgcatgtaaaattcctttttttttttttattttcccagcagttttctaagacttcatttttaactgctttttgcaaatggaaaaaaaggttagataacattacaaatgttattaaatatttaaataacaaagctggtatttgagtgtaggtcttttaagttatagaacccagagaagcgaattgtttctgttagcttcttctaatataacataaaaataacacatgcctgttattttaaaatatttcaaaagattagtgtccccagtacaccagtgtaactagttagaagtgtcctgagtgtcctcaacagtttctgtggatttacttagatccatagaatggactcacactaattctagaacccaggtctgtgtagagctaaaccttggcctttcttactttatttggagttgttgtcttcttgctttagtcttccatgtgtttgagattctgtgtacacagccagctctgactagtgtttcgttttacttagcaggcatgtgggcctctaacttttatttgagaatcaggtagaatactacaactttaactaaccctttgtttgatcatttttgttttttgtttttgaggcaggatctctgttaagtagctctggctgggcctgtagtcacagccatcttgcctctgcctcctgagtgctgtgactaattaaaggtccagctaaatcaaactcttttttttctgttataagaatgattttgcctacattcctagcggtttgtttgaatggaagataaatgctccaatcgaacttattttacagaagagaaaaaaaccctgaggtctatagaagttaagtacaagcaaggctttggtgccaaactggttacttcttggatctcaagaccatgttactttacttccttactatgaacgtatttgagctgttctttcaagctcaaggtgagtgggatgtgctgaggccaggcagggtggtatacccagttccagggagttgcaatgaggcaagccgtcctgctgaggtgtttttcattctctgacaagcagcatatgggcagagtgtttttatgtgtgactggattatatccagcctatcttggagtttgtgtttggtgtaatggaataggtgttggcaaaatttcccccctcataataaaattgtcaatgagatagttagcaatgagggagaaaaatatcagtaacccagccctggcccnnnnnnnnnnnnnnnnnnnnnnnnnnnnnnnnnnnnnnnnnnnnnnnnnnnnnnnnnnnnnnnnnnnnnnnnnnnnnnnnnnnnnnnnnnnnnnnnnnnnnnnnnnnnnnnnnnnnnnnnnnnnnnnnnnnnnnnnnnnntcctcctcctcctcctcctcctcttcctcctccttcttctcctacttcttcttttcctcctcctcctcttactcctccttctccttctcttcttcttcttctcccctttttttttttttaatgagctgaaaaatacctaattaaaaacaatagttttaaaacatttcaggttggacatggtgcttcatgcttttaatcccagtcctttggaggtggaggtgggtggatctctatgagtttgaggccagcctggtctgcatagtgagtgagttccaggacagccagggctatataaagagaccctgtctcaaaataaaaaaaaataaaaaacatctcaggagacactgttgatttacttaattatgttttcctataaaaaaaaataggttacctcaaatttatatgaaatgattcacttgaactcactgtgtagcctaggccagcatccttaactcgtgactttctctaccttaacctctcatctgctagcattacagttttgtgtcactatgctgaacttattgagtctcttaaaacaaaacgagggtgggtaggggaatggtggggggaccgtatgggggacttttgggatagcattggaaatgtaaatgaggaaaatagctaataaaaaaattaaaaacaaacaaacaaaaaacaaaacgagagtctcacctgttgtagacacaaaagatattaaaattattatttttaaaattttttttggagatttcaattttatgtgtatgcacatttgcctgaatgtatgtctgtgaactttgtatgtgcagggcccatggagggcagatgatgatgggtgtcctgagactggagttacgaacagttgttagtctccatgcgagtgctgagaactgaaccagatcctctggagcagcagctaagtgtcttaactgctgagccatctcttcagcctggacttaccctaccttttctcaaaggttataaaaagccacagcgattatattttattggcataaagttagatgagtggactagagtccagaaatgggtaattatcaagaagtgttgttaaatatgaagccaaaagtggtaaaacctagaatcccaccacttaggaggaattcaggtttgagggcaacctgataaaaacagactatctcagaaaacatcgcatgtgtttgtagctcaccccccactcctactgtgttacatatatactgtgctacatgtactgataatatttaaaaaggaataaattataaacataccatggatgaatcttgaaataattctaagtgaatctagacatatatatatatatatatatatatatattctatgattccaaataaaagtcttatatgcacactaccccatagtgacaagcaagccagtcccaagaaattaaagttattaaagctttaaaagctttagaagttgttattcacaaaaatctatttttcactgcaatcctgtttttaattttaatttagagaaaaaagtatttttgaagaagcaactcaaatggtttattttttgttaaaaacacatctgccttttgagattttaaataactaatgagctttagttctttagaataatcttttcataaatatttataagatggggcctgtggctgagatggctcagcaggtaaaggctctagccaccaagtctgatgccaccccaattagatcccttggacctaaatggtggcaagagagaactgactcctgcaagttgtcctctgaactacacagacacaaatgaatttaattttaaaaaatgaaaagatttaccagctaaatgtcctaaagtgccctaattttttaaaatgtcgctcttgtgtgagtgtttatctgtgcaggtgcggttgtatgtgggatcagaggaacccttgcagggtgtgtgtgtgtgtgtgtgtctatctgtctgtctgttttctgtccttccgtagtcagtcagtcagtcagttctggcagtcaggctgtttaggcagcatctgaccctttgaacaaactggctgctagtatttttaaaaagcttacagtttcattttcagttttactgtcaaccttaggaaatacatatagtaagttccttaaatgctatggtatgtataatacctatatagtgtgacatgaaaaagtaaaaaaacgtatctaacattttgtgagtgagataatgttgttacaggatgtgtgttgttagtcctctggtacatctgccattaacaagactgaaagagggctcttagcttacctaaaaattatagtcagggctttgttttgtttgtttggttttggttttgaagatggggtctccagtaacccaggctggcttccagtgaactccctacgtaacagggagtgaccttgaacagttaaccctttgcctctacttcccaagatcttctataggcaggcaacactacacggaactagatctggatcttttatttatttatctatttatctatttatttcctttctatctgagacaggctggcctcagcccgtcatatggaggagtctggcagtgctggggtttgcagacattcatccccaaagctgccctagatgtggatctcagtcatcattaagatatgttgagaaagcaaatgggaaaatgaaaaagaattatgtacattatagtttgtatttaagctgtatgataacattttacatggtgcctttttggttgttttataaatacccacaccataactccatttgttaaaattaatctgaaagcacagtaattatttacctcaataatgggagattttgaaatttccccaatgcctaagactaaaaagactaatcatctaacataaattaatttttttggatttcagtctatttccaaattactacttcaaaatttatttttcaattttatgtgcattgatcattttgcttacatatgtgtctgtgtgaggacgttgggttccctagaacagacaggtgtgaactaccatgtaggtgctgggaattgaaccttgatcctccggaagagcagctgtgccatctcttcagcctaaaattattatttttttaatgctgggattaaaggcgtgtgccaccactgcccagcgagccgaaatttttgtttatttcttgcacttggaatgctttttggtgacattcttgacctgatattgtttgctatagcccttcaaagaaaatgacattcagtttacttttgtagttcttagaactagtgaacttttaacttgaagttttaatagcttttcaacattgcaatattctagtcaattctgtggaccataagggctttccttgctcttcagactggtgatatggcatcagcactgccagcttttgctgaatgtccacagagatgtgttcagataagtaggtcagttggctggctcttacggcaagtcagcttgcttgcttgcttatttgtttgtttgtttgtttgtttgtttgttttgaggcagggtttgtgcctttagggctggctgtcctagagctggttcagtagaccaggctgatcctcctgcctctgcctccacagtgttggcatcaaaggcacatttatcttttctgagactgggtttcttggtgtatgtaaccctggttgtcctggaactctgtcctctctctgctctccaagtgcaggtgaagtgctgtttgccatagttctagatactttgaagtcaaagacagaaggatcccttccttgactataggatctgactgagcccagcttgggcattttaggaagagcatgtcttaacaaacaaacaaacaaacaaacaaacaaaaggaatgctggcaggacatagtggtccacacatttatttttttttttttttttttttttgagacagggtttctctatagccctggctgtcctggaactcactttgtagaccaggctgtcctcgaactcaaaaatccacctgcctctgcctcctaagtgctgggattaaaggtatgcaccactacgccctgctggtctacacatttttggtttctctgtgtagccctggctgtcctggaactccctctgtagaccagactgacctagaattcacagagatctgcctgccttggtacgtgcgcatgcacacacacacacacacacacacacacacacacaccccagtgctgggattaaatgtgtacaggtgcagggtaatggtggtgtactcaggaggcagaagcaggcagatatctgtgagctgtttggctagcagtttggtctacacagtgggctcaggccaacaaagactacacagtgagaccctgtctctggaaaaacaagcctgagtagctggcttatagggtaaaggtattttccacccagcctgataacttgagttcaatccctggaattccacatggtgaaaaggagcaacggattttcctcagttgtcctgtgacctctacagaagtgctgtggtacgtgcatgtttctgcctccgatctacacagagataagcaattaaatgagcaaagtaaagtgttttgattcagatttgatttataatcaccttatttttaaaaatgtacgatggacagtgtgttctacccacctatttcactgtaagatttgctttgatctaaactgacctttttcctagtatttgttctgcaggtgtgtttactttgagccagtttagcaaactgtgtgtgtattggggggttggtctgtgcgcatgtgtgtatgcacttatgtgcataagcacagagttgctgggtatcttcctctactactccctacctgtttcttctaaagcagggtctctccctgtatctggggcttgtattcttttttcctactaggctattagccaacaagccttcagtatcttcctgtgtctgcccccacaggactggggttgcaaacacacatttgtgagaccacgcctagcttgttatgtgggtgctgtgatctaaagtcatggttgtgcagcaggtgctgtcaaccacagagtcacctctccaactccctcctcttagattgggtgggcactggacttgaaaggcctatgttgagatctgagttcctaccaccattttaccttaccatggaaggttaatgcttttgttgatgaatagaaaagagtacttagagttgtagaactttaaactgaagtgttaaagtaccagactttagcaccaagtaagcatgtacttggtaattcacactccctaaaaacagaaataaagaagtagaggctgagggtgaggctcaggagtagaatacttttctatatataaagaggccctagatttgattttcagctttaaaaagagaagaagaaggaaaagggaaggaaggaagaaaaggttgtctgcaaatgaggttgtctttaattgcatgtttagtagatgaagaaatgaactcacttggctgcctcaacagaagttaagaaatgttggagcagcatctttgcataggctgtgtgggtgttctcagtaagagattcatgttagtacaagtatgaacaagaagttaacttccagtccaaacttactttcactgtagttacggtaacatcatgcgtcgaactgcaccagtgcttagtgttctgatgaagcaagtacgtgatgaaaagcttggatagaatgagcttgacatcctgaagttataaaactagtgaagcaaaacagaaaacaaaacaaaactccagaaaacacccaagtatctttagaggttattaaaaacttagttacgggctggtgagatggctcagtgggtaagagcacccgactgctcttctgaaggtccagagttcaaatcccagcaaccacgtggtggctcacaaccatcggtaacgagatctgactccctcttctggagtgtctgaagacagctacaatgtacttacatataataaataaataaatctttaaaacaaaacaaaacaaaaataaaaacttagttacaggttttagtttgatacagtataccttaaaatgcctattatttttgtcataattattttttttacttgaggctaacagagaatccaaagtataagaaagtaaaatttgaacatttataaaacctaagaaccaactggatgtggtgactcacttttaatcctagattcgggaggctgaggcaggggttctctgtgagttcaaggccagcctggtctacatggttccaggatcctcaaggctacattgtgagaccgtctcaaaagatataaaaataaatctcttaagaactaatttcagaaactatcttattatcatttacttgatttcaaagagagtagagcaaggtgactgatagagaggttggcttagtttggggccagagagatggctcagtgcttaagagtgcttactgctcttgcagaggacctaagtttgctctctaatgctcacatggctcacaatcgcttgtataacccagttctaggggatcctgtacccgtgtgttacacacacagcatatataacacactcgggtgcacacacatgcacatacaatagatttttttttttaaagaaatagcttactttgtagtaacttttggtatgagccagtacccttgtggtaagaaactggacaaaaatctaatatacatcttgaagtggtaaccatgtttgttgttgtttggtatagtcaagaacaaagtaagaactgtggaggtgaaactgggagaatagggaaacagcatttaattagtaatcattgtattgttacaaggtggtcaagcagtaatgtggtttagtcaggaaaaaactgacctataatctaaaatgctgaataatttaatgaaatgataatcaagtgaaaacagattgaatttaataacagggtttatggatacgtgaaatacaacgtaggtttaaatttttctcattaattaattaattatgttccatgtcatgcaagtcactatcctgacacaggatactttaatctctttgagaatcaatttttttctaacaccttgatttgtttgagatggggtggtggtggtggtggtttcaccattgtagtctaggctagcctccaaattctgagtgctacattacaggactgtagcacactgtaagtgggaaatttaaagtggaaattttaggagatacttaaggtaacagcaacacagctaaccagattatggagcagcacagttatacttaaaaatgttgtttgttctgtttatacttttgaaaatgtaaaaaggaaaattagaaaaaaaatatacatttctggacatgctttgcttactgagaaaatgtcgtgaagtcatggtgattttatatctgtaaaagcttatatatctaagcattggatgtaaatttcatttaatgtttgatgttacaagtgaaagtcattaaataatgttaagactattgagacttaaagttaaaccaatgtcaaaataaaagcctaagctatacatttatctatagacatccagagggatggcatctccttccactctttggtgtcatttcaggtatagcatcacttggtttaatctccacatctcagacagtaaatgagttcgatagctccgtggttacgacctgggtgtgattcccagcacgcacttggtgagcctcagctgtctgtagctccagttccagggaacccaataccttctggtttctgagggtaccaggcatgcacatgatgcacagacacccatgcaggcaagtcacccatacaagccaaataaagccctttgaaaatctcctgactcacaattcaagttacatggttgtaagccaatattaccagtacgtgcttctactctgaacattctgcttgtctctgggttcacctgtcacttagcatgagtatgattgcttaaatgttcatgtaggtgattgcccttctttttccttccttcctttgttccttccttccttccctttctccttcttcttgttctcctcttcttcttcttcttcttcttcttcttcttcttcttcttcttcttcttcttcttcttcttcttcttcttcttcttcttcttcttctcctttttcttttttcttttttctttttttctttgagatacaatgtctccatgtagaccagactggctttgaactcacagagattcacttgcctctgcttcctgagtgctgggattaaaggtgtgtggcaccatgccaggctgatttctttcttgcatcacagtatttgcccatttcttcaaagttcatgactaacctcatttccataagcatgttaagattttcatgaggtcgtttggaggacagtcgtgctttgaggtggtcgaaagaattgaatttccctttgaggtagggtctccagcccaggctgcccccaaacttgctctgtgtgaacttctgactacagccacccagccacgcaccaccaacagcagctaaggattggctgctgctgctgctgctgcttttttccccctagagttttaaagactttaaaagtttgtattgtgtgcgttctatgtctttgtgtggagatgtgtatgaagatgctgaataggccagaagagggcatctggagccagagagattgtgagccaccagacatgggggctgtaatctgaactctgctcttctctaaggacagtgaactcttaatcactgagccgtttctccagcccaggatacttgttttgttttgctttgtttttgatgttttgagacagggtttctctgtgtagccctagatgtcctggaactctttctgtatagatcaggctggtcttgaatgcatttattttattattttgtttggttgctatgcctacatatatgtttgaatgtcacacgcatgcccagtgccagcagaggtcagcaaaggccagcagaggccagcagaggccagcagatctcccagaactggaattaccggtagttgtgagccaccatgtggtcctgggaacagtggacctcttcaagagcaaccagtgctcttacccactgaaccaactcttcagttctcctagaaatctttttttttaatttaatttaatttaattaatttatttttttaacttattcccgctcactgccttcttccctgtcattctctccctcaatccttcccttatgcccctccccttctcctctgagcaggtgggggcccctctgggtatcccctcactctggcactttaaatctctgtgagactaggcacttcctctcccactgaagccagacaaggtggcccatagaattctattagttagtagacttaacagtatatagactgctaagcaataaaatgatttttgttgttgttgttgtttgtttgtttgtttttcaagacagggtttctctatatagccctggctgtcctggaactcactctgtagaccaggctgacctcgaactcagaaatctgcctgcctctgcctcccacgtgctgggattaaaggtgtgagccaccactgcctggctaaaatggttttttaaatttgttttttgtttgtttgcttgtttgttttgttttgttttgttgaatcagggtttctctctgtaatcctggctgtcctggaacctgttctgtatatataccatgctagcctcaaactcagaagcaacaatagaatgctttaattgtaaagcacttgcctttgtgttggtatattttggactagtgcatgcttataacccctgcacttgggaagtggaagcagaaggagctgaagtttgagttcgtcttcagttagaagctgtgttagaagacagctcacgttacatgagaccttttcttaaagcaacattaaaaaccaagcaaacagtccacataatctgtgtggaaagaaggactttgtctcttctcacctatccctggccacttgcttttattttcttcctccctcaggagctcactatgtagacaagaatgtcctggaacttctgatccgtttatctctacctccccagtgctgggataattgatatatgccaccacacccagttttataggttactgaggctcaaaactagggttttctgtgtgttagtcaggaactaccaactgagataaatctctagtcccccataaaaaattttaaaaattattattttatgtgcatgagtgttttgtctgcatatatatgtgtgtgtgtgtgtgtgtgtgtgtgtgtatgtgtgtgtgtgtgtgtctgtatatttgtctgtcttcttgtctaccatgtacttgctcctcaagatcagaagagggtgtcagtcctgtggggttggagttacagatggttgtaagccaccatatggctgctgggaattgaacctagatcctctacaaaaatcacagtgctcttagtcactgggccacctctccagctccatatattcgtaaatgatgaagcagttacataaaatgtgagttttgttttttttttttaatcgaggggacttgctcataattgtgtgtctctgggtatgtgttcatgtgtgttggttcctctcacttgtaggtgcatatagagtccagaggctagtgctacaatgcctttcatcagttcaccacggtttttaaagatttctttttgtatgtgagtgctttccctgcatgtatgtctcccatgtgcatgcggtgcccaggcaggcaggaagcctgggtccggtcgcctggcactggggtcggagatgatggtgagctcctggatagaggccaggagctaagccagggcctgtgcaagagcagcagtgctcctaaccgctgagctgccttgccaggcctccctcttgcaccttatttttctgaaacaaggtctcactatatgtagctgactgacctgaaactcatggagatctgcctgtctctgtctccctctgctgggattaaaggtgtgcacaaccatacctggctcctccttccctgtttaaagtcagcagcatagttggttatcttcggtgttcttcctacccctcctccgtgcaccactttgttcatagcatccttgtgatgactgaggcccagctgagtgagacaggacgtgtatttgcgtggtcgtttcctgctctctgaactcattcagcagcttctggattcctctgtggtcctgggcatgggggatgcagacacgggtgcaacacagcaccagctgggcttctgctggctggtttgcttcactatacagccctgtcttaaactcacagagatctgcttgcctctgtctccccctcctgactgctgagattaaaagcatatgccaccctgtgtagctctaacaagaatttctgtcagagttgcttcttttccataatagaaggtactgccacaatttactttggatgttaaagacatcaaaacttgttggtcttggtgtcgaacacttttaatcctagttcttgggaggggaaaaacagaggcaggaagatctctgagatactgtcttgaggaaaaaaacaaacaagcaagcatgaatttgagatatctaaactggccagtatgtcaacagtgaagctgcacaaaagacacttcaaatgcatatgatatttggtgtttaggacaagatttgtattaatctgtcgttaatatcaaaaagtcatttttcggggctggtgagattgctcagcggttaagaacactgactgctcttccaaaggtcctgagttcaaatcccagcaaccacatggtggctcacaaccattcctaacaaaaatctgatgccctcttctggagtgtctgaagacagctacaatgtacacatataataaataaatctttaaaaaaaagtcatttttctttttttgggggggggtcactttactagaggtcaagattctaatatttttatgagtgataatattatgacagtttctggtaatctcattaatagtgactcaaagttgtatatacagatatagaagatagaacttcataatgtactcagtatgaattgtagcacactctcagaagttcatatatgcttgtagttattagatgcatgatagagaacatcaggttatgtaagattatataagtagttaatatttctttaaaaggctttttagtcagggactcttagatgacatatatactgtgtgttttcagcattttttttttttttacatttatttatgtgtatgtgcgtgctgttgtacatgagtagagctcggaggctagcctttggtagttgattgtctcttccatgtggcttctagggactgagcgcagtcatcagggttggtggagagcacctgttttcagcagtcagtaaaagccttctgattttattattttttaaaatttacttatttatttttatgtacattttggtgttttgcctacacatatgtgtatgggagggaatcagatccactggcacttgagctgtagacagtcatgaaccaccatgtgggcgctaggaattgaggttacctgggttctctgaactcctgagccatctctccagtcccccccaccccaccccaccccaccccgaattttatctttttagtgaaagtataaccagctaaaataagattgcatattacagttactggaaggttgaaaagcctggggtaagccttagttgttttcctagcgacctgagtcctgctgctgggctttgtgctgagcatgagagaacgctgcagatgctgtctgagcttcttcacaagtccttttagaaagaaagtaaatctccccaggcacggtggtgcatgcctttagttccatactcaggaggcagggccaggagaactctgtgagcttaaagccagcctgatatagtgagttctaggacagccaaagctgcgtagtgagaccctgtctcaaacaaacaacaaaaagcaaacctggtactggctcaattggtaaagtgtttgccacacaaatgtggagccttgagtttggattttcggtaccgacataaaaaaccaagaccaagatatagcagtttcacctgtgactctgaaactggggagtagacaggtgggattccttggagctcattggccagccaggctcaatgagagaccctgtctcaaaagataaaaggtagagtaatataggaaggcgtctagtctctgcaggcatgtgcacatagcaaaccagtaacatcagttgtgattcatgttacaagcatctagtggcatatcggtaacacacttaatggtaataagatattttaatggttaatccagccctgtgtccctttagtgtttttctatcagaattaatttattggcactgtgccagatgctgcagttagctgtggatcttcactccagtgttcctaaacacacttcattctccccttagcttctggtacctacccttccatccccagttgtgtggtgcgttttcattaaatgcatctcgtttgatttcacagcatttcaagaaaaaacatttcaaaagccaatttggtatttataatactgaggagctctgaaaattcttcattgaagttttttgaagtgctatctactgtcagctttcagagaaccgtttggctcttctcagcctggacgtgtgtgatatcccacatttcactgtcttagcctggatatttactgccaggagggactgagtctgtcttgtttatcttttatctctagtgctcaggacttgacataatgcaggcactccacaggaagcgctgctctcatcaggactgctctgggagctctgcccccagtgttccctgtattgacttctcccgaatagtgtaggctctaggattatgggaccttgtctgagtcttcacctctctactgttagacttagctcagtgtctaatagtaaacacttgcgctattagagaaatctgaatagattggggctgggaggggttgctgggttgtaacatttggtttctttcccgttacagtagtaacagaatgggaaggaaggtggagctggcatgagtcttccctggaccttctcagactagaaagggtaattgacagcagtgggtgctcagaattatggagtcaagtattctagtgttctttcttgtgtagatatttgagatcatgcttactttacacacaaaaacatagacacacacacacctctttcctatactatttagtgttgtgatggaatgtaaatgtagaatgctctgttagtggaggaggacttgacctggcttagagcacatgtgatatggcattttaaggccacttggagtgtattaacacctgaatggaatcataagactgagtggtggctgagagagaaaaggtaacatggtggagggcaaatgggaccctgcaggtctctgactacataggctggtgccacagtatcaggggcttcagcttttttgatttgttctgaggcatacaaaggcttattaaggttaaatcctgctctgtttgtttgtttattgagatatgtgtattttgcctgcatgtatgtatgtgtgcagtatgtatgccttgtatgcacagaggccagaagagggtatttgatcccttgaaacaggagctatggttgtaagctaccatgtggatactgggagcccaactataggcctttgcaagagcgacaaatgctcttaacctctgagccacatctttcccgcctaagttacatttttccccgtgtggtaaaatactatgaccaaaggtaacttatggaggtgtttattttggcttagttccagagggcaagctgtccctgatggttggggaagcatggagagaaaactgggaagctggttgatgacatatcccagacaggaaacagagagagcaagcaggaagtgcggcgaggctttaatcctcagagccctctctctagcagtgctctctaccctgaggtgctactgtaccctcctctgatgccaccaactgggggccagtgttgaaatacaagagccttgggggaacatttcttagtcaagccacacatgtctttttgcttactgtttatgctgtaaagcatggtcagagatggataatgctggaaatagcaccatgagttaggaaacatgttctggttaaggtaaggactcttccagcataagcagtgagtgagtgggaggcagtggacagacttgggagagcgagcaggaggcacagcctgcgttgactgcagcttatcttctcacctgtggccctcactgtcacactctagtgaaaactcagactgactcaagtacttatttgtcttacattgtctttgggttttgtttctttgagacagtatcttactatgtaatgctggctggcctgaactatctgtgtagaccaccatgttcctttgaccttgatcctcagcctccagaaagtgctgtgatcatatgtagctgtctccagacgcaccagaagaaggcactggatcccatcacacacgattgtgagccaccatgtggttgctgggaattgaactcaggtcctctggaaaagcagtgtgtgcttttaaccattgagccatctatctccagctcccaacagaggttcttactaatgcctagagaatgaaaagcagtctgttagtattcaagctcaggaggcagagggaggtggatgtttatgggttcaagaccagcttggtctacatagagagttcaagccagtcaggccacatagtgagaccctatccaacaaaacaaagagacaatgaaaatcagaaagagggaatcttttgctcttcctaaatattcttgttttaccttttacaagattttaaattttattttattattttatgtgtattttgcctgcttgtgcatctaggtaccacatgagtgttgggtgtccaagaaagtagtgagccaccatgtgggtgatgggaatcaaacctgggtctttcacatcacatgctcttatcacctagccacctcttcagcctttgttttaccttttataatagctctgtagtctacatggtgtatcatttatctgtatgatgagatgtcaccatttattcattcattcattcattcattcattcattgagatagggcctctctgtgtagccttggccatcctagagcttcttgtgtagacaaggctggcctcaaactcacagctatcctcctgcctctgccccctgagtgctggaattaactgtgtgccactatggccagttcagtgctgcctgtcttcatctacatggtgaacagttgtttccacatctttcttacctggctgtcccttgctctgctatgctgcctcagtcctgttacttgtacacaggcagactctgtgactgtgttcagatatcgttttgttctagccctttctgctacttcaccttttaattactggacctcaacgataaatgtaagagattttgttttcagcacatttaccatgtacattgaaaccagcaattctttggatggataatataaattttattgtgaaatatacatacttaattttttaaaagaaaaatgtgtctagttgtgggaggttttttgagacataattcatgcttattaaaactcatgcttttaaatttttaattaatttttattttagacagggtctcactatatagctgtagttagcctggaactcgttatgtagaccaggctggctttgaactcacagaagtcttcttatctgcctctccagtctctcacagaacagacatcatcttctaaagcatgcactgtcatacctggctaaaacttctctttcaaagtgtacagtggggtgacttttagtatatttacaggctgtacaaccatcatttctatatctagagcatcagtcaggaggctccaattattacacgtaaaataaaaacttaaaaaaaaaacctctctcaaagtctgaggcctagtgctgtggtagtccagctatctgagactgagctagggggagagcttgtgctaggatcaggaaatcctagttagttggaacttcactaactagacatgatttacatctttgaaaagtgagtaaagtcacatgaaaatgtgaagtgaataacttacaggaattcgttctctcctctcccccaacctggatggaactcaggtcaggctcggcagaggacaccgttattgtctgagccatctttccaacccagctcttatttttgttaatttttaattgtttattttttgaagatttatttatttattttctgtatatgagtacactgtagctgtacagatggttgtgagccttcatgtggttgttgggaattgaatttttaggacttccgctcacttcggtcggccctgctttctcagttcctgctctgtccggcccaaagatttatttattacatataagtacactgtagctgtcttcagacgtgccagaaaagggcatctcattatgggtggttgtgagccaccatgtggttgctgggatttgaactcagaaccttccagaagagcagtcagtgctcttaacccactgagccatctctccagccccagttatttatttttttaagccagtaggttttgcacttaaactcagaaattagtcatcagcttagttggtttttttgtttttttttgaaaggctaccttggaaagtacctttagtgaagatccacagataaggctactaatacagaatgttagttctcttaggaaaaggctgtagtgcctttgtgggataatactgttttattacaatgattgctagaaagccattcagggaaagtttcctataagtcaaagcctttaattttcatttagcctcaaccaaaatgataggcactcgttcattctccccttcttccctcctctctgtctctctctgtcttgtctcattgtgtggccctggctgtcctggaactcactatgtagaccagactggtccggaactcacagagatccaccttcctcctcccaagtgctgggataaaagtctgtgctactaactctggcttggtagaagttcctttcaaaccataaactttgatatctcaaaatgtctcaaaaagccacaggagccgggtgtggtggcacacgcctttaatcctagcactcgggaggcagaggcaggcggatttctgagttcgaggccagcctggtctacaaagtgagttccaggacagccagggctatacagagaaaccctgtctcggggggggggggggggaaagccacaggaaaacttaaagattacaaagtgtctggaaagagagagtgctgttagataaaggtttaaatgcgtgtttgcattaccacagggttcacacattgagagaaaatgcccaagttgtaatcagaaaccagatacttgtacccagagttttgtatatgcatatataaaacgtcactgaaaacagttcattttgtttcttggcaaaatagtaaatcttataatctagtgtttgctctcttggggcagaatgatcaacagacaaatagaacagccactgccactcgaaaatttgtagttaccacaaaacattttcaaggaggatctattctgtttgaaagattggtcttctactgaagttactgtgccaaattccggtattgcctttcatctctgggaaatagatgagatgcttatcaattctagctgctttttgtgaaggtaaacattattattcatttccttcttggtgctgcggaggtgtggtcaggttcttagaatcctgtggggttttattatttattctaagagctccatcaccatttatagcttaatggtaacacgttaaactctgagtagaaacaacctacaagagcctcgaagtgggggctgaggcaggggatctaacagaactaaaaaccaaaagaccatatgagttacagaagaagaaggttagcttttggtgtaatttggaccggtagaacttgactttcccttctgttgttatttattagctgctgggtggcttctagttttaaaataggtataaagcaaaatagcacacttccattgtcctaaacgcaggtttgttacattaccaagttaattttaaattatgaaatcaaagtgggcaatacaaaagtagtgtattactgctactactactgctactactctcctactacaggcttttcaagacagtttctctgtgaaaccctggcttccctgaaacacgttctgtagaccaggctggccttgaactcagagatctgccagcctctgccttacccccaacccctagtggtgggatgaaaggccagtgtcactacacctaccttcaacatttgtaatttagagttctggattcacactaatcatatctgtacagagattgaacacagaaccccaaaaggatggtagctctgtgtacttcaaagatttcacacggtttgttttttaaaggtgactgtccattctttcaaggctagatgtcgtcggttcagttgctttttatttttgccatagtggtggccaaatactaagattgcctggtttctgaggatcagcgtagtaggttcaattccataagctgcacacattccattcttgttgctgtggaaagactttaggactagatttattataaacctggagaaatgctctgtgaaacagttcatatgaaaaacatcttgaatttttgtttttcctgataaaataaagggcctgttctgagtagtgtagagaatgtgttagcattggatactttagtcattatagtgaggttattttaaatacactggattatatctgctggagtagttctcatgttcttgctgattccattgactgactgtggaaactgttgtgagtttcagttctatagtactaataacagggttttaaagtagatgcatttatacgatggtttttaagatggttttttggttatattaacttctctctataagcttttttttttttttttaaggtgggagtcacccttttatggtcctatcttttttttttttttaatatttatttatttattttatgtaagtacactgtagctgtcctcagacactccagaagagggtgtcagatctcattacggatggttgtgagccaccatgtggttgctgggatttgaactcctgaccttcggaagagcagtcgggtgttcttacccactgagccatctcaccagccctctataagctttttataccatattagaggacttaaaatttagggaactttggttagactaaaaggaatattggtggtggcaaggtaagcagctgtcaatcaaattcatggaaaggccttcaacagctctttttttaaatttctttttaggtttatttatttaatatatatgaatgttttatgtatgtatatgtatgtgcaccatgtatatgcctggtgcccaacgaggtcagaagaggattgtaggatctcatggaactggaggtgaggatggtctcaaactctgctcatgtagcgagcagtccctggttcattttccagcatccacatggttcagttctttcactctagctgcagagatctgatgccctcttctggctgctttgagcactgcatacgtgttgtacacagacgcacatgcaagcaaagcattcacacacataaaagtaaatagtaaaagtaagaaaggtcggtggctaatagtgtgtattactcttctagaggacctgagtttgattctcaggacacacattagatagtttacagttgcttggatcctctggcctcctcaagcacctctaccacacacacacacacacacacacacacacacacacacttaaaaaataaatatttaataagtgttaaataaatatttttatgttgtgtgtgtggatgtttgtctgcatgtgtgtctacttaccacatgtgtgtcagtcactaggaagccagtcaggatactctggaagagtagccagtgctcttaaccaccgagttacttttccagaccccaaaatacacaaatcttaagaaaacaaaattcacataaatagatagttcagtgtttcttctaagaggcatgcacaggaactcaggagagttgctcagactaactctgttcctgtagctgtttctttggagcactgtctgaactcaaggggtgggtaaagttaagaggaaaagaggtgtttagggggctcactgcatgtaggagcttacattagttagggcacagaggtgtcacctgagaactgcaatcctagtgttcccctgctagagcagagagccttcagagtagccaaggaagggtaggccttgcctggagggtctgtcaccatattcagaccttctctaggtagtggggagcctaagaaggactttgtctacaaagcaatatatttaggtttacaagctaacatacttaaggattaagaagtggtttgaaacagaaatgggtcaagtatatggcatcttacgggtacttctgattctgaaaggtcttagtggtgatcagtagaaagacttttgaagtgcaaccaaatataaagagaagaggttaacattgaaataaatgagtatgtatatgatctagcatgtaagtcagtaaggtagagtccagcaaatgtacacactaccaaagaagattgtccatcctgttggacaatcattagttgtcttaactgtgcatttaacatgttaatgcttagttgatacttttatcttaaagctgttcatttaaaatacataatatggttactttctttttctgtttctctagtttgactttagaatctgatcctctttctttctgcttcttcttctttttccccttcttttgtgagacggggtctcactatttagttctgcttgtcttagaacttgctatgtagaccaagctggcctggaactcggagggatccacctgtctctgcaccctgagtattgagattaaacatgtgacctaccatccctggcttgatatactttttatttttttttttattttttttttattttttttttttaaagatttatttattattatatgtaagtacactgtagctgtcttcagacacaccagaagagggagtcagatcttgttacagatggttgtgagccaccatgtggttgctgggatttgaactctggaccttcagaagagcagtcgggtgctcttacccactgagccatctcaccagcccccagatatactttttaaaattgttactcttcccataaataaattgggagaaaaataagagtttacaacttttgttgataattttcaaccctccttcctctcccctctcctcccctcccttcctttctctttccttctcttcctttctccccaccccatccccttttctccctactgctctgaaactgtatgggcagctgtaacagaaatctaaaaagcctttatcaagtttctctttaatgcgagtgcatgtatgtttgtgtgcatgtgcatgtttatttgttgtatgtgcatgtgaagtccagaggtcaataattagtgtcatcctcaatgaccctccctcaaaaaaaaaagaaacagggcgtcccatagagcatgggactcatcaactcggctaggtttttgggccagcaagaccttggtgtctctctgtgttctccctagtgtgccgccatgcttggcttctcacatgggtctgtgggctcagactcaggtctcatgtttgcccagcaagccctttactgactgagccatctttccagcaccttgccatctttcaaaaatactacatttatctgtttaaaagtacagattacagggttagggatgtaggtcacttagtagagtacttacttagcatacacaaagcacagggttgatacccagctcagcataaaattagggtatggtgggaggtaggaggattcaaagtctatggtttttcttgactgtagagcatgtttgaggtcagcctgagctgtgtcagaccctatcttaaaggaaaatctaggtgaagtgatgcaattgtttagtctcccatggaactgttaactctaggaagggtgtgtgttcgtgagtgtgtgtgcgtgcgtgcgcttgtgcatgtgtgcgcatgcgcgcgtgcagtttgtggactgcttgatttcttcttgttttttgttttttaattcacatatttatgaattgggaaataaaattgctcttaaagagctgatgttattgagcaaaatttgtatttgaaaacttcactgttttgggggggatatggtcttggcatttcatttgaaaagtgtgggtaatagtatttttatagagaaatatttggggtaggacttaaataatgtaatgaatataaaacatttagaggaatattgattgataaagagtaaactgctaaactgttggtgatattaattatttcttttttttgtttgtttggtttattgttgtttgagacaaggtttctctaatagccctgtgtgccctggactccctttgtagaccaggctggcctcaaactcagagagagatcaacttgtctgtgcttcccaagtgctggaattaaaggcatgtaccaccacgctcaactgatactattttttaaacatttaaaaacatttactttatgtgtctaaatgttttggctgcatgtacatatgaagactacctgtgtgcctggtgcccataggggtcagaagaagtcattggataccctacattagagttacaggtggttgattataagttaccatgtgggtcttgaaaaacaaattggagtcctctgcaaagagcaacaagtactctaaaccactgaactatctctccaaccctggattcattaactatttatatcaatattattattactattattatgtttagtagttaaaaattaagatttgtttgcatgtatatacatatgcacatctgtatacacagacacacacatacacatagagcgttgagatccaacccatggtgttgtacgtaccaggtgagtactctaccaccagggtacagccccatcctaggtggactgcccttatctgggttttatttaggtcacaaagatgtcagaattttaagtcatctctacagggggtttgaatgcagagggtgagaaactcccttcggtgccccagcctgcctttcctggttttcagcccccccccccccccccttcacatgctttcttcctcagtgtcttttttaacaacagtggcaatacagtgcgatttctggtccccttctgcttacttcttttgaatacaatattgtaccaagtaatagcgaaggggtactgaaggctaattacaccaggcactgttctaagtgttgtgtgtggattaagtgttaatttttcctgcaaccctgaataagataggcaaacagattctagaaaagggaactaaagataaactaaactaacggcttagggacatggggaaagcagtctaaaatcctaggcccagagctggccttctagctgggcagcgagctcaacagtgtgtgtcagtcaacaaaagagactgggtcctcttttgtgaggttctaatcatggcatcaatccatatgtctgctgtgggctcgtccatgtataaaaaccactatagagtaatatcctgggtatagtgtgacaggcttctaatcccaacacagggaggcagaggcaggtggatttcagtgagttatgtccagccagacctacatagtgttaccctgtcaaaccaaaataaaacaaaactggttcatgggctgccaggatggctcagcaggtaaaggcacttattaccaagcttgacttgagtttgatccatgggacccacacagtagaaggagggagccatctcctgaaagttgtcctctgaccttccatgtttacatacaaaaggaaatataaaactcaaaatattttcttaatttttactttaagaactttaaaacttttagaaaggagggctgtgtattgtggcatcagcctttaatttcagcactctggaggcagaagcaagtagatctcttgagttcaagactaacctgatctacataatgtattactggccaaccaggactacacagtgggaccctgccttgaattgggggacggggacggcaggaggagtctgctgccagttaaactgagcaggtccctttcttgatggggcctggtatgcagtggccacaaacagcagtgtcttcgaagagcacgtttgttgcctgaatgggctgccctgaggggtcctggggacagtctcctggcggctgttccggtatgtctgatctcagtgctgtcagccagacagctccagacaggtacgtgggatgcctttggggaagccccaggcacaatggccaggtcattctgtccatccataccaagctgcagaataaggaacatgtgattaagatcctggatagaagcaacataaagctagttccctggctgcggggtcaagtacaaactcactcatggtgtcctttacaagtggcagactcctaatcccagcactcgggaggcagaggcaggcagatttctgagtgcgaggccagcctggtctacagagtgagttccaggacagccagggctacacagagaaaccctgtctcgaaaaaccaagaaaaaaaaagtggcagagcctgtactcctcagtcatctcctgtgctgtgtccaccccaccacgtcatgcttagcagcgcacctcctatccagtctgcctttcctcagggcgagggattctcctgtaagtagctgcagctggaggtatagataggggagttatagagcatgtgtaaggccctgtgttcaaccccagcaccacaaacaaaattacaaaccaaaaagattgtctcctagaaatgacaagctgcaaccacaataacacagcagtatgactgcctaaacaagacccaaacaatgcaggtactgacaggcatgttaacaggaaggggaattctcaaagggccctaccttagaaaccacctacaagcaagtactgactctcagaggaggagaagtagtctctcccacagatgaacacctactgggttatctagtgcaacaacaaccaaaccaaacaaaataaaaaactcaaaaccttgaaatcatgtacatgaaagcagcacagtggactcaaagattgtctgtcacctatctgtccatccatacatccatgtatcatctccttacctgtttctatctctgtatgtctatatagatattacctacacatgcatgtatgtgtagttagaggtttagagatcaggaggaaacagtggaatcagttttttccttcacctttctgtggattctgggggtcaaactcaggttgtcaagcgtacagagctagcacttttaatggccaagccatcttacaggctccatgtgtcatttctttcttagatttctcttcttagccttggaaaaaatacttcagagctttttgccgtgctggctcatcacactctgagccatgggtatctcactgtggtcaatatttgctagtaacttgtttaaagtggtagccgttatgtatctctggtgatttgaataagatccccgcgcacctctcccaacccccagtaagtcttgctacttggttgttggaactgtttgggaatgacaagaaggtgtggccgtattgaaggaggcttgtcactgtggttgggctctgaattttcaaaactctccaagctactctttctgcctgctgcttgtggatctagttaggtctcatctgttcctgttgccatgtctttgctccactataatggactctaccctatgagccatccaaccagttaaatgacatttttttttaataagtcatggtgtttgtcaaataatagaaaagtaactaaggcaatcatcattatatatatttctgttttctattttatttaaaaatagaatagtaatagtagtctaggatgactttgtttatctatctatttatttatttattaaatatatgtgagtacactgtaggtgtcttcagacacaccagaagagggaatcatattctattacaggtagttgtgagctaccatgtgtttgctgataattgaactcagggcttctggaagagcagttagttctcttaacccctgagccatctctccagccccctaggatgactttaaaactattgtttcagttgagaaacctttagtgagccccttatgtcttcgagtagtaagaaattgttcctagtataatcatggtggcacatacctggagctctagcatttgggaggctgagggctgcacatacacacgagttggagacaagcctatatgtacaacagtgtgaagttcacctctctcaagcacataaaacaaacctagaactagttcctgagataaagcccattgttagctgtgctttgaaaatatgttctccttgcttgtcattaaaaaaatctctttgctttttaatgatttttttaaaagatttatttattttatgtatatgagtacactgtggctgtcttcagacacagcagaagagggcatcagaccccattacagatggttatgagctaccgtgtagttgttgggaactgaactcaggacctctggaagagcagttggtgctcttaaccactgagccatctctccagcccattcttaatgatttttgttttgttgtttttaatttttgttttttgagacttcactgtgcatggccctggctgtcctggactccccttgtagaacaagctggcctcaaactcacagggaactgcctgcctttacttcccagtggagtgaggctggagagttggctcattggttaagaacactagttgcttttccagaggacccaggttcagttctcagcacctatatggcacctggcgatttcctatgatcccagagtgtgccaagaaggaacatggcacatttgaaacaccaccgagaagccagtgagtgcagcagcagggagtcttggtcgatgctgaggcttcatgtttgagagggtatattcattatggtgagaagacatagtgggagcacgaagtggttactgttctgtgctaaaggaggcggcaccagcaaagccatggcaggtgtggtgatgcaccctttagtcccagcacttgggaggtagagacacatagatctttctgagttggaggctagcctggtccatagaatgagtttgagaccagccaagactatacagtgagaccttgtctccaaaaaacaacaacaaaaccccaccaaaaactaaacagaataaagtcccatcatctctctcccattgcacctttgccgtgtagatagagcccagagtcttgtgcatataggcaaatgaccacagccttcagcgtgacatttatgagtgtttcattgttgattgtagcaatagttcattttccttgttgtgttaaaggattttgaggggaataagttgaatgattggagtttctttttagaggtgactagatgttataaggaaaaacagactacgaagaagcagaaggaggttagaaggtgtcttgtgttaagtttcttttgacttggactttgagagggtatattcattatggtgagaagacatagtgggagcagcttctgctcctggtggagagagcatgcagcagctgcgtattacatgcttccagtgagggagtagagggagactccgaggcgtggggaggaccaggggaggggtgatgagaggactagagaggaggggcagggaggatgggtagtagggagagagagaagagactagatgaaatgagacactcatcctccccaaactgactttgcccatttctaaaaaactcaaacaacttatcaaaacaaggccacctggggtgaggcaaggatttaaacacatgagcattggggtggggaaccatactagcagcagtggagtaagcaggctgggagatcatcaagaggagatgcaacgacactacagttggagttacatatgtcagaaataaactcgtgatgtcccatgatcttcaggcttcttgcttgggcagctaacacgtgtggttgcttttggaagtacacatttagatagactaaaaactgagtttcagatatgggcatttagattccgggtggtatctgggaagtgagacgtctccacagtggaaacattgaaggatgtgggttcaggaaggagccttggagaaaagctgagctttctgtttctttgggctccagctggctgcactgtcgaagagcaaatcctatgtggagttaatcgagtgcaatgtgatagcgagtccacagttgaatactgtttggctctgtggatgctcagaaaaactggttcgtgtacatgcagtttagaccgagagaggaaaaggtcatagaaacctaggacaggcctgggggagacttgctatatcatgaagctgtactgtttctaagtttacaattaggcttatagaagtctgatttcaagaactattttctaactgctgtgaagaaaaacattagatgcaagacatattttgatagcaagatgtggtggccactgctcttaatctcagcatttgggaagctgagacaggaagatcggcatgagttaagtccaggtttacccaggctacactcaaaacaaaacaaaagacctatctagaaaatcaattacaatagtgtaggttaatagtactgacggctagtttgggttttgaaattagtatagaaatcaaagaataaatcggattttaaaaggaaaaactgccaggtgtggtgaagcacatttttaactgtagcacttaagaggcagaggcagttggatatctgtgtttgaggctgtatagcaagttccaggctagccagggcaacctaaggagatcctgtctcagaaaacaaaatgtaacaagaagaaactgtaggctttgtccaaactagttttatggcttgagagaatatgagtctgtgctttgtaatccggaagctatgaaaagggtggagccctgacaaagatgaagaagcaagttgaattagggaatgtcctgcttcagtcccaagggtgcgactcctgaggttaaagtatggctgtcctcatgttaccagcctctatggcaaagacactgagaaagaatacaagagtagaaatcagaaaatttagtcttcaagccaacactgtggccctggggaaatctacacctcccgtattctgtgcagttagctaacaagtgaagctaatgcacagctgccttggcagccttccagagttgatttgcacatcaaataaggatgcatatcagggtctggagagatgactgagaggttagagcacttactgctcttgtggaagatccatcggagctcacagaccctgcagtttcagttccagggtatctggatacctccatgggcacttgaatcacatgtatacacacatggtgcacacacacacacacacacacacacacacacacacagtttttaaaaatgcttacagtactaggaatgtagctcaggagtgtacacaaagccttgagtgttgtccctctcaccctcagtacgtgtacaaatactcttgttactgcaattccccatgtaattatagggcggttattgcacttctcagttcaaactaaaaattatttgtagttaggactagagaagggaaaataagaaaaatgtcaaaatctttaacttttgattaatgaaaagtatagaaacttgagtctgagtacatgcatctgaaaacttggtagactgatttgggagactcatttggaagtttgtatcataacagtgatcacagctaaaaatgcaggttgcatcttattggatgtgaccatttcacgtgcctttaggcggaagtatctatgaagagttttaatttttatctgtgtggtaacaactagaagtcacccttttatagattgcttttctgttacggtgatgactaaaagcaacttggcatgggtggggaaggtttgtttcttccatctttgaggaaagttgagcagggacatagaggcaggaactgtaggggttgctgcttattggcttgcccctcatttctgtgcagctagctttcttaaatagcacaggaccagcacaggaccagcacaggatagtactgaccagagtggactgggcatgctgtattaatcgccactcaagaaaatgctcatagacatgcccacaggccagtctgattgagcagccccccagtgagcctccaacaactctgcggtgtgtctagctaggagaatcctctatgcctgttgctgtgagctagatggttttgtcaaggctcacatttcagaaatgtttctgtcttgcttacctcctgatatattatttgtgacacttctcagcactgtcagtgagtgatgtacgtgtgctagcgggggcacaggttctcagcactgtcagtgagtgatgtacgtgtgctagcgggggcacaggttctggagccaactgagttgaagcttaactgtcagttgacagagttgtgtttacttaattctcgctgcctctgcatcgccatctgttacaagggataatgtctggggaaaggctattgagaggatttcatgttgaactctgtataaacattagagttagtcattacaatagttgctaatttgacagttgtccaggaatgaagcacttgaacaaaaagaactaatccgatagctgggaggaggagatgggctttagaggcagggcatgtgagcctgcattcagtctagagctgccctttgctttgtggttctggcagactgcccctcactcagaccttctcggggtgttacaggagtcatagttcatcactacctagcaggttgttatgaaggggagatgagatgatgtagaaacacctggcccagaagtgctgctaagaaagtgaggctgctgctgacacccccacccctgcgacatctgtggagagagcacttctgagaattagatttttgttgtcttacatggtttttggttttgttttttaatattaatttttagtggttctttcatagctctggttggcctggaactcactgtgtagatcaggctggccttgaactcacagagattaaagatgtgtgctaccacaactggtaacatttgccttctgattaatttgttggcaattttaaaatgcctcaggttatttgtttgcttacagtagagcagacagcagctgtatgagtgggtggataagattcaaaaagtacattgttaggttttgtttccctccctgatctgcagttttgagtttggtaagtactagatactacttaaacaaagaaggtagacactgttaaccatagaattgtctgtatgcctcaaaagccttcacaatattccaaacatctaaaatcagcttctcagagttagtacagtaataaaacctgtttgttttatagatgaaaatgtaaaaatagtatctgaactattcattaatgttttatcttggatgtgaacttgcccaagttctgacaagacaaggtggtcttattgcagatgtgtgtctacattaaacattgttacctagtgtgggcatgttcatagacttgtagtacatcgcataattgtataataaatacagtgatgaactacagtgatctagcaaagaacttgcatcaaaattagctgggatgtggtcttaaaatactcatgctttaaccccctacacacagactttattaaactggaatcttcaagagtaaaataccaggatatgcatttaaaaatgattctgctatatatgccactttaaaaacaactagataatggccaagagtatagataactagacagctttacacactagtaatatgattatataaattgatagagtatggccaatagaacaattgtgcagctagataaaaagttttaaaatctttcctctatgaatacacatatgcacagatttatagtttgattttttttctctttgagacagagtctccttacttattgctcagtttgcctccagctcaaggtttgtctgtctccaccacctcagtcatgcactggcaggcgtctgatagtgtaccctggtgaagggaacagtcttcaagagtggctatgtagtagtgcatgccggtaatcccagcactcaggggcagaggtaggagagtgatgactgtgaggacagtgtaggtcacatggtggtaccctgactcaaaaggttttttctggagacatgtttgtatactaaaaacttgtaagcagctaattgatttatagtacacacatggttgaatctattaaattgatactacagtttactatataaccgtttaaagaatatagtataatgccacagaggtagtgtatacctttaatcccagcactaaggaggtagaggcagacagatctctgtgagttcgaggccagcctgatccttagggtgagttccaggacagccacagctacacagagaaaccctttttaaaataaaaaaaaaaaaaaaaaaaaaaaaaaaggaagaaggaggaggagtaaagtatacatgtgtgaagattacttatgcatcctaaagttgctatggaagtaagcaggacttttttctggatgtggtggtgtgtttctataatctcaggacctgggaggatgagtcaggagactccccagtttaaggacagcctgggctccatagctgatgctatctgctttatgtcagaatgatgtaggtttaatgtctgcatatctgaatgtgaaaattaggtataaagagcttgtataatccttggttggcttcttgcctattagaattttaatactttttaattctcttcaattttaggctcgatgagagaaagggaaagttaaggatgctggagcagaacaatggatttctctttctctttcatgcaagggatcatgggaaacacaattcagcaaccacctcaactcattgactcggccaacatccgccaggaggatgcctttgataaccacagtgacattgttgaagatggtggcccgacaccctttgaagctactttgcaacaaggttttcaatatccacctacaacagaagaccttcctccgctcacaaatggctacccaccatcaatcagcttgtatgaaactcaaaccaaatacccgccatataatcagtatcccaatgggtcagccaacggttttggtgcagttagaaactttagccctactgactattaccattcagaaattccaaacacaagaccacatgaaattctggaaaaaccttctcctcctcagccacctcctcttcctcctcctcctcctcctcctcctcctgctcctcnnnnnnnnnnnnnnnnnnnnggcagggaattgtttgagtcttccctttgtggagacctcttaaatgaagtacaggcaagcgagcacacaaagtctaagcatgaaagcagaaaggaaaagaggaaaaagagcaacagacacgagtcatctcgatccgaagagcggaggtcacacaagattcccaagctagagccggagggacagaatgtaagtccaaatgttctgtgtagctttgtcgtctctgtgtttactggaagttgggaatcttttttatgtttttcttttcaaatatgaatatttctagtgagttcttgccattggcaaggtgcctggaaatataatgaataaatccttgatgagaagataataggcattattagtgaggaaatatctttaacgtttttgacaccgagagtcttgcttccttttctctcctctcacctccttctggggcttccaagacaggctttctctgtttaacctcgcagtctcagagctcactctgcacaccaggctgacatcctgagatccatctatccctgccccttgagaggcttcattattttcacttgtttatatcaaactcttggttttggaagatggagacgaaagccgaaggaaaaggggattttatatcaggccaggtttgctgctggagcctagatataagatggttcccacacgtttgctcctcccggggctggggcttgcatcttcagttctcacactcagaagcagaggcagatgcaggcaggtggagggagcccagcaaattccaggccagccagggctacacagtgagaccctgtctcaaaaataaaatacaattaagacacattacttaaacatattgattagctcttcaaatggagtttttatcaaagcccatgtatactggtggattattttttttttttggttattaatttctttagttttttttaagcatatttttttaaaagatttatttatttaatatatgtgagtacactgtcactctcttcagacaccccagaagagggtgtcagatctcattacagatggttgtgagccaccatgtggttggttgctgggaactgaactcaggacctctgggagcacagtcaatgaatgctcttaaccactgagccatctctccagacccctctttagtttttttaatccaaaggcatgagccagcatgcccagctctggtaaattattttactatctgagatttgattgtgaatttcatggcaataagataataatactaagtatgtagtagagcagttctacttatatttcttttttcttttctttttatttttttccttttctttttttgttttttttgagacagggtttctctgtgtagccctggctgtcctggaactcactctgtagaccaggctggcctcgaactcagaaatctgcctgcctctgcctcccaagtgctgggatttaaaaaggcttgcgccaccacaccctactagatcagttctaccttgagtgaaaagtttatgatataaactatagatgtttcctagatatgcatttagggagaaacaaataaatgcttactttgtgatagttatttacctttatgtttatttacctttatgtttcatatgcctgaataggttaatttattgtctttaatttaaagaaagattatttaattgaacatttcttagatagctggattctactatttagtatgactaaaatgtgattggtcttccccccaccccctcttgggataaaagtcacagtaagtctaggttgtcatgagtcccacatgtagtatttcatgtatttccctatattttctgtcattttcttattcatttaacacatgttggttgaatatcatgtcagtcactgttctaagaattgaaaaggtataattgaatgcaaagcaaaagctatctgctcacaggtgtttatattttagttcattctcgtgtgagtgtgtgtgtgtgtgtgtgtgtgtgtgtgtgttgtaagtatgtaagtatatgggtgttttgtctgaatgtatgtctatggtaccacatgagtgcagtgcctgtggaaacagaagagagcattggatcttctgcaactggagttacaagcagtactgatccaccacatgggtgcagggaatttaactctggtcctttggaacagcagccagtgctcttaaccaccaggctatttctccagcccctctttccctccctctctttctgtttttctttcagtgttttttttttttaatcagcatacaatgaaatactctctgaaatgctgtttttaaagctgtgtgtgtgtgtgtgtgtgtgtgtgtgtgtgtgtgcatgccatacagcatgtgtggcagtcaggataactggagagtagatgctcctcgttcatcatgttgatcccaggaattgaactcaggttgtcaggcttggcagcaggtgcctttctcttggagctgtttcaccagtcccctcttgtgttctcacgcatgttcatgcatgtgcatgcagctatccatggaggccagaagagggtcttgggtcccctggagttagttatagcctgctgtgagccgcttgctgtggatgttgggaactgagctgggttctctgggagagcagcgactactcttaaccattgagccatgtctccaactgcgtcatgagtcatgaggttttttgttttttttcgaaacagagtttctctgtgtaaccctggttgtcctggaactcacttttagaccaggctggccttgaactcagaaatctgcctgcctctgcctcccaagtgctcaccatcacctggccttttttttttttttttaattatcttcagttcttaatgctgtctaacaaatgtcccacacagaaccagcttccatagtgtctcatattgactttctgttgagtaaatgaataaggaggatagaagttagttgtgcaccacagatacactcagtatagcacttcttttactctagccttgcacagggtaggcacgtgttgtaccactgagcaacattcccaaccccactgtaacatttcttgcctagatgttatgaagagacatgggtacacaaaaatccacatctgaattggcttttagcttagtttctgagaactgctgtgtttgcctgtaaacattagtagttttgttcttttggagaatatgattttgtttatctctttgagaaatatttagctaatgttgttaagggcttacattctatcagaattnnnnnnnnnnnnnnnnnnnnnnnnnnnnnnnnnnnnnnnnnnnnnnnnnnnnnnnnnnnnnnnnnnnnnnnnnnnnnnnnnnnnnnnnnnnnnnnnnctccctccctccctccctccttctttcttcctttctttctttctttctttctttctttctttctttctttctttctttctttctttctttcgtgtgtgttgattccatgtctcagctgtttggaatgatatggatatggacgtagctgtagatctcgctctgagatcctgctttctgtttgaggtgcaactagaaatgcagctattagattagggagggattctgctaattttttattaatttttttccctataattaaaaagaaagaagaaattttactaggaaatagatcttcccatgtagtatcaactgcaaatatttgaaagcagtatacactcataatctcacaaaggtcaggctcaggtgagtaagacgtaaagaagagccgcagctctctgtccgcttggagttctcctcttcctcacagtgacagtggggaccgggaagtgggagcttgcttcttctcctctcacagttgatggaggaggattccatactcagaagctctctggtagcattctctaaacccttatttttcatgattctgagtatttgacgtcattatttttttagttgttctttaactcattatgtaggtcaggctggtctacagaaagctgtgtgccaccacatccagttttaactttttaaaaaaaaaagacttatttgtttttattttatacatgagtactttaccagcatatatgtctataccatgtgtacacaacacccaagaaatccaggaagagggtgttaggttgtctggaactagagttaaggtacaggtgtttggccatcctgtggttgctgggaactgaacccaggtcctctgaaagagcaaaagtgccctcagctgcggaccctgctctctaaccctgcttgactctcactggccgtttctccaggaaagcctgtcactcttcccttccctcctcctaagatgtcctcggtctgtgcgttccaggctgctctgctcttgaatggccgcagcttaccttcctcttggtcttgaatgctggaattgaggcttgccccagcacaactggtgtacagcttctcttacttaagtttatgacgctgtttttcatgttgaccaattcaccttatgagcccagagatctctaaatgcccgctggctttctgttttgtttccaggttagcacatctgtgacatgtggcatttttgcatggaataggggaatttagagtaaatcttgggctttctttctctttctacctctttcctttgaaaatgactgaaaatttcaaatctttttacatgaatttgacaatgtatcaaaatagcctgaaagaactaccaacaattatgttgggtggtggtgatgcacacctttaaccgcagtgctcgggaggcagaggcagggggatatctgtgagtttgaggtcagcctggtccacagagtgagttctaggcagctagggctacatagagagaccaaaataaataagtaagtaaacaagcaaacctttcctttatagaaatttacttttttttttttttttaagggagtctcattagtcctgccttggtggcctgctcctgtctcccaagaaaattttgctatttacagaaaatgcaaataatacaaaagtatagattttcttttattatttctttaatctcattgtccaaaacagataattactattatatgtttgtcttatgttgtatcaagtcttttcaaggtacactttggtttttttgttgttgttgttttttttttaaataaaaagtttgaagatgttgatagatgtatggattacttcgaaataatactataattacaatctctaattgttaaatttgttacttttatattttttgtgtttctgtaggattaattcctagaatgtagttgttgaatgaaagagtaaacatattgtagacttttactagctgattccacattgccttatagaaattctttgttttctctgagcttgtaggaactgaagtgcctcacacatgctctggcaagcactctgctgtaactatatcacttttacctgcctgtaaaatgtctcagttatagatattagtatgtgtgtatatggggagggttggagcacagctttgggtagtcagttctatacttcttttctcaccccatgtttttcttttcctttctttctttctttctttcttttttttttcttttcttttttttttttttttggtttttcgagacagggtttttctgtatagccctggctgacctggaactcactctgtagaccaggctggcctcgaactcagaaatccgcctgcctctgcctcccaagtgctgggattaaaggcatgtgccatcacgcccggctccatgtttttcttttaagagaaaaattctgttactctggctggcctcagctcaagctgtcctcctgccttagctctcaagtatctggttttacaagtctgtggaactggacccaacatggacatttacttttgaaatgatctgtttgcttgcttgtgctgtagtgtgtctgtgtatgccagcgtgtgagtgggagtcagggaaagtctctgtgctctgtattgttctcggggtgaactcaggctggcaggcttggtggcaggcttggcaggctggcactttcaccatcctgctagccacaagttcactatttcaaaaactgttgatttgtttaactttctgtgtgtgtttgtgttttgcctgcatgtatgtctgtgtcccatgtgcatgccttgtgcttctggaagacagaaaaaggcatcgcatccctgaaactggagttgtggatgcctgagtctccacggttttgtgtttggaaaccaaacccaggtcctctgcaagagcagccagtgcgtttagccaaagagccatctctccagacttctgaagttcactttaaaaagaatgtatttctggggctcatgatttaaaaagtaatataatagtttgcactttgaaattttatatttctttactttaaattaatattttaattaatgtacattatgacatttttatatgtgattctccacttacagttgcataagcaccacccttttctgacaccctcaccgctgtcttgctggtcccttcagacaaagatccatcttctgctttcatttcacatgcatatatgcacatatatacacacacatacacacacacacatatacacacatacatattacctttatatttaatcagttttatttttatataactctcttaaagacgatttattaatttatttaactatgcttatgtgagtttgtatctatctgggcatgtgcacaggagtgctgtcagaggccagaggccttggagctggaattaccggcagttgccagcctccaggtgtaggtgctgggaactgaactctacgaggacaggagctcttaactgctgagccatctccaggtccaatcctagccccagccccgctgtcttctggtatggtttttagaagcaggactggtttgcatatctccacacttaactgagtgccttttcagaaacaattttagaaaatttcctggacaaaaatctgaaaatttaagtctctccatacacattaccaaagtactttccagaaaaattccaggttacagctttaagctgtctcagtgtcctgtttttccttcagtctgattaaaaaaagaaaatgctgagaagaactcattgagtaaaggtcctttctgaggaagcctggatacctgtgttcaatgcctggaacctacctaaaggtgggaggagaaggaaaggactcccacgatgtcctctgacctctgcacacacatcagacagagtaacaggtgtggggaggtgggagaagaaatcaagttttaagaaaggaaaaagccagtctgcttaacagtgctgtttaggtggtaaagtgagcagtgagttctaactgtagtgtggagtggacaggttaaagcctgcagcaccacatcagtgtacgtcctgtctgaggtttactgcctctttattctgtcccctacatttttctgcctagagaccaaatgagagggtggacactgcaccagagaagccaagagaagagccagtgctcaaagaggccatcccggtgagtggcttgtgaatactgcgaccaggtatggtgtcagaaggtgacggggctggagagatggcttactgattgtgagcactggttgctcttccagaggacctaggttcagttcccagcactcgaacgctggctcagttccaggggatccaacactcttctgaactccagaggcattgagcacacatgttcaggaaaaatatattcatgcatttagagtgaaataaataagtcttcaaagaacaaagagaggtgacggcatagtgtctggttgttagtagtccaccattaccattcatgcccatctgtagtcagagagcactaaaaaccctgggtgctttttaggactaggtgtttactatgagtgattgtccttttatttacagccacgatcctctgttttcactgagttcccaagatgccacagaaaccagtggtcctgttttcagtattgaggatggccttattattttcccccattcttttttgtaagctatagattagtcgataccaggcgagagtgtaattgaagataatttttacattgtaagcactccatgtgtgtccatgtgcgtgagtatgggtgtgtggatgctgcagctcacagcttggaggtcagaggacagacctgtgtgtccttccaccttgttgtggaaatggtctctgttgtttgcccctgtgtgtgccaggctgactggctcacaagcttctggagaatgtttcttctccacctctcatctccataggaacactggagtacagatatgtgctagctcacttgttggtgcctcacgcttgagtgacaggcaccttatcctctaagccatctgcccagccctaggagcacttagcatgtaatttatacatagttctctcccttcccgccttccttcttcttttatccttcctctcttcttctaccccccctctttctcttcttttggagttttgtggcatttttctgtaggttccttcttctttctctctttcattcttttctgatggagttttgtgaccttttcctgtaggttcagccaatactgtcttctgttccaacaacagaaacatccactggtgttaagttccaggttggtgatcttgtttggtccaaggtgggaacctacccttggtggccttgtatggtttcaagtgatccccagcttgaggtccattccaaaattaacacaagaggtaagaaaagtaataaatagatattaaataacaagtttgcaataaagcaaagtgaacattcaatgttatatgtgaatgtaagaatatacaaatatatattatctggcataaaaatatgaatatcagatttttgtttcttcttgtgatgtgtttttgatacagggttacttattgtattcaacattgaccttgaccatgcagcaatcctcctgcctctgctcctcaggatttcctcagtttttagtgacaaatgaaataattatggtcattttaaactggcagagaacatatgtctttatataactagtgtctttatatctgactatgtagccctggctagtctggaactggcttcatagttcaggctggtctggaacttcgagatgcccacctccaccttatgagtgctgagcactgcatgtgtcaccacacccagcccttataataacttaataaaaatatattagtgtgagtgcatgtgtgtgtgttgtgtgttgtgtgtgtgtgcatgtgagtgtgtatttacatttgtatatgctggtgccgtggaggccagaggaaggtattagatcctcagaagttggaattacaggtgactttgagctgcttgacatgggtgctaggaatcaaatttgtgtcctcttgaagagtagtaacaagccatctctccaaccctcaataactgttttccccaaaactaggagttgaaatgagggttttgcacacagtaggtgagcattctccgaccaagttttgataaccccctgatgtttttgtttttcagagatttttttttttccttaactttatattatgtattgggatctgtgtactctgtacccacagagagaggccagaagggtaggtgtgttagagcccttggagctggagttacagacagttagagctgcctgatgtggatgaagagaaccacacttgggtcctcgggaagagcgttatttaacttctgaggcatctctccagccccttcatccacagacctcttagttaatttattaaaggaaaaacattttttggtcatctgggagatgaatctctgagagtacctgagggattctcttagttgtgttagtagttgtgggaagagatatgtgtagtgccagtccctggacattgcagccatgctgtgtgaaagaatggagaaaggcagcgattggtatgactcagtgggtactagcaagcctgctgacctgagctagaactctggagcctgtatggaaggagagagcccactctctggaaaaggtgaccgctgtgctgcccactacccagtgcataaacgttttgtttgtttgtttctttctttcttttaaaaaatgtcaaagcagggcgtggtagagtagcgtatgctttaaccccagctctatgggggagatgtcagcagatagtaacttctaggcctgccagagctgtctcgtaggcaagaccctgtctcgaaaaaaattaagtaactaagcaaataaataaataaacaaacaaaactaaactaaaacaaaaaatggagagcgtggactgagcacaagcatgcactaattcattgctttctgctcttgattgtgatgtagtgtgcgcaggtctcctgtgctctgacatccccgctggggtggactgcagcttggaactgtgagcttaggctagccttggactagaaatgtctcacctcagtcttctaagtagccaccatacctgtctcctagatttgtttagaatttctttcgtggttcctcttgtttgtttgtttgtttgtttgtttgtttattggctttccgagacagggtttctctgtgtagccctggctgtcctggaactccctctgtagaccaggctgacctcaaattcagaaatccgcctgcctctgcctcccgagtgctgggattaaaggcgtgcttccttatcttaaagacactaatttactggctttcatacttcacttaaaaatgaaagcatattagtaagtgattagatattttatatgagtttaatgtatagactaagccttttttgagctctcctgtgttttgttttattttgttttgatacattctgtagagtctgggccatccccttctgcttcatgattctgagctcagggcttacagactgacttcaccgtgcctcactcaggtgaacacaagttcactatggattcctatgcgagtcattttcactgaaacaaggacttttcatcatattaaatttcacacggtgattgtattaactttcactcagtgcttttattctcttctgactcattcatgactgtaaatatacctggaaagtttttgagaggacagacatatgccttggatctagcaataatagataactgtgccttaggagtgttacaagctaagcagagctatatctatgtgtgctttgtccaagcatgatatattcctaagaatctcccacctggaagtgattgctaagttcaaagacagtttggcttataatttatttctgagtacctgctttgtgaacacatctttatcatctgttgacttcttcattatctgtgacaatttttttctcttttctttcgacattaaatttcctttttgatacctgtgcattattaatgagaagaaaaaagtatctagaggtcagatttgtggggtttgccctactggtgacactggctatagctaagaatctgccaaagtatagtagtaagtattgtttactttcttcttggcaccatgtgctgattaaaggctgggagagtagatgtggggcaggaatgaagaaactcaaagttgttttgcaaggtactgtattagatggttgtattatgtatttcttaattttttttaaaagcactttcatgtaacctaggctgccctcaaagttgctatgaagctgaggatgatgtaaaatttctgattctcctgcctctaccctctgctggagttatagcgtgcaccaccatacctgcttaatgggtgctgggaatggacccaggtcctctgcgagtaaggcaagcacagctgagctacctctgcagcctacctagtgaatatttccttctgtgatgcttaaagcagctatccatgggggtggatcctgtgtctcagcaaagtagtctgaaaaccacgttctaatccttgctctacagccagctgcgcccctgcagtcataactcagagcagtacatgtgggaaaaggggttaggtcagccttgtgctggaacttccatagctctgttcatggagaatgggcaggcgttgtcaaagaagtctaaatcaattcctgaactaaaacagttcctgtccatctatatcgagggcttaagagctttcaaagtgataccacccgagagtcatggctctcctcttctctcctcacaagacagcaatctcttgagattaaggagttgtttttacaaatttctttttaaactttctttcttgtatgtgtgcatggggagggagaggcgtgcacaagcctgtgggtgccctggaggcttagatcccctgagctgaagttacagccgagtcctgaacttcctgaggtgcactgggtgggaactgagctcatcctctgaaggcatttgcagtcttcactgcttgagtcattaattcatccactaatcagatgacttcatcgaggccagtttttattttagtgctagaaaatttgtttatattactcttagtaatttgagaatctagaattgaaaaatcattcatgttttgattaaaagcatgaattgtattttgtcataaagcttgaggtgggctagagagatggctcagtggttatgagcaatgcccactcttccagaggacctgggttcaattcccagcacctacacacaatctttaactccagtttcaggatctgatgttctcttcaggctttcttgagcaccaggcactgatgcatagatacacatatgtgcagacaaaacacccgcacaccatattcagaaaataaacatttttgaggtaattatttttctctgcatatttgtaattaatagacatgtaaatgaagattttctttttcctggggagggttggtgttttgttttgttgttgttgttgttgttgttgttgttttgtcactgtgttgcccaggatgatctgggacttggagcctttgggcttctgagtactgtgtcacgtagcatggatgtttactctgtgagtgtgtaggtgtgttcacctgtgcacacacactgacctggaggagggtgctgggtgtctcattgtatatcactgtctactttatcattccctttgcatctggatttcctactgaatctgcagtttagctgatggccagaaaacccagctgtcgtcctgcctccattttacagcactggcttacaggcagacgtatgaggtcatgcctggattctcaccctggtgctgaggatatgactcacatcctcatgcctgtacatcaagtgtgcttatctgctcagccatcttctcttttctcagcctcatgcctcatgcgtgcttctctcccccccctccctccccttcttctcttctctgtgacagggtctcatcatgcagacttgactggccttgaacttgaagagatctgcctgcctctgcttcctgagtgtggaataaagcatgtgccacctgccagcatgcccacgttgccttttcacaccaacaatatttttaaagttttcaaaagtacatagttttttaaaagcatgggtgttttgcctgcaggtgtgtatgtgccccatctgtgtgcgtggtgcctggggtgcaggaagagtattgcatccttggagtagagttggttgtgagcctctgtgtgggtgctgaaaaaagcctggtctttttgtatatcactgatatacaaatataacactgcaagagcaatgtgctctttagtgctttgccttctttatagcccctactttaaagactttctttgactctgaagtcttactcagtgagtctctgggtgtaagagaaggttggggcatcttgagtcgtggcttgtgctggtgccacagcatgcactggggcactggacacttgattgtggagtcgtagaactgcttgacatctggccagcggcacttgcctgctgcagtctcttccgctttaactctggatggagcgagcacagatatggtgctgggcaaccatgtcttggtagcactatgtgaaggtaccagcagtggtcaggtcccaatactctctgtacatgctgtctgtaccactgcacgagtatatgctgtgctgacttcccaaacacccgcccacagagcactgcctacccctaactaaaccatcttctttagctgtgacacaaagtaccagaagtgggattcggtcacatggctgggtacaaagaagggcatccaggacagtggtggcatgtggcacgtcgggatgggcaagcagcaccctaccctgcaccccaaagtgtgcccaaggccctcatggcagtcagtcctcataacccccactcataaaaggatttttgtttttgtttttgtttttgtttttcgaggttttctctgtgtagctctggctgtcctggaactcactttgtagaccaggctggcctcgaacttagaaatccccctgcctctgcctcctaagtgctgggattaaaggcgtgtgccaccaccgcctggcacaaaaggatttttaacagacttaattctggttgtgggtatgtgcatctgagagtctctggagctagaggtagaggaagttatgagctgcctgatgtgggtgctggtgcagactctagttccctggggatccctcgatgctcccaccactgagccatctctctagccctgcattatttctcggatataaaatcatttcttctaaaatacagcttttgacagaaagcttagaaagttgagtcagctattcagagacacacgtttgcttctttagttttcatgtcttcaggatttattttattttgtttttacttttgctttttagactgtgggtgagaacaactgaggattgaaccctgggcccctgtaagtgttctaacagggagctatacccccaggcttttaaaaaattgtttatttgtaaatgacttacttatgttgatgtgtatgagtatgtgcctgcatatattaatatgtgtgcacatatgtgtgcctggtgcccgtgaagtccagaaaaggttgtcagattccctcgaactggagttagttgtgagctggtgtgttgggttctctgcaaatgctcttaaccacaagtcatttctctagcctcttattttttattttgaaaccaattctcactaaacttccaaagctggcctcaaattcttaacctttctattctgcctccagagctaggattacaggcgtactcgtaatcttttttttgttttaaagatttatttatgttatttatgagtacactgtcgctgtcttcagacacaccagaagagggcatcagatcccattacagatggttgggagccaccatgcggttgctgggaattgaactcaggacctctggaagagcagtcattgctcttaacggctgagccatctttccagctccacttgtaatctttacatactaacacacacacatacacaaagctacttcttatttataatagttttttaattaaaaacttttttgagattttatgtgtagttgtgttttgcttgcttgtatgtatgaacaccacatgtacgactagttcctgcagagatcagagaacattggatcccctggaactggagattagatcgtctcaagccatcatctggatgttgggaatggaaacctggtcctctgctagagcaacaagtgctcttaaccactgagccatttctctaggccctttataataatttaaattttattttggatttgttttatgtgtatgagtattttgccagcatgtatatatttgcatgtgtgtgcagtgcccacgaggccagaagaaagcatcggataccccggaactggagttagaggtggttgtgaacacgtggtgctgggaatcaaacctgggtcctctggaagaacaggcactgctcttaaccactgagccatctctccagcttagtccccacactttttattgatctgataaatttttctgagtgataaatttttgaaattatctttgataaaggcccaacttttgttctaaaaaagtgaaagcccttttttaaatgtgaggtgcaagctcactgtctgtccagatgtcctaaacagtgtcaagttgttatatacattttaaatcctttgagctcatttggtttattttagaaagattttcttttcaatttttttttcacttttgctgaatatatgtgtgtatacatgtgagtaccagtaaagggcatcaggtcccctggaactggggttacaggtgccagggtgagttcactccgagagagccacaagagcacctgatctctgagccatttccagcccctctgtttaacttatagtaagtagtccagcttgctctgctgaccatggctcaggagtacttaataggataaggtgggacattacgttggaagtcagccttggctaactaactagaccctgccgtctcaaacaaagagctttgatagtttttgtaggttatatctaatactatttaatttagaaattaacttttagtcacttgcaaattatttcatataatcattaattatgggtttggttttttccttttcctttcctttcctttcctttcctctcctctcctctcctctcctctcctnnnnnnnnnnnnnnnnnnnnnnnnnnnnnnnnnnnnnnnnnnnnnnnnnnnnnnnnnnnnnnnnnnnnnnnnnnnnnnnnnnnnnnnnnnnnnnnnnnnnnnnnnnnnnnnnnnnnnnnnnnnnnnnnnnnnnnnnnnnnnnnnnnnnnnnnnnnnnnnnnnnnnnnnnnnnnnnnnnnnnnnnnnnnnnnnnnnnnnnnnnnnnnnnnnnnnnnnnnnnccctttcttttcttttcttttcttttcttttcttttcttttcaactgttttcttaaaagataatgggtgctggaggtctggctcagcagttaagactacttgctgttctttaggagaccctgagttgccagcactcacacaaggcagctcactactgtctaaccctagctcctggaggctctgtctcctctgacctcccagagttactcatatatatgcacatacccacaccattcacacaagtgtatatactttaaaataaaattgtaaaaacaacagttactgaggggctggtgagatggctcagcacttgctgccatgcctgaaaacctttgttcaatacacagaacccacatggtgggaagagagacccaactcctaatgtaatatgattttcttttcaaagttaatggaggaatgatattgtttttaaatatttgcagatttttaatgtctggcttgattttcatatccattttacattcagttatgatttgctgttttggttgcaaatggaacataatgctgattcatacatgtgcaggctaggaaagggaagagtggtttaactcttttcagatcactgaggagagtttcttcactacacccaagctcaaggggtagaaggtaaattccagatggaatctgaaatcatttcagtgaacatttgtcctttgttatgttaaaatctcctggttcagctaggacaacatttaatcccagtacttgggaagctgagacagtcaaatctcttgtctgtttgagtccaggctagtccagaatgagttccaagccagacaggagtatacagtgaggccctgtctcaaaagaaaagaaaacaaaataacccctgcaaagttgttttatataggtcaaagtactatattgtgctttgatgggtcttttaccatccatgattttgtgtgcatgcactggccatttaaaaaattcttgtcttagtaagatctttcatatgttgacaaatccctttgtagctatattctctttccctccctccctccctccctccctccctccctcccttccttccttcttccctccccctctctctttctcttcctctctctctctcctgagagtctttctgtgtagccttggctgtcctgaaactctctatatagttcaggctggcctgagagtaagagatctacttacatctgctttccttgtaccagactgaaagcatatgccaccacgccggctaggtgttcttttaagtcatctcttctcagaatctttttgatattgagaagatggaagactaaaagaggcaaagacaggttttccagaattccagtatgatttgaaagattaaactgtatcattgataacaaataatgttgttttccttgaagtaggacttcgttcttgagagatacctataccttctcacatctgagtaactgcagaaaggcacattgtctagtgattctggtgctccaccatgctcccagatgaccttactccgtgcttccccagggcggccttcactgtcagtcggcacacgtgcctcatgcttttcctttgctttctcattgcacagcatattaaagagtcagatgcaagtaggaggtttaggaaaattagtaatttttgctcatttgtcaaggccattgcataaaactctcctttaaaaaaggtgccagtgtgtagcagtgaggcacctcatggctggatgtagtcctgtgcagtgtttgtgttgagattccaggagttttatctgctactgcttttctgccttaaatgtaaagagaaatcactgtggtattgttagtgaatcactgtaggggtcacaggacccctagaacagtctcatgtgtatatagctaacagaatgatttgatcagtgtttgcctcttaaaagttcaaagaaaaatgttctgttttggtgggaaatgttttgtgtttttatcccaatttgtaaaaatattagagacaaatatatgtggatttttatgtcctaacataattaatataagtttttacttacaggtgcccgggaatatcatgtccaattttttagcaaccagccagagagggcatgggttcatgagaaacgggtacgggaatacaaaggtcatgaacagtatgaagagttactagccgaggcagccaagcaagccagcaatcattctgaaaagcaaaaggtactgcagcctgctaatcctcatggtttgtttgtttgttacattggagatggagcccagggcttttcccatggcaggcaagcagtctgctgctgagctacaccccactgtccactgatacattaaagcacaggtatcactttaaagtttgaggccagcctgctgtatatagcaagttccaggccatgcagagctacacagtgaagccctgcctcaaaaaaggaaataataaatgcacagttgtgtatgtcacgcaacattgtagtactgccaagactgtgggaagtgaggctatagctcacgtggttgagtgcttgccggcagacataaagccctgcattagatcgttgcttccacacaaactgcacatctgatagaggcaggaggatcagagcttcagtttctgctccatagagtttagggctagcctgggatacacaggatcctatctcaaatacaaagaccagcttaataatctcttgtaaattgatgtgcacaaatccagaagatagtaatgacacttactttgataaggattgtaaatatttttttctgtaaatatcttcctgtaactcttctttattaataaacttatttttatcaaagattttaaaatacttgataagagccagatgtgtgatatctgtaatgccagcattttggaggctaacataggagagtccaaagtttaaagtcaacttaggctacacaatgagaactatcttaaaaactaagaccaaaccatgtaaaaaagtttatctagtactttctgtgaaataagtgttgtttaaagtattgatatacttatttaatctttataataatttaaataaggtaataaggtattgttcttttcaacagatcaagaaagtaaggtacagaaggcttaagtcactgggttcatctcagagcatgcgttatagaaccaggaaatatttctctctctctctctctctctctctctctctcgttgatttttttaatttattgtattagtttggttatattttatttgttattggcatattcattatacatactcagttgtaggtttcatgaaggtaattttttcaagtatatcatgcaattagtgtaggtctcttataattcagaaatttctaatttctaatttttttatactttctatatattggctaggagtgtcctgtgctttaaccccaacatatatgaggcaggagcaggcaagtctgggtgagttcaagtccagcgtggtctgtagaacgagttttagccaccaacagcaaacaccaactaaactttaccacaggataaaataaaaaggaatagtaattattatcaccatcatctttatttatttattttgataaaacaaaaaaacagagtccagaagcatctgattctttggagctggagtggtaggcagctatgagctgcctgttctgagtactaggactcaaactctggccttctggaagagaagtacttgctttttggggcagagaaggggatgcagggggtgtggttcaggccaccctttgtatccttggctgtcctgaaactcactatatcctgaaactaccaagctggcctcaaactcacagaaatctgcctgcctctgcctcctaagtgctggaactaaaggcatttgccatcatgcgttgccttcaatacatacgctcaaggctgagccatctttccatctgggtggagacatagaggattttaattaattttataagacttaaatttaaacacttagtcatcaacatttagtttatactatgccatctcatagtcggcctctttaaaaatttttattatcactttttgttgtttttccgagatggggtctcactgtgtagccctgcctggcctggagctcactctgtagaccaggctggccttgaactcctgcagatctgcctttctctgtctcctgagtcttgcattaaaggcgtgtgccattctgctcagcactattattgtatttattctgtctatacatgtatagctcacctgctacagtgtgtgtggaggtcagaggacaacttagaggagttgtttctccccttctgtcttgtgggtcccagggatggttagtgaggcgtagaggccagcaccagtgccgagtgcctccctggcccctgtctaaacagttcttctttactttgctcatccttttatttagcttctttcactttcattcagcgctttcttaccctcctgccagtgcagactcttctgctcagcctctgtggacaggcacccagggtttgcttaccaccaccttgtaccgcacacgcacgcacgcacgcacgcactcgaacacaacaccccacccccacactggatgtcctttgttttgttgctcccttggattttctcctttctcgtcactctatccttgttggcatattggcatcaactggccacatgtctccacagtacctgactacttagctacacatagaggaaagcggtgactctgcaggagcgtgtttaatgttagtgtttattggcccctaaaaacaagtcatgtctgtagtcttccctctctttcactaatactattcaacaaatgtgatgtggaacaactcctctttggggtgttgttcagcagagtagtcatcaaaagaaatgtaaataaaagaacagaccttcatgccacttaatagagtaatactagtttattcatggcataggatcagcacattctatttatttgcctagagaatctaaaaatatttatgtgtatttgaaaaaaattgcagagtgcttggaagatacatgttgattttaatgtgcctattggattaaacatttcacacagagactcttatctttttcataaagattcggaaaccccgacctcagagagaacgtgcccaatgggacattggcattgctcatgcagagaaagcattgaaaatgactcgggaggaaagagtagagcagtacactttcatctacattgataagcagccagaagaggcttcgtcccaagcaaagaagaatgttacctctaagacggaagtcaagaaaccccgaagaccaagatctgtgctgaacagtcagccagaacagaccaatgctggggaggtggcctcctcacaatcaagtactgaccttcgaaggcagagccagaggcggcatactagcttggaagaggaagagccacctcctgttaaaatcgcctggaaaacagcagccgcaaggaagtccttaccagcctccatcacaatgcacaaagggagcctagatttgcagaagtgtaatatgtctccagttgtgaaaattgaacaagtgtttgctctccagaatgcaacaggagatgggaagtttattgatcagtttgtttattcaacgaaggtacctcttgttctctaggggtttggggaatgctactaaaaaccacttaagaatgtgatttaaatcccccttggatccactgcgttcgaagcgtacattctcgtttactctgggcgaaaagctctgttcttcccgtttccttcttgtgacatccccatctgtggtagattaatcttgagcaatgcagccaacatcgggcttagctcctgaaagtcatggaagaaactgggcagtttgcctgtttctaatttgtagagttagtttttctttgttgtaaagtatgatttttattaaaatttttcttttatctgaattaaccattgctattaaaacaacctactggaataattgtgcctgctgatttgtttggttgcaccagcagtaggtttttgttttgttttaattgtatctacacagttcatttatctcaatgtacttaagcattatttcagtgtgtagtcagtacagagggattggtgagcttttcctcctttctttctgtcgtctaactcttttgaattcagtgtatatcctcctccagcaacctctctagggcagtatatagcccaagctagcctgcatagttgagtttgacgccaagcttctgattctcttgcctgtacctcccaagtgctgggattatagattacagctgtgcagcatacacctggtgctcaggatgcagcccagcactccataggcaagctctgtaccaactaagctcatgttttacgtcttactggagaccagccacgtttcaggtcagccccatgtgctactgtgctggagtgtgcaggcttagtgaggatttcttgcatatctgtaaatctgcgcatggtgagttctgttaaaaggtgtgctcatctctgggcttggtagtgcatgcctgtcatccgagcactcagaaggcagagccacaaagagttaggctagcctgagctacatagcaagaccttacctcagaaaatttaaaaatccagctagtcctgcctcctggccagcactcctcctaacagctgtacttaggccttgctcaggccttctctccgtccagcttgaagctgtgagaaaaggccacacatttagcttggcattgctgtggcagcagttttgttagattcctgttagcttgggatagcttgttgagttttagagaagaaattccattactgtgttggaaagggtaatcagtggtataagtcagccactaaagctccctcagtccaccctgggtttccatcgcaggcagttaggttttggcttgcaggtgtcagaattctggatgacactggactatgtacacgccttccagcccacttcataactcagggtttgtgattttgatttaattgtatcacatgtatgtatatattaaggaattatgttctttcttcaccattagcatagacatatatagacattaaaatattggttaaatatagtgatgcttcatgtttagaattggttttagaaatatcaagagtcctgcatccattctttctgcctgtgggtttaactgatctccacagcgctaggttttccagaacagcttaaatttgtttccagctgatgtctctccatgttgtccttttgctttctcccttcccttcttcctctcactccccactcccctctttctcatttcctttccttgccagatcccttaaggctgttgtgagttccacaatactggtgtcaggaccaaacttagtcccctagacatcagcaggtgctcttagccactgagccatctctagccccaatgtgattcttttgatagcagcatttgcatattgtttgaatgcaaattgcctttattcttagagctggttttatttacttctgtatgaaaaatatcctcaacaccctaaggctattaaagacaattcaagataaaacttttatctttcggggccagagagatggctcagcccttaagaacacttgctgttcttgtatagatctgggtctggttcccagcacctaaatggtgacttacaaccttctataactcctgctccagaggatcccaggctacatcctagctgctgcaggtacacataagtgcaggcaaacactcataaagtgaaaatcaataaatcctaaaggacaaattgatcttttgaaaaataaataacatttaaaattactcttattacattaaaaaatacctaaattaagatctaaattaactgcacttattatctgtctgttcatgttacctacttgatctcagtttgtaatataaatggcatatctcttttatctaacggtattctcatctcaagacacagtgacctttctgcctttgcaataagcaaccaaatgacaatggtacatatatataaaaaaaactgttcagactaggaattacctttttttttttgacagaaaacagggtaatgtgagtttatttattaagaatatttgccaggcagtggtggcgcacgcctctaatcccacacttgggaggcagaggcaggtggatttctgagttcaaggccagcctggtctacagagtgagttccaggacagccagagctacacagagaaaccctgtctcgaaaaacaaacaaacaaaatacttatcacctggacttaaggcaaatttttatttttctttcaagggatctcattaaaatacattctgataacgactaatcataattgacattacaagtttgagcaaattacggtcacgttaagccatctgtataagctcatgctgttatgtgcctactaacttgtctttttattctacctcattttaaagggtattggtaacaaaacagaaataagtgtcagggggcaagacaggcttataatctcttcaccaagtcagagaagtgaaaagccggctcagagcgcgtcatctccggaggcaacatctggttctgcaggtgggtgtgactgaggggcgcctggctccatcctcaggggttcctaagaaagtttcattgtcaaaggtaaacgagggtgaatgaaggcaggccataatgacatactgtgtaagtatttcactgtgagagtccttgctctgtatgctaactctaactccagccccgggcgactgacgccctcttctggtgcacatgtgcacagacgtacatggaagcagcatattcagtatttggattttaaaagtaattcttttagaaggaaacaaaagaattagagctagagagttgtattcatagttcttttccctaaatacaagcactgtcccataattaagagtatagctgtaaattctatgctgagcatggtggtgtgcatggaatcccagctaaaagaaaccagcaacatcccagctcgaaaaaagaaaggaaaagaaaagaaaaaaaaagaaaaaagaaaaaagaaaggcgtgggggtggggcgttacagctgtgatttgtaagcctgtgaaatcttttatatcttatattgaaggacagcagcttcctctgcagcctcaggagacagtctcaaccctcaccgtttgctcctttatctaactctgttggagacggagttgttgtttggatgtgtgcagtgttagtggctcctcatccttaaaagagaaacgtctgagggagggagtcggcagcagaggcggggaggtctctgtgagtttgacacctgtcttgcctgcatagcaagttccaggtctgccagagatggacaaaacagaatgacaggaaacagcaacaacaaaaacagagaaagaaaaatgcctgtatttagaaaggttgtacctttggaagactttaaggctatgtttgtatctaaagttggaattacttttacttatttatgtgtgtatgtgtgcacttgcacacgtgccacagcatgcatgtagatctcaggggactgcttgtgggagacagtctcttatttatttatttatttatttatttattattttctttatatacatttcaaatgctatcccgaaagttccctataccctccctccgccctgctcccctacccactcacttccccttcttggccctggcattcctctgtactggggcatataaagtttgcaatacccaggggcctctgttcccagtgatgaccgactaggccatcttctgctacatatgcagctagagacacgagctctgggggtattggttaattcataatgttgttccacctatagggttgcagatcccttcagctccttgagtgctttctctagcttctccattggggaccctgtgatccatcttatagatgactgtgagcatccacttctgtatttgccaggcacttgcatagcctcatacgagacagctataacagggtcccttcagcaaaatctttctggcatatacaatagtgggaaacagttttttaacgtgggtcctggggatcaaacaagtcagatgtggcagggagcacccgtattcactgagccatcttagcagattgaagctatttttctttcttttttttctttctttctttcttttttctttttcgacacagggtttctctgtgtagccctggctgtcctggaactcactttgtagaccaggctggcctcgaactcagaaatctgcctgcctctgcctcccaagtgctgggattaaaggcgtgcgccaccggcagctatttttcaaaaagactttaatatgtatcttagttttaatagatcatgtgctacgttgttattcataataacagtactatgtgaatgataaaatgaataattaatatatattattagaaatagtattatatgttattttgatttctatagtcagtagaaatagatctgtaatcagttggagagtcttccatgagcatgccggttccaaggccagtgtatcctgcttagtaagaccttgggccaaaataaaaagctatagtggggtgcgagccatgtgtgtggtttcctgcctgttatccagcactcagaagaccaagcaagaagatcactgtcagccaaagttagcttgggctatttcaggatagcctgggctgcagagtgagaacctgtctcaaccactctcccatccccataggctggtagagtggttgtctggtatgcacactggcctaagttcaatatttaattgaacgagaaaatcttaattagcttggtcatttagaatcttatcttataaataagagtttattttgttctttaaaagattttgaatgctaagaaatgattttgtaatttaggaagaaaaaacttgaaccatttctgttctgccatatgttggccacattgaatagtcctgggacccagattagtggattatttttccccatactgaccatcttagacacctgctaagcaaccttttttgtctatttttgttttgagacaaggcctctcttcatagccctggctgtcctggaactcactctgtagaccaggctagccctgaaggcaagatacctcctacttctgcttgccttgtatgggattaaaggtgtaccacttcgtctcttgattcatttctctcagtgccagacccttcaggtttaagcttgtgtgtgtatgtgtgtgtgtgtgtgtgtgtgtgtgtgtgtgtgtggtttcatagcgtatggtaggaaacgcagtctgcctggactcccctgccttttgccacctcccactgctgctccaaccagcatcggctcccacaccccaggcactgcagagactccagataactcctggactcgctgttggtggttggtttgtttcggtgttcttttggtttggttttggacgggattcttccaatgtaggccaggctagctctgggtaacaggacttaggtgagcacttcattgaagcttaccgggttgtttttaaagccagcacaggtgtgcagacaaagggctgtatagtttctatgtccttcttaggtttctgccctcccaggcccctcctgtttcctcatctgggagttttccacggccacagttgagaaggtcttaggaggctttggcacgtacagacagtctattggtaatttaggtttcagcctctcttccccaggagtttgtccttctagtgaccagccagtgcctagcagcccattaagagttgtgtcaccagagtaaaagacagatctgctgtcatccacttaaaggctctgtgccaggaactaggtcagagaccaaacaacaaattatgcttttattcataccacctagagaattagaagggatttaggagggaaggtcagagaccatgtatatacttcttcctttttcagagatgacatttatttatttgtcagtgtgctgcatgtgtgccactgtgcacagaggtcagaaaaacctgcagaaatgggttctgtccttccatggtgtgggtctctggggcaagtttctttaaccactgagctatgtcactggctcagtatactttttattatattgtaatattatactgatcaaagaatcttctggaagagtcagagtctggaaagtagaaatagaaacagatctcgagtcagtagcaatcaggcaagtctgtgactgaggaaactgaaggttattttttgagttgaatttaagtcaaatctgaattgttacaaaaactatataacaaccaccattctacttgggtcaggcaggggtggcacatgccttcaatcccagcactcaggaggcagaggcaggcacatctctgaatttgaagtctgcctggtctacagagcaagtttcaggacaggacagccaggggtagtcagaaaaaccctgtcttagagggaacaaaagggaagaaagaaaaggacttggactagctatttaaaaaaactacggtgagggttgcaggacagggtgtggcgttcacacaggcttgggcacaagttggatgaggcacagtgaacagcatctttatccaggatgaagctgggcagggaagtggaactgaatgagggaatagcgaatgtcggcaagtctgctgtctgcagcatgtcagacaccatctaatgcagtgaagttgaaggtgagcaagtgactcaggctttgcattgacttaggttttgccaagacgcagtgttcgctttctttggctataacagcaacaacaaaaatgttttggcctcagctattcaaataggcatatcggcttttatagtggctttgttaacttgtcttacattaagtgggatagccagatgtttatttacacacctattcaagaagggagaaaacaaattcttcgtttgctactggacacttcttaagtgccgcaacttttattaatgggtcgtttttcctctcctcccctcagctgctgaacatcatgtccttgtgtaatctgttaagtttcaagttctgttgtgaactttgctttgctttctttaagttgagtgttgttctttgaacttaggaaatggctgtctgattatcagacatacattatgagctcggtctctgaggtttgactagaacctgctttcagggatgggtgccagggctttgagcttgcctttcgcctgttgccagtgtggctggcaagtacgctttgtctttttaaatcattacctctcttctgtaaagataattctagtggcccaaggattagaagagaaactctttccccatagaagccattgtgccatcatctcaactgaaagccaagagtccttgagcttttttaaaaacttaaatacataaactgtgtaccactgacatttctatgattttgaagaatgatatttatattcatactaggttactacattattttccaaatacacacacacacacacacactcttaagaaaataagtgcaaaaattgttagtggttttaaattgtgtttgttcattaagtaactttcagaataattttttatttttgtttttcaagacagggtttctctttgtagccctggcagtcctgtaacttgctctttagacgaggctggccccaaactcagagatccaccttactgtctacctctgcctccttagtgctgggtgtaaagacgcgcaccaccaatgctgccaccaccacctggccagaataattttcagaagtcacgttccttcaccctgtgtaagctatatgctgggttgagatgtggctcggttgatagagtgtctgcctagcatgcacaaagccctggttcaattcccagcaccacataaactgttggcttgtgcctgggaggtccagcacttgagaggtagaggcagggaggtcaggtcttcctgatcacccttgactatgactgtgtggtgtgttcaaggctacgcaggggcagcttctgtgactacaatttgctaaccccacatgtccctctacacacaagcaggttttgtttgcttgcttgttactacttccaagttgttttcttttcttctaggtagttcttgagtagtggtgattgtattagagcacgggctctgaaatcctcagccagtctcatcatgagggcagactatctcttgctttagtaaacatttttatcagcttaagaagaaaggttgagagttaaagatggttccagaacctgccttgacagtctgtaactagactgtgactctggtgctagaagcacgtaaattatagctctgaatatactgttgccacactgccagatgagtgaggtagccctcctgtattccagccttggaaggtggctctggagaccagctgctcgttagccctgggtttgtttgattcttgatagtgccttcgcctgtgtctgtaccaaggtgtgcacacacacaaatgtgactgactgcttggacacaagcgtacccatacatatatacatgaaaagaaaaatagccagggagatagtcagtgggtagaggtacttgatgacctgagtctgattcccaggacccacagggtagaaggagagaatctatccccacaggttgtcccctggtcaccacactggcactgtggcctgagtacccatataaatgcacatgcacaggtacacaaaataagtaaatgtggactgccaaactaccaattcttccacaacccaagtagtgggatttttcttttttatggctttgagctaaggtgaaggaaaccatttctgtgtaactcagagctgaagacatgtgaaggttatctgcattgtgcatgggagacacttgtctcttgactgtaaaggaggtacgtggctgaaggtcagaggacaacctgggggagctggtcctctcctgggttctggggacagaagtcaggtcgtcaggcttggtatcatgcacctttatgtgctcagccatttcactggcacaggaagtaagttctgtgtagcaagggcattttggtcagttacactaaagacccgacaaatggctgcagtaaaggcattgctgttcatggtgtccagggagactcactcgtggctcagcattctttcaagttgccaggtcagctttagttttcacatgaagtccgtgtaagtgtttatcactttatgttttaaacaactgtactgatcttagtcccagaatctcatccctttaatgccagcacttaggaggcagagccatttctatatctgagttccaggtcatccaagactacatagtgagagagagagagagagagtgtgtgtgtgtgtgtgtgtgtctgtctatctctctctctctctctctctcacacacacacacacacacacacacacacacacaccctttcacgctcaccattaagcttattttactacttagcatgaaaaatattaaaaatttgctgtaattagtttcccatgattccttttttgtttgtctctactcttcctgtttgagattagcctcctgcagcccttcattcccgacatcacacttcctaagtgtgtttatccaccttcagtgtcaactgtgcctctgctgttttggactgactttaaaactaaactagactagagtcccccatatttgtgtgagtaggatcttttatagagcttagtcacgacttttaggagctattaaataattttgtattcccaagtatataaaagtttttactgacgtttaattaaaattctgtaaataatggcatttaaaagtcaagagtctggtcggatcgtaagcaactgaatcaagcagtgcgtaagcaagtctttgttgatgtgtgtgcttctatcatctcctaggcccagtagagaagaagcagcagagaagatccatcaggactcgatctgagtcagagaagtccgccgaggttgtgccaaagaagaagatcaaaaaggagcaggttggcttcctacatgtagagagttaaagcatatctgtaatgtggtggcttatttcttgtcaccaaagaaagatcctccccaccttggcctccttcctgaactatctttcctcctgtcctgacggggttgcggtggcgacttctcaaaccgctgtcttgtgatggtgcttcaagcattttcacagagaacaggtttgggagatgggaagccagcggggtgagaccctgacattcattttgaagtttctgttataagcacaatgagttcacatttccatgagttttccttggaactatcattgagttccctttttaaaaactttgatttttagtttaagctgctggtatatattgtttttatttttcaaacaaatcaaattaatttaatttatattcttatatttaagaatcaggtaatcataaatggtctggtttttctgttggtatcacagatcttttgaaatgttatttttttttccagtagaatggcactcatctggaatcaaactgtcagataaacaatattgaagtataaagtgtgtggggaggggctacattttgattgaatgtgttcaactggtgtaatcgatgtagtaataatatacatgtgaaattaccttttcaaagaattctgagaagtgattctatcaattataaactcgcagatttttttttttgatttttataaaatgaatgaatacccatttttaggtaagcactttgccgctgagctgtccccactctttccttcccctttctttacttttggagacaggctctcactatgtagccctggctgacatggaacgaaatctatagaccaggctggccaggcattcacagagatccacctgcctcagcctccccattgctgggattaaaggtgtctgacaccataaccagctttagaatatttattttttatagcccactcatctagtattaaaatttcagaattagttacagcaagtctaatattttaaagcaatttaccatggaggagtatgtccttttttatttaaaatcttcataatttaaaacttccaaatttaaaagctaactttgtgggtgctctatagtatcacaagcatataaaaattttttgagaatatttagctaaaatttcagtaatatttgttatttatcatataatttccatatataggaaattaaagaaaaaattcaagtctgacaaatctatagtatttgttaccaaaatgaaattgtgactttgccacctggttctcaaattcagtctgtgaccagtcagtttaaaataaacaaacagaatgagtaaaaataatgggacaaattgttactgccactgtgttatatatagttagtagtagactaataccagtgattgtttagaagattttatatttgtacaactaattgtatcgtacaaaaagcattcctgttgtatgtttttttacctgttgtaaaaaaaaaataaaaaaatttttaaaaagcttagaacaatccttacatatttacaaaatgtgtttcaacatgcatatttcacatcttaaagaaacataaaattccatcccagcctaaacagaaacttctacaaacagcatctcttccctattccaatggttcagtcttccagtaccacgtgttctacatatacattggcagaataacttctgatctcgctctcctaatgtaggatcaagacactgttcataagacactcaagaaagtgctaatgcaatatcacagacgtattaagtttgttctagcagcacaagtattgagcttccagctgtatggagccatgtagcactctctacagagagggtcccgattgccagcaacttagctgtgagtgcaggcgcggaaggaagggtcttaaagtggcgtgagttacattaacctgagtatcatagtaagtaaacatttatcctaatgtctttggggcgggaggggttcatagcaacattggggctggtcacagaaacagacactgaggaaaatgctctggctctcctctagcaccaggggcgcggtgggaagtctttgctaaggagcacgaggctacgctgtcacctggtactcagcacaggcagctagggcttacgcctccctgaccttgagacagacaacttgactcagaagatgggattgagtttagactttcaatgacatcgatcactcatcactatttagattgatgaaaatgcaaaaattttttccctcgattttctaccagtgaaaaagccctcctgttaatgtcgtactgttctttccaaacaggttgagacagctccccaggcctccctgaagaccgggttacagaaaggtgagttactctaaggtgctgcttggcatttcctgattaaaccagtctctaagaataattcatttgtgcttcatggacttttgtctgtctctgtaaatctttgttgctattcagtgtggaattttaccctctgtgtgtgtgtgtgtgtgtgtgtgtgtgtgtgtctgtctgtctgtctgtctgtctgtctgtctgtctgtgtgagagagagagagagagagaggacagagaacgagagagtcgagagagagagtcttctacagttgatcctactctgtacttccatgtgaaaagtctttcttgttttgataaattagagaacaccatgtagacttggtattgtttccagcttttctccgtaagattttgggatttcactggcttataaactagggatgtgacgaatccacttttttggtattcgaccgaataccgaatagtagctattaatgcttgtcaaaaatggactatggcaaatcagacaggacagcttgactgggaaaaaatgatgccccccccttttcagtgctgtacaatcgttttgtaaattgacccttagcgtaactatggctactagtagatgaccatattatgtaaatctctttgagatatgcacaaagtttaagaagccttaaacttatctatgtgttttctgtgtgcaatctgagtatagtacaaactccatagcatgactcgtgaaattttggtgagctcaaactgtatttagtacctgtagtttactctgggcaaattgcattattttaaaataaataaaataaaacaccagcctgtctgcactctcggggagaagtctgcagcgatggtctccgtggagatcctcagcagaactgaacgcctctcggagggaacactgcttggcggagccccaagaaaagacatcgcgatcgatcgctgcgagattaggaggcctgattgcgttgtgtttccaccattccacagggtcggcggaccgaggagcgcagggctctgtcagattcagtgacagctccgtctccgcagcgaaagaggaaactgtggactgagattcctgtacaatttcatcccagaaactccagacttggagtctccgtgcaagagttctttgtcggcggctcgataaagttccttttgttttgattttgattttgccaatcattattattggcattctctggcctggtttcttcttcaagactgaacaattgctttaacattcagatgatttctctctatctttttttttttttttttttttttttttgtccgagctggatgggtacagcttaaatcatgggtccagcctaaaaaacaaacaaacaaacaaacaaaccaccatttaacttaccctgatcaattccaacatggactgttttgtttttaaataaagcatcattaatacacatctgcagggttttgccaaatggcccaaactgtatacattgcaatcattaaaagctcttattattttttctaacattagtgccgttgtcatggagaacaacaggacagctgctttcagcagtctgtcatttttctggcattttcagaaactcatcggaattggcggtacccgtgtttcccttcgcaagcctctcagtacagcacttctgttcttctgttaaaactccttgttaattcagtgatctcttaggccaaggaaatactttgtggtggtgttctggttccacacaccagcaatgaaagagatagatttgtgtccttgtgttcttgaatcagcattaacgtgggcgggcaccctcctttgtagctgtcaggaagcattcagtgcaaacttgtaggatgggatgtgctaagaaggttccagtaaccagagcagtctcccgaggccgccacctccaccacaacacgtggctagacaccaagcgctcccttcggcctgttacggatcttcatggcctcaggagacctgtttctccacagtctcttccggactgcacaattccaccgtagcttgctgggctgatctagatgtctgtctgttgtatggaaagtttgggggggggggatctaaaacaaactgtgggtggacatcttacccgtctccttggttccttggtattcaccgtgcctgatctgcacatgtcatcgcggctgtctctgtctagcctaccgcattagcccaagagattattgctttgtaactttttgcactattgttttggctggatttgtattacacgcagttttaaaaaaaaaaattccacactcttctctgccttttttttcccaagtatatatttcttctctccctcacaaagtccagaggcctgtcatctagcccttggtgatttctcgcacttgaacactgattgtccattcagccctcagtaacgttcctcccacatggcatgatgtgtgtggacgtgccacagcacttgttaacggtcacaataaatgccactctactaagaaagaacaattatgaaaatccaaaatgtattggggggctaataactgaattgcaaaattggggggttgaaacggcactatccgagtaggaatcgaatacaaatcaaagatttgtcacatccctaatcaaacaagatggagatgtctctgcaaccgtatctgtaaactacactgtgttgggtttcatgtcttccccttacgcaatcaaatggttctctgaattgttccaaatcaattggctgtctctcagtttggctagaatggatgtctagagtggaacttgggccctgctggggaaacggcgacaagcagaactgaacttaaatgtttttatagagcagttgtgaatgggatcacttaataccggaagtcagaaacttatcaagtcctggcttgcaacttcagtgctacaaacagctgtgaatttcccccagtatacttgagacgagtttggggaaagaaaatactcaccaccaacaaaaaaaaaagtttacagtgaccctaaattctattttaggattaatttcagtgtgttatgttaaggtgccagcgagatttcagattcctgtaagcccctaaagaaaaggagtcgcgcctcaacggatgtagagacggctagttgcacgtacagagacacatctgactccgattctagaggactgagtgacgggcaggtgagtgtgtgctcgggtctgggcagacgacttgtttgccagccacagttagcatgctttctcgggagcatccggggaacgtaagcgtactcgtggtacgatagcatgtaaggggggatagcatgtttgtcatcgctcactcttggtcaccacaatattcagcttacctgtctgtgtaggcttctctttcttcattgctgcacatgcagctcccccaaaccggaagagaatggccttccccaatagaggagagtcttttccagggtgtaaatgtgtgtgtgtgtctgtgtgtatgtgcagctgcattctcctgctggaaagtcttgtcaggctttcaggaggggagactgcagggcagtcaagcttctaaaactgtgggcccatccaaataagatgcttcatgtggtggtggtcagcccttgtttaaacagattaccagccaggcatgctgtcacacgactttaatcccatgctaagaaggcagagagtcaggcagatctcttgagtaactggccagcctgcagtacataggaagttccaggataacagagctatattatgagaccctgacttataaaaataataataaaatcaatactcttagaaaaatcaatgtttttgaaacattacttcactatgtaactctggatggcctagaactttccatgtagaccaggctggcagacatctgtctatcttgggctcaccagtgctgaggttgaaggtgtagcttggctgggggagggaggggacaacgacgactccctttggttatatgaaacttattttgtagatttcttgcataacagaggagttctgtcattttgccttttaaatattcgcttcagtttctcccaaatgacacagatacaccgacaacatccctgggttgaaggaaggaaggaagacgagaaggcaggcgggcggtgatgagatgaacttcagttggtttccttgggttttgcattatgtcggggacctattttttccttatcttgttttgtttgttttccacataggtaggctttggcaaacaagtagatagcccgtcagctactgctgacgcagatgcttctgacgcgcagtcggtggactcgagtctgtcacggagaggtgtcggcacgagtaagaaggacactgtgtgtcaggtaggcgggcggctacttagaagcatgtgatccagttctaccagctgtgtcattgtctcctgtactttttattattttattaagttgctttaaagctacaggtctaaaggctatttgtggttctccctatcctgatgggatgtttgtcattgttgttttgcttttgagacaggattgccttgcctggtctaaggcttgctctatagaccaggctagctttggactcactgtgagccaccactatgcccagctcctgttcctccttaatttttttgagttatttaattttatgttttgccttcatgagggtctgtgcaccacatgcttgcctggtgcctgaggaggtcagaagggaactggaattacagatgagtatgtgagccccatgtaggttctgggaaccaaacatagggctttgcagaggaaccatgtctcaaaaaaaaacccctaaaaactaaaagaaagaaaaggaaggaaggaaggaaggaaggaaggaagaaagaggaactacaaaatcttggattccttttttatgccttctaactcagaatattaggagaaaaatcccatggcctatacttgaacaagcgctgtagtcagttctgagctgcaagtttgagaactgctgctttcttgctcttgcaggtctgtgagaaggctggcgactgccttgttgcttgtgagggggagtgctgccgacactttcacgtggagtgcttgggactgactgcagtccctgagggccacttcacctgtgaggagtgtgagactggtgagccacggagggcggggcggggcggggcggggcggggcggggctggcagctctccgtggggtggctccccttgatttactccgttcttggttaatgcagctcccctcccctcccataggtattttaacaagccaagacaccatccagtattaagctttccaagatccaaaaaccagtccaaaccacctatgtccaaaaacaaacttgttttgtttgttgagtatgtaaatcagtttaagattggtgtgtgtgcttaacaaacaagtttaaagtcctttagtagactcaacaagtatcgattgaaactcttaattatggttacagtaaatatttaagtataatatagtaaatatttatagtaactataaatatggttatagtaaaactgtaaatatgattatatatttttgggaaaaaataatgctattaactttttttaaaggcagggtcttacagtgtagccctggctgccctataactcactgtgtagaccaggctggccttaaactcacagagatctacctgcctgcctttccccccaaccaccccccacctccccaccccgtacaggaattaagggtctgcatcaccatgccagacatgctgttaattttttttaacttagtatttatcattgatttcttctcccactatatattttccaatgccttcttgtagcatacaaagaaatatgctattttatgtttcttctgtaatatagttatggttttgtttcattagaaagcaattgtttaacctgaaacaacatagctagttgtcttagttacttttctattgcagtgaagagatgccatgacattctataaggtaacatatagaagaaagagttattggggatttaggcttcagaaggtgagcctgtgaccgtggcaatgaatgtagcatcaggcaggcaggtacggtagtagagcagtagctgagagcttacatgaagtagagggatctgactttgaaacctcagagcccatcatccccctgtgacacacctcctcccccaaggccacacctcctgatccttcccaaatggttttactgactagggactaagtcaaacattttgtatttatttttgttgcagtatcggtaggttctgtttttctaggaattttcccattgatatgaattttcaaattagcaaatgtttagtgatatctttataatctcttttaaaataggaatttacttataactttttaacagtttatttttatttcatgtgcgttggcattttgcctgtatgtatgtgtatgtctgtgtgagggtgtcagtcctggggttgcagacagttgtgtgctgccctgagaacgcaggtcccttgagaaagtagccaggggtcatgaccactgagccatctctccaactccaggtctctttttgtatgctaaattctgaaatgtaatagctttttctttcaagcgaagctctttgatatttgtagctgcttctatataaaaggagtatttagcttatgtggaggcacacacctgtaatctgagtgctaaggagactgaagcaggaggatggcgagtttgagctggtctggggtaccaagtgctgggatgtagctcagagtcctcacctaggatgcccaaggccctaggcctaagcccaacactttgaatggttcaatgaatgaactgtaatatgttttcatcagattttacttaacctatatatatttttttttatcaattttctaggacagcacccatgtttttcatgtaaagtgtctggtaaggatgtgaaacgttgttctgttagtgtctgtggaaagttttatcatgaagcctgtgtccgcaaattccccactgccatctttgagtcaaaaggattccgctgtccccagcactgttgctcttcctgctctatggagaaagacatccacaaagcaagtaaaggtgagcagagctaaaggaggggccgtgtgcagagtgccctgcggcagtgcgtggcacatctgccagcaatggcggcaggccttctgtttatttccaagttcaaaagctgagacacacagttgacttatttattaggcagaggctacgttgcaattcaagcattcagactatgctaaaatcttccttaggtttagttacagcatccgcagtagaccctgattcctttggaggattctctaagtgactattagtctccatctagggaccaagaagaataggaatgatggtgtcagccacagcactggccttgcaaagaagaacattctgtaccaactataacgagtttgatatggcgggggagccctgttcccatgctgtgctgtagccggcatgctgtgtgttcccgtgccgtggtcggcatgctgtagcccgcttcttgacctgtcttcacacaggccgcatgatgaggtgtctgagatgcccggtcgcctatcacgttggagatgcgtgtgtcgctgctggaagtgtatctgtgtcctcgcacattctcatctgtagtaaccattccaagcggagtagtcagtctgctgctataaacgtaggcttttgtttcgtttgtgccagaggtgagtgtcaatctgttttttttttcctcgttctggcatcattcgcatatttctccatttaactgtgtctctgcattggtgagaactccagctgtccgtctcatgaactatgtcccagcgagtgctgactgcattctgttatatatatagtactaggagagaatgtttcaggcagacattcccatagtgagaatattatttcttctacaagttaaactaacatctgcattttaaaaatatcttaagctgggtagagtggtgcacacctttgatcctatcactggagaggcagaggcaggaggatcttggtgagtttaggcaaggctggtctacatagcaagttccagggccagctaaggctatatagagagaccctgtctcaaaaaggaagaaaaaaacccaagtttagaattacaattaagtgttggttagtttttttgtttctctaatcagaaggttacttagagcagaaccttcctgcactgtgtttcagcggctcgggagtgtcatgtgtgaagcaagggcagcccattctcagttagatgctttggtcattgagggcctgagaagagcagccaagcagggtctttcacattcgtgaaattgataaactgaaagcagtatcgtgtcctgtggaggaccagacatggtattaacagacttaagttcatggtgtgtcttgcttttttattgctgtgacaaaacaccatgaccgaagtgatttataaaagaaaacatttaattggtagcttacttccagtttcgggggactagtccaaggccgtcatgtgggaagcatgacaagttagcaggtttggtgctggagcagaaactgagagctcacatggtgcagtaaccaaaggcagagaacaagccaactagaatggcttggcttttgaaacctccaagcccaccccacagtgacacacaggctccaacaaagccacaccttttaatccttcacagatgattctaccaactagaaaatcaagcattcaaacctatgagcctataggcatgatttacattttcaaaccaccacattccacttcctggcccccataggcttgtggctatttcattatgcaaagtgcatttaatccaacattaaaggcccccatagtctcttcggttttaaggcttcataaaagtccagagtctcttctgagactcgggctctctcaattggaacccctgtaaaatcaaaaggcgaatcatcacacactccagcatacaggggcacagagtgcccactgcccgtccaaaaggacggacggagcaccgaagcccagcggggcaaactcaagttctgcgtcttcaggtcagagggctcttcagatttcctgctcttccaactttgatgtctgcagcactcttctctctcttggactgctttcacaccgtttgcagttctctttgacagttgtcacaggactctggcatctccaacactgtggatcttcagtgcaatcccaacttcattttctcagcttcatacagtaccctctctgggtctccatgcaggtactcccctgtcacacgcctggcctcagcatcttccttaaccaggaaggaagattttacaacccctttacttgtgtgttcctgcctctaaagccggagcccggtaggggagctactaagttctgccacactgcttggcccctccttgaactacatgtgcacagacttgggtttgccgatgtgcttcaccctgagtaagctttcttcccttagaagcagggatcccttatgcatttcctttttacggttagaggcttggctgggtgaggtcgaagcaggccgggcctttctttaaacatctcatctctgagcacaagacttggcttccacattaatttcctcaggctcttctttccctctcactgtacactgtatgtttgctttcttccctgcttgttcttcttcactgtagatctgcacaggagtaatcactaataaccacaacacacagtcaatactaggttgttttggaatttctgcccatgacaaaatccaaaacaatttagcttcaggcagattcttaaggcaagggcaaaaaccaaccacattctttgtcaaaatatcacaagagttcctaagtcccatgcttaatagccttcccctctgacacatgagagccgaaacctccatagtccatgctgttcttcccactgctgatttccagactcctgctaggatgatgcccagcgagtcccatgtacagtgttcagccttgcttccctcagccagtcttccgcttctctaagatcagcgtaacccagcctgtcggcagtataccacttgctcttgtattgcggtggaggaagatgacagaggcagctcaggagagagcacctagttagggccttccctgcagtgtcagaagctcccccatcatatcaggccatagcagcaggcagctgtggtgctagcctagctcaaagcctgcagttgagtcaaacaccatgagacagagagagcacaaactggccctgctctttaaacctcagagtcctctcttcccagtgatactccttctccaacaccacacctcctcatctttcccaaactgttccaccatctggggatcaaacattcaaacacattctcatgtgggggtcattctcatctaaatcaacacgtggtacatgtaaaataaaactttattagactacgatatacactgtccatcttatcttgtcttatcttggctgcattataataaaattctttttcataattaggaatcttataaatatctgttttgcttaaaaatgacatttgttttaattttttttcactttttgcatttccctgtatgtaacatttgaactactagatatatcaagtctgttattatatttagatcttactgaagatcaaaactttttgttgtttgtttttgctttaggacacagttaatttgttggaagtatcatgtgtgtatgtgtgtttatatattttctttctgtttttttggtttaagatgagatctagctagaggctggtattaaacttctgaactgaagtgatccttctgcctcagctttccaagtagctggggctgtgggtattttatttaccatgccaacttataaagatatagtagatttaaaaacaacaacaaaggggctggagagatggctcagaggctaagagcactgactgttcttccaaaggtcctgagttcaaatcccagcaaccacatggtggttcacaaccacctgtagtgagacctgatgccctcttctggtgtgtctgaagacagacagctacagtgtacttagatataataaataaatcttaaaaaacaaaaaacaaaaaaaaaacaacaacaaaaacttagaagtgacagccagttaatgattaagtaaacacttctgtattagcagcttgtatgcagtcccttctatagccagctgttatagttaactagtaagcaaacatctgtgtgttagcagcttgtatgtggtcccttctatagcccctggattccttatgctggggctttctagcttcctcagtttcctaagcatgtatgttatctgccagcaagtaaggaacactggtatcttagttttgattgtttgtttgcttgtggtctggggattaaacccaggactcaggctgaagaagagctctaccattcttccttatcctaccctgaagcaaaagtagccgccctgctttgaagccagcaggagttcaaccaaagtattcacttccacactgttaatggtgacagacaagatccagagggggtcagctaggcaaatgataagtaaaaatgtgtccccactttctgttacagaatagagtggtgatcagagaggacctgaattcaggtgtgtgtgtgtatgtgcatgtgcgcagtggccaccaggccataagagatcatcagaccccctggaaccagagttaaaggtggtcatgagctgtcatttgggtgctgggtatcaagcctgggtcctctgtgacaaagcaagtggtcgtagcatcaggcacctctccagccccagcctgttgacttataaacgtaatccatatgtttagaggccctcagacaggccgtgacagcatgcagccctggttgcttagctgctttttctcggtctgcctcttccagacccttttaactgctatgttagccaagtccagtccagtttagtcagtattttaaccaatatttttgtgctgtgtttcatttaataattgatctttgttttatttgttttccaagacagggtctgattctgtagcactcactctgtagaccagctggcctctgctcccaagggtgggcttaaaggcgggcaccgttatacttagcgattttcctgggttgtttttttttttttttttttctttcttttaaattggttgctctttaaaactgttttcaatttaggacaggtagaaaatgtacagttacagggacgtttgccatttcatgagatgaaatggatgctcatgaactagaagcttaagaataatatccatgggacagagcccctccattcagaattagaatctatgactcatctgtctgtattttatctaaataccatgcaatgaactcccgcatattttaactgtatagcaaatgaactttgtattagaagagaacttcattttctttcatagcattttgcaaaaattcagtctaaacataccagatgtttcagatttgagaagatttaaatcagagtcttttaaagtacaagcatggaagccaggggtggtggcaaacatctttaatcccagcatttagaaagcagaggctggcagatctctgatttctaaggcagcctagtctacagagtgagttatgggacagccagtactacatgagatcctatctcaaacaagccaaaaagaaaaaaaaaagctataaacatgtaatcttttaaacattaagaacacctatttttaaatagactgactatagtaaatctatatgaccaaaaaataaaacctactttaataaaatatgttttagaattagaaaatattgcttattttctatttctaaccttattaagaatgtttctaatcccataaaggatttttttttcttagttcctggttattggatatttaaaatcattaatcctgggccattgagatggctccatgggtaaaggcttggtgccgagcttggcagtctgacattggatgccagggatgcagggctgcactcagtggaaggagagagcctgcccctattatcgttatctcctggccactgtttgcatgcctttataacacacgtggttcattaactaagaaatgaagtcataaagctggttctaagcactggaaggcctagaaacatcttcagaggttttacctgcatccccagccaacctgaaacaccacagaaaatagtgagatgtctttcagcgcaatttatattccttaaactttcatgcttcttgagtactatataaaagaaagaacttaacgtcctaagtcttactttgtaatggaaatgataggttaggttatctttttattttaatagtggtaatagaagtttcttttgcatatgcatatagcacactctaatagacaatttgaaataatcgccaccgttgctgtaggagtcgtctttcctggtctgtgtgagcaagaacactaaaacccaggctgagttattttcctaatgacacagactggcgagtggggagattctacttgaccttcttcatttttgctttttataatcatgtggtagaatttataacaaatgtatagtagagttttaaaatatattttatttacagatagataactttacggatagtttaaatagctaataagccactcaaagccttttattttattctctcataaattacatctcattcacagttttccctccctccctcttcaccttccaggccctcctccctctctctctcctccagatccattcctccttttcccttcagaaagttgcaggcctctcagggatatcaaccacacatgacatatcaagttgcagtaagactaggtacctcccctcatattaaggctgcacgaagcgacacagtaggaggacaagggtcccaaaagtaggcaaagggtcactgttaggagtcctacaagaagaccaagctatacaactgtaacatacatacatacatacatacatacatacatacatacaggcatgcgtgcgtaattgtcagtttagtgtctgggagtccctgggagccctggtagttgattcagtggatagttttcttgtgatgtccttgacctctctggcgcctacactcagccttccccatcttccatggggttccctgagctgcacttagcgtctggctctgggtctctacatctgctcccatcagttgttggacgaagcctctctgatgacaattattctaggacttgtttttcttgttctaggtctccaggctgcccagcctctggctcctggtcctccaggcagtgtccatcatggcctccctctcttggcgtgggtctcaagttggaccagtcattggttggccacttcaacaatttctgcgccagacttttctcattttaaaaatctcttttcattcattcattttttaaataccacctctttttactaaatgaataaaatattttgacattacataacttttcttaacaagattcctgtgtgagtggcagtgttgaattccattctgtcactttgttcagacctatcatctgtccatctgtccttccatccttccttctttccttcttccttctttccttcttcccttnnnnnnnnnnnnnnnnnnnnnnnnnnnnnnnnnnnnnnnnnnnnnnnnnnnnnnnnnnnnnnnnnnnnnnnnnnnnnnnnnnnnnnnnnnnnnnnnnnnnnnnnnnnnnnnnnnnnnnnnnnnnnnnnnnnnnnnnnnnnnnnnnnnnnnnnnnnnnnnnnnnnnnnnnnnnnnncccttccccttcttcccccttctttccccttccttccttccttccttccttccttccttccttccttccttcctatttgtttttcaagacagggtttctctgtgtaacagagccctggatgtactggacttgcttggattcacctgcctctgcctcccaagaactgggactaaaggtgtgcatcaccatgcccagtctagtttagacatttcttgaccccatctcagtgcagagcagcatcaaatgcagattgcacccaaaggaaaagtgagcggtgatcctcccaaaccacaactcttccttctcagagtggtccctgtgtgacactgtcgtgacttacagactaataaccaatggagtaattaacactaaaacagcagcgccctgggcagacagtggattgtgcattgtggatgtacctggaggtattggggccagtgctacagtgaatcttgtgtttccttccaaataggacagatggatatgtaggcgggtcatagtagctttttagaacatttaaggtggtaagcacttcctgtgacagcataaagagatctaaactggtttgcactccctgggggaagtcagggaagtagggctgcctcactcccattgccaactgtaaggcgtggtcacatagaggtgctgagttttcccctcatggaatcatgggtagtttcatggcagctcatctctttctgtttgtttcatatagggctgatagttcaggaccattcagaccccatgttcagttcctatgcctataaatcccactacctactgagtgaatcaaaccgtgctgagttgatgaaattacctatgattccttcttcgtcagcttccaaaaagagatgtgagaaaggtaatcgtgactaaatagtttatctcgtgtttaatctctgcattttccgtttctctctttaagtggaggggggtagggggtatgcctgccaagcactgcctgttgcttttggtaggtcctgcctttgtggttatgactctgtcttcatatggctatggaattactaaaaaggcttaaaacaattctatcatcacagatttttatttttctccctgaatcaattctcagcattcaaagatgtaacaatcacggttcattcctaatataccatgtatgcatatcaaaaaataggtttttattagtgttttaaaatacaaggtttttaaaatacaaagactagaattttatataacataaaagacttcctcatttgtttgaggtagaactgtcattcatgttaaactagaatagccacgatacagtttttttctcctcgtaagctaagcaaccagaaaggccacttaaaaaagaatgacaagcagatactggaaaagattgtttctagaacatcttctatgattttatttcttaaatatttagttaagatgcaatgaaaacaaatgcccttcccgtaggagggaagctggggttcagggctaccccaaatactggagggtgaaaggtagcccagccagaggactgatgaatagtttattcataaagaaatgagctaaatttatgttcacattctctcaagcagtgtcattcctgaaagaaaactcttagccgtgcttaacttgccatagcctgcttgcaataaggggaaagtggcttcatgtttgatttgggggattattatctcagaggaagcgtcagtgagcttagaaggtatggatagaccttttgctcaatatattcttattatagtccaagttcagaactgataaagaaaaaaaaaatcaccgttcattcctaatgtaccatgtatgcatatcaaaaaataggtttttattagtatttgttatctgtgcggcctctttgatctgtccttgctcttgttggcccaagtagcaactaatagaagcgctatctggcaaggtgactagagccaccaggagtcctgagagactggcctgcggttgggttgtatgctttctgctcaggtcagcctccagtgccttattagtgatgtcctaagcttccttaaggtgggcaggggcctgcattactcctcaacaagatagaattagtctgttagtacatttataaaattagattaactcagctgttgttttgtttccagcattaacattgacatcaactggaactattttgaaacctctacttagcttgaatgatatatttcctctcttgtatctggaaaacagtttgatttttttttttctggtttgttggtttggtttttttttgttttgttttgttttgtttttgcatagcacaaggtagaccattcatgtttcattttcttctttatctttctatattttgaacatttctgtcatgacagatttcactgattctggctctgtatttcctctgaaataagactgaacatttacaaccatttacattaacactaaacatgaccttcccaacttccacagtggtgttaataataacatatcctctaaggctgtctgcaagacaggcctgcctcttgatcagtgggttccagtggacttaaaaaccctatgcagagcctggcggtggccgcgcacacctttaattccagcactcccaaggcagaggcaagaggatctctgagttggaggctagcctggtctacagggctagttccaggatagccaggggaacacaaagaaacactgtcttgaaacaaaacaaaacccttaaaacatccaagcagctggaaaattgaaccagttaatcccactgataacctgtagtcaaggggaactgctaatgtgaaggctggcagaggaaatacagttctctggtccatcgtggggggtttaggtttccttttcatgtaacagttgaggtttgaaggtgcaagaagacaagatttctggaaatctttaaaaggttagagcatgcgatttggtcaagttatatagaaggcgctgaatcttttgcctgtgagactttaaatctcttgttggttgtagaacggactagtcaggggaagtgtcctttgtcttcagtggtgagctttcttacttgtgcttgtacgagagacccctgtcccctacccgctcattttgatttgtcggcattcgaagcgttactgtttgttgcacctgttttggtttcaaagagagggcttactagaaacccgaaaggacaagcttgcacatagtacttcattctgcactgacaattacggggttttgtgctataaagcagtgcttctcaaaactgagtcagaaaaaaaacaaaacaaaaacaaaagaaagaaaaaattctaagcatttttggaaattaagagaattacaccttcatacaatatagagctatatgagtttatatttggctataactttaactgttcaacatgctaatactttctttgcttttggatcatagtctctagtagttatgtatttctttggtcaatacaaaaaggagagctgggcatggtggtgcctgtctgcagtcccagcacttgggagacaggcaagaggatcactggtggaaggtgtgagctacatagtgaaattccatctccaagaaaaggtggaggaaaattcttcatcttgaaatgcaagtttatttttggttggtgtggttttgaaaacgtaggtcatgactaggagaaagggaccagtggagatggagcagttacaggccactgctgtaacagttaaaggccactgctgtagttacagaccactgctgtaacagttacaggccactgctgtaacagttacaggccactgctgtaacagttacaggccactgctgtagttacagaccactgctgtagttacagaccactgctgtaacagttacaggccactgctgtactgcctgcttgacggcctctgcactgggaaggagtgacgctggagctaccgttgtgagaatctgtgttccaccttggtattagaaggagaaaataagttcccatcaccttaattattttcattcttgtctgacgttattataaagagatttagtttattgtggtagtggattaaaataaaaatgattgttactttttcctagctgtaaagaacaaaagaaagctatttgtttgaaagcctattttaaatctacatgggctaacgaggttctgtatctcttgtgatattttagctagccaataccagatcccctgtagctcatattctaaaggagcacaggttgggtttttctggttttttttttgtttgtttgttttttgttttttgtttttttactcaaaaacttcgtttctagctgctgaagtcttaacaactagctatttcattcatttcctattttaatccatcactcgggacataattcagtgtctttgtttcccatttgaataaagtctagtatacttaaacgttttccttccttccgtttctctgttactaaggctgtttgtctgttttaaggtggaagattgctctgctgtgaatcgtgccctgcttccttccacccagaatgcctgagcatagacatgccagaaggctgctggaattgcaatgactgtaaagctggcaagaaactgcattacaaacagattgtttgggtcaaattgggaaattacaggcaagttttccaagcacaaaaaaggaagtactactgttgcagcgggggtcatgatctgcacggagtgcgattagcgcacaggccgagagacaggcttgcaggatccgctccctgaacaaaagggctcaaagacaagggcggttggtctggatttctagggaatggcaaaggttattttgctcttggatttttgtttttatctgcttgccttttctttgagagtgggtttttcactttgcttaggttctgagaattattttatactgatgaattatgcactactaaattttgcaatgaaaggatttacataaagaatggaggttttgggtttttttgtatcttagttttatattggttttaaacttttttataaacatttatttatttgtttgtttgtttgtctatttatttatttatttggtgtatgagtctttttactagcctgtacgcttgtatctcatgtgtgtgcttgcctagggaagtcaggtgtcagatcccctgagactgagttacagacagctttgagctgccatttgtgggctagaaattgaacacaggtcttctggaagagccctgaacaatctctccatgccttgatttctaattttgaatgagatcaagagtttatagcttttatcaaaatagatccattcaaatttgtttgtttttgtttgtgtgtgtgtgttctctgtgtaataaccctgaaacttgctttgtagactaggctggcatcagactaacaggggtccacctggctctgcctccagagtgctgggataaaggacgtgtgccgccacaccctgctaggtcagtttggttctaaaccaggcccactgtgttcaagtagccctaagctgtgtgcaaagagtgctttgttttcttcatatatactaaaaagtgagattattccagtaagagctgggacatacaagtgccacagtacaattttagaggtcagagaagagctttctggagctgggtctctcctacccaagagaatctcaggaggtcagccttgacaacagcagctttacctgttgagccaccacaccagcccaagcctcagttcttaaaggcatgagaacaggggctgcagagatactaagagtgattgctgctctttagatccgtgttcatttcccagcatccatgtcaggaggcttacagccccctgtaaccccagcccaggcaggcagaccttctctcctggcctcacacaggtgcatatacacacataaaaaataaaaacatagggctggtgagatggctcagtgattaagagcactgactgcacttccaaaggtcctgagttcaaatcccagcaacaacatggaggctcacaaccatccgtaatgagatctgatgccctcttctggtgtgtctaaggacagctacagtgtactttcatataataataaataaatcctttaaaaaaataaaaacaaaatttaaaatgagagaggaattaatattatttaaaaacatactcctttgtgataagttatttctctgccagtgaaatgagccaattcaagccagagtagagtacatagcaggtttatagggaagctgctcttgggctaggtaagttgtcatgggaggggagagagaaagagagcacgcaagcagggagagagaaaatggagagagggggagaggagagagggaaagagagaccaaattgtctggattatataggaaagagcctctaggggaggggaaattcagggcagagggcatacgccctgtaacaggtagagactgagggatgctgggagaacctggaggccaggtccatcttgctatgtaaaatatacacctcagcctcctgtcctgggtctgaaacccagcatggtaagactttaatatttttgtttatttttgttatcttatgtgtatgggtgttttgcctctgtgtatgtctgtgtgctgtgtacccagggaggccagaagagggagttaggttccctggaactagagttatagatggctgcgagcagccgcgtgggtgctggaagagcagcctgtgctcgtagctgccaggccatctccccgggtcctcctttaagataattaatagccttgatatgtgttaggattggtattttgaggcagggtctcactgcgtagctctctctagcctagaccatatgtagaccagatgtctgccagacggcctgcagagtgctgatattaaaggcgtgtaccaccacatccaccttagctgtttttaaagatggggtctcactatataactctggctgacctcagagttggcgtgcagaaaaggctgatctaaaccacagagacccacctccctctgcctcctgagtgcaccacagtatcaggaattctattggaattctgaagaaaatatatttctagataattgcaaccatattgtaaattgtttgcatgaagagttgagtttagagtatattaaacataagcagtctgtgtccatgtttttacatgttatctcccttttggaggataggacagaatcttcctggcctaactaacctcttgcttaagtggtcctcctgccccagcctctcaagtgggtgagaccaccattgttggcacttcttcttgctttgttgttggaggaattttgtatttttgttttgtttttgtttttgttttttagtgggagctggagaagtggctcggcagtgcgagcactgactgcttttacagtggcacgcacagctgtctgtaacttcaggtcctgctccacacctagcacacacacagggtgcatacatgtaagccagacattcaaacacatacaagtaaattttaaaaagtgtgtgtgcgtgcgcgcgcgcgcgtgtgtgtgtgtgtgtgtgtgtgtgtgtgtgtgtgtgtgcgtgtgtgtgtgtgtgtgtgtgtgtgtgtgtgtgtacgtgcgtgtgtgcgtgcgtgcactttaagtgtagatctggatacatacaatcttcttttttccagtttggttttatagggacagaccctctctccaggttagccccacccccacccccagccctgttgtacaatgtgttcttcacatgtggggaatccatctaatgccaatagtctccatgccaagagcacggaggagatggttttttctacttgcaccctgtgttcatcaagttgaactgagtctggaatgctgacagggagcctggtatatcagggcgagaggcacctcctctggttgatgagtcgagaagtgctgactcgcatgtagtactgacactttgctacggcagtggctcattctcaaaagaatccctctgaccgctagaaacaatccttcattctcaaaagttagtctcctccccctgggaagagaggaagttcatcagttgtgggaaagtgtgaatttcctacagtgaaaatgggctgggatcatactagttaacatcccaattccagagctgggaagtggtcgcattgtccttctcacagtagatgttataactgatatgttcgtgatatatattttataaattttaaatgctagtcttttaaggaaagaaaccacatggagttgttagggcctactttgttcggcctatgttctctgttatgttaattcagcaatagtgattggttgtggtcatggtgttttggtggttggtggggcggggcgttggggttgggggaagtgagggtgaggcagggtctcactgagtagctcttgctgtcctagaaactcactatggcgacctggctgacctcgaatccacagagatttgcctgcctctccctgggattaaaggcatgtagcaccatgctaagtgagcagatcactactgtgtattctagaatgtgaacccttctcccggcctgtaaggaagagtgtgaggttttcaccttctccattttgtcctcagatggtggcctgcagagatttgcagtcccaggtctgtgccgctgaacatccagggccttaagcatgacttgggggacttccccgtgttcttctttggttctcacgactactactgggttcaccaaggcagagtgttcccttacgttgaaggagacaaacactttgcagagggacagactagcattaacaagaccttcaaaaaaggtaagttgggccatgctcacagagacccagtgctcacactcagggctgtgttttgtatttgcacacgaatcttctgccactcaagaatgttcaccagggccgagcgtggcggtgcacgcctttaatcccagcactcgggaggcagaggcaggcggatttctgagttcgaggccagcctggtctacagagtgagttccaagaccgccagggctacatagagaaaccctgtcttgaaaaaccaaccaaacaaacaaacaaaaagtgttcaccaggcactgggattctacatccataaacctcctatgacatcaggaccaggtttgagatgcataaagcctagagcactaggctatgtttgaagtgtcttttaatcaagtgaaactcctttaccacagacaagtaggaaaggcttcccaggaagaccttggacatttgcaacatgacagagtctacctttctttttctttttaatttttatttatttattaagatttatttatttattgcaagtgagtacactgtagctgtcttcagacactccagaagagggcgtcagattctcattacagatggttgtgagccaccatgtggttgctgggatttgaactctggaccttcagaagagcagtcagtactcttaaccgctgagctgtctctccagcaccccagaagtctacctttctcagtaaggataaaatcagtttaaatctaggacagacagggtacacaggcgctcttcacagggtcacctagaggtctgagtcagtgacgtcagccctgtgctctgatgcatagtggttgatgctaatttattatttcctctacagtggtggtgactggtgatttccaaaacataattttagaaagtcagcctcaggccagaggcagagcgtgtctaggatggtagaatgtaacttcccacgctaatggggtgtgctcttcttttgacaatggcttgcctgctcttcttgtcagcactggaagaagctgcaaaacgtttccaggagctgaaagcccagcgtgaaagcaaggaggctttggagatggagaggacctccaggaaaccccctccctacaagcacatcaaggtgagtgcgtctccccgctgcttaaagccccttgacttacagggatgctccgatggtcaccctctccttgttaagccaccacctgggaaccgtggcttacatggaattctgttgtttctgccagagtatcctgcaattagacaaggatatagacctttagccttccttttccagacattgtcccttgatttcaggtattaaatttcatcagcctgtggcaagcgggggtggggtggggtggatgagacttgacatcaagcttcagcctttttgtgtagcaaatagacatagttattgttcctcgtctattctggagaaatcacgataaagagctttccgtattgtgtctcagtgctttgatgttcagttcatgttgctcacagatcctcatcttctcccgcccctctcttgctctgtcgtctcccaggccaacaaagtcatagggaaggtgcaggtccaggtggctgacctgtcggagatcccccgctgtaactgcaagcctggtgatgagaacccgtgtggcctggagtcgcagtgtctgaacaggatgtcacagtatgagtgtcacccgcaggtgtgtcctgctggggaccgctgtcagaaccagtgctttacaaagaggctgtaccccgatgcagaggtcatcaagaccgagcggcgaggatggggcctcagaaccaaaagaagcatcaaaaaggtaatgtggtggccacatggctgccctcgtcagtcgtggcaggactgtaagaagcatagctacttaaagttggacttctcacttctcacagggtttgcacttgctgagcgagaagaaagtgggaaaggataacagaacagcctggcactgtcattgatgagccttgctcagaaggggcattgtgctttttgatttctttctttttttaaaaattattaagtggaatgattcaaacatattttcttgttgttgcttttcatggtggataaacatgtcagagaagcaacataataaagttgattactcaccagggcagaaactagcaaacccagaactttgctgcaacatcaagtcatagccataagtgtgaccgaatcaccaaatcactaaggtgggctgtaacagtcgtccattgtgtggagtcgcagctcgttagaggcctcggattatatgtgcaggggtggtagaaacagttgaaataatataactctataacttatttttattttcacaccttgagacaggtttttttcccccacaagaccctcctagcacaagaaatatataccagttggagaagtattttaaagccaaagagcttaaagaaaaattaaaatttctagtaaacctactattcaaatagtgggtctcagcttttagagtacctgagaatctcctgtggctcttgtcaagaaactaactgtggccgggtgtagtggccgcacacctttaatcccagcactcgggaggcagaggcaggcggatttctgagtttgaggccagcctggtctacaaagtgagttccaggacagccagggctacacagagaaaccctgtctcgaaaaaaaaaaaaaaaaaaaaaaaaagaaagaaaccaactgtggggagggtgatgtgtgtgtttcatcctagtactcaggaggcagaggcagaggcaggcagatatctgttagttcaaggccagcctgagtgaattctaggtcaaccaaggctagatagtgcgaccctgtctcaaggaaagagagagagagatggggtggggtggggtggggggagaccagacagagacagaaagagagagaaaccagggactggagacatcaatagttaaaagcactggctgcacctgaatttgtctcccaagcttccataaccccagtcctagggcatctgatgccctcttctgacccaggcaccaccaggtacaagtagtgcacatgtatacacatgcaggcaaaagcactcctacagaaacgagaatacacctaagccgaggggaggccggggaggacccaagagacggaagcaaacagcctgcacactagtgctgaagactgagtggtaacaggacatgagctgaggtaggtagccaagagccaggcctaaagccgtccttcaggcaagaactactagatggcttcagtagggtggctcactgacctgacaacgctggttctctattactgtatagaagtattaccacaaagccaggaccctcaaactggctgtgctgctcacacctgtttctgtcacttgagaggctgaagcaggaggatcaccaagaacttgaagctggtccggtctatataaacttgggaattatggcctggccttaaaagtaagaccctatctcaaaaacagaacaagtgaccaactcaaggagctggagagcactggctgcttttacacatacaggacccaggttcaatttgcaccacccagcatcacgtggcctccatgggcactagacatgcacatgggacagggacagcaagcacacacaggagttaacagtttcattgtcacagctgacgggtcctggatcggctgtgctcagctggaccgtcatttacgattgcagggagtgaaccagacttcatccttagctcatgcagggaagggcccactttctggcttacctgctatagagttccattctttgttgctatggtctgagggcttgtgttttgagatttttttcctctctgctcttggccagtaataactcttaactttgagtggcttccccagttccttgctacctgaggttccagacgtaggcattagagactccacttagcatgccggacattgagatcttagacaacaagttcttgttagcctatgcatgccatcaccgttgtcacgtcctcacaggaggggatcacaggatgaatggtatgaatcagaaacaggatctggggcaaccttgaggacctgacacatttagagttttagagaacaagtttgcctggagaatgaagggattatgagaaaggaaaaaaatgctaggatggagcctgttccagcaggccaggaaagtgacatgcacaaggccagtaggtcggcaggctaagagagtgacagagacattactgatatatactcgcagccatcctgtaatgagaagtgaggagaatttgtggagtgaaagtctgttaaaatagtaagcacacacatatttgtttctcaaggtatttatttcctctgatgagtttgaaacgctggtgagtcttgcagctaacacagctgccctagactgagcgagtgtggctttcgagatgatgaggtcagtgataatagaagcccacgcagctgactgactgcctggtcccactcatgtggtcctcacttgaaacaatggcatttcccaattctttccaggatccagaagtcctgggcctcttctgtgttggtggtgggagtgtaaatggtgcagccattgtcagcagtagtgtgccagactgtataaatacacacacttactgtactacacaacaaatcttaactactggctatttaaaccaggaaaatgaaaaactgtaatcgcatgaaaactcttcccaaatgtgtacagcaactgtatttataatagcaaaagtctagaaagactggccagtcttcttgagtgggtaaataaacaaatggtggcacatccacactgaggagtcctactgagccattgaaacaaacaactgaaatgggtcatctgacaagtagcttattttattttattttattttattttattttttaagctcgctccatagctatagatgtggtttagtcattaggcaactcatatagaggacccagatttgagtctcagcacccacacagaactatctaaactccagttcctgggcatctgataacctctttcagcctcactgggcactgcatgtgtgtgcgtgtccacacacacacacgcgcgcgcgcatgcatgcaggcaaaacactcatatgcataaaataaaaacaaatccttaactattttatgtgtgagtgttttctctatgttatgtgtttgggttatgttcctgtttggtacctgcagaggtcaaaagagatcatcagatttcctgaaataaaaacacatctttaggagctaaagagatggtttagcagttaggtcactgactgatcgtttagggagctatgttcaatgcccagaggtcacatggcagctcacagccattgataactctagttccaagggacccagtgccctcttctggcctcagaaggcaccaggcgtgtaagtggtacacagatatacatgcaggcaagatacccatttaatttttttaaatgattaaaaaatccaaatctaaaaataccagtctcaaaagattacatattatataaatctgtttctagaacatttgtgaatggcaaaattatactgatggattagttcggcaagggttaggtgctgaagtgatggagagagggtgtcctgtccatacagtcttgaacatggcttgtggtaacaggacttggtgtctgagtgaatgagtgccaacaccagcttcctagtattagtactgttagtgttctgtgagacgttaccattggagaactcagagaaaacagaaaaaaacactgcttatttttttaagcttgctgtaaatataattacttcaaaataacaggtttagagagcagaagcaaaccctatgtgtttcaaacccagagcttttccatttcttatccctagatgccaccactccctcagctacaaactcatataagtttgtgagtgtagtgatgataatggcttcaaaagtcagggttcgctttattccaagacctagtgacatgccacagatgccacttgggaatatagcaataatgtcagcaagaaaaagcaagcacattgctgcctttggaaatacttgcacagggatattcctgccacccaaatacctgtgaataaataataactatttacttctagggttgaagggggattttccggttctcttttctttttgtagatgtgtgctcatgcctgttaaagtcaggtaacaatcaggatgttgtttctaaggtgttttcatgactttaatgcatcttagttagcaaactggggaggaaaagatttattttagcttacagttgtagtccactatgaaaggagttcagggcaagaactcaaggcctgaactgaagcagaaaccaaggctcagtcagcttgctttgttttaaagttctggctgtcttgaaactcccatgtgagtgctggaattaaaggtgttgtcttagacagggtttctattcctgcacaaacatcatgaccaagaagcaagttggggaggaaagggtttattcagcttacatttccacattgctgttcatcaccaaaggaagtcaggactggaactcaagcaggtcaggaagcaggagctgatgcagaggccatggagggatgttccttactggcttgcttcccctgtcttgctcagcctgctctcttatagaacccaagactacccgccagggatggtcccacccacaaggggcctttcccccttgatcactaattgagaaaatgccttacagttggatctcatggaggcatttcctcaactgaagctcctttctctgtaataactccagcctgtgtcaagttgacacccagaagcagccagtacaggtgtatgccaccatgcctggccagcctgcttccttagaccatccaggaccacctgtgagctggtgctcccccatcagtcactaacaagagaataatacctctggactcaccaggcaatctgacagaggcattttctcattcaaggctcctcttcccagataactcaagctcctgttgagtagacaacaggccaactagaacagacctgctgtttgacagggtttctcaccacctgaaccttctccaagctggacagtgagtgtcactgtctctaggatttcacaaaaatatggtgtgtgccaccatgctcagcctcttagtttctatggatctgagctcagatcataacattgttaggcaaatattccactgcacagctctgtggtgtttatcttgtttttcattaaaaaggattgtctgagaaactaggcctaggcagatccacatgtacacaccgtgtggccagtaaagtgaggacattgctcatccccttacatggttcttagcatcacactcaggttacgcactgagccatccctttcccccagtcctgggcttttgttgttgttaaggtaagatctcatgggtccaagcgagcctcgaactccacacaagacgagacaagatgagggggacctgaactgctgctgtctacacctccccgtgctggggctatagacatgtgccaccacatgccgtttgtgtgctgttggggactgagcccatggccttcccatggccttacacaagccaggcaaggattctgctattgtattacattcctggccctcacaaacacttttagttagttttcttggttcatacatgtggtgttaggatgtgcattacagtgcagctgatgttccctgttacatccttctttgcagggggaatttgtaaacgagtatgtcggtgaattaattgatgaagaagagtgcagactccgaatcaagcgagcccacgagaacagtgtaactaatttttatatgttaactgttaccaaggtaaaattgcttttattttttggtaagaaaaagggacgttttgtgttctgtttgtgattttatgttgacctcggtttctgttcctttcatttttttctaagtaaactatgaggattttcagtagttggtgctgttattatctcaggattacagaaggaaccgtccatagtcaggagactatggagcaagagggaaatgctaagaaacaaagcgaccatgtctgaggcagctagagatctgggttctttattactgctggagaaatcaactataactgagttattaaataccttgaaatttttcattagcctaaagctcaaaagttttctctgtatttattaagcttaaaaaaaatgacaggctggagagatggctcagtagttaagagcactgactgctcttccataggtcctgagttcaagtcccagcaaccacttggtagctcacagccacagcagtgggatctgatgccctcttctggtgtgtctgagtagagtgatggtgtaatcacatacataaaatagataaagtctaaaaaaacaaaaaaccaatgacaagagggttggagaaatgtctccatggctgggagcgtttgttgcttttacagaaaaccagggtccggttccgagctcccgagtactggcacacaacaatttggaacttcattcccagagaacatgacatcttatttctaaaggcaccaggggcgccccgtgagtcacatacatatatgcaggcaacatactcatacgtgtaagacaagtgacaggaaaataatgaatgttggcataagaacaatggaagtaaactagtttaaataaaactttagccaggcactgtggcacgcacctgtactctcagcgtttgggaggttaaagcaggaggatcataagtttaagttagagccagcctgggctacatagttatgatcctgtctaaataaaagagaaacaaacacagaaaagaaaacagagcatcgaagaccggtaactggtaaattgatttgtatttgcgtgtctcatggcagccatgatgtcatttcttatcatcatccttacagaggacaggaagcccaggcctaggtgtagttcagtctttgtttagtacactactacacaccaaggaccaagactagtcctcctgttccacgtgttctgtgatggttctaaaagaatcagaatgtcatctaagctgaggccatggctccgtgctgaagcatgtactgaaggcatgtgaggctgtgggtttgagcctcatctcaagcaaaaacttgacagaaaaccaacaaaaaacagtaaaagaggttgtgggcatggtggcacacacctttaatcctagcacttttgagactgaggcaggcagatctctcagttcaaggacagcctggtctacatagcatgttccacaccaaccagagccacattgtcagacactatctcaaaaaagaaaaaaggaagataaactatatgtagttatgtcttatgtgaaaagtgtagccgggcatggtggctcacacatttaatcccagcacttgggaggcagaggcaggcgaatttctgagttcgaggacagcctgctctacagagtgagttccaggacagccagggctacacagagaaaccctgtctcgaaaaaccaaaaaaaaaaaaaaaattaaaaaatagaaaagtgtacagcttgcacgtgctacagggtaacctcgactgccggtgttaggctggagtctgcgtctcgaatcctcttactgagttcagttcagtgacagcgtcctgtgtgttcaggccttggcacgacctcactgttagagtccacactgacagacctaactgtctagtgtttcctgcgtaggtaacccctgtgagaggacagacatgaaggactgtcacctcccgctcagagagagtctcattgcccttctctgtcctcgtgggtaaactcgtccatcccatagcagtttatcttctagcatagagttcaagagagaagctgagaaggaactgcctgagcagttggttacctgaaccatatagctccgtgcacgatcaagaatgcctaaacatgtgacctgctgctgatccttatttattagactaccatcagcagtttctatgcagtttctagaaagaaagaaagaaagaaagaaagaaagaaagaaagaaagaaagaaagaaagaaagaaagaaagaaagaaaagaaagaaagaaaaatttaaaaaacaaaaccctaaggtcctcaaatagagaacgtgttaactccacagaggagtgtctgcaatgtttttagagctgacagttggcacaccagctgatgataaatgatcctgtcttggagttccctaactggatgtttctaaatgggcttgtatccagtttatgttgaagcaccccccacacacagacttttttttctttctgaaggaccgtataattgatgctggaccaaagggaaattattctcgtttcatgaaccacagttgtaatccaaactgtgagacacagaagtggactgtaaatggagacgttcgagttggactatttgctctttgtgacattcctgcaggtaaagcgtgacttgctgccggggcccctccacgggggaagcctgtcttaaaggcccagcccctgagagtctattcagatcagacaactgggcgttacttgccaatgtggtaaaactacatctaaagagaaaacctgtccagcctttctgcagaagaggatgtgggagggtctgccacagtgcagacacgtcacttcccaaaatagtgctgtctgcagaatagaactagatggcctagctcttctgtgcgtttaaagcatactagaggtaattaactcatggaggctggagagatggctcagcagtggagagtctatacttgttttgcagagggccggagatcaatgcccagcgtgcatgtggagtggctcacgaccatactgcagctgcaagggtcagagccctccagctcccacgggcacccacacacatacacacatacacacatacacacattcacgtaattacaaacagtccaagtaaatccttttttaagaaagcaatttgctgtccccacaccagctggcttctttttcttttcctcttcaactctgaagatcattctgtttcaggttagacttgaggagcctcggagccatggttactgctctcctttccttccctccgagcttgtcaacagaaccagctagttttccaagtttaggggcttggtaagggcggctcagtagctagggcacctggtgaaaggctgctcagcatgggtgtgtgtggtgagctacagttgtaaatgtgtattggttcacagtggaaggcgttcctaacactgtcatgacaccacagtagtgtcacttagaaactagagcttagctgtagaaagagggcaaggctggaagcccttatttttaaaaaaaattatttattttctgtatgtgagtacactgtcactgttttcagacacaccagaggagggcatcagatctcattacagatggttgtgagccaccatgtggttgatgggtattgaactcaggtcctctggaagagcagtcagtgctcttaacagctgagccacctctccagccctagaagccctacctgaccacaggtcccatgcccagagctcttatttcattgttttcaccactttttgctgaagggttttctctttttagaacatcttaggtgggcagggattgttgaccacaaggcctctctctatcattgtttttagtgagatggggtatggaaggaagagtctgtagttatgtgatgcgtgcatttatatgcgcttgtgaggacaaggcaggaactcctaggactctgcttcaccatggaatctgaatccaggtcccattgtcaggctttcatggcaagcgctttcaccccgagccaccttgccagcctgggacaagcctttgtctcagaaccgtgtgtctacatgaaagtgtcaggcagtgtttctccctcctaacatcactgtgaataatttgtttctcctgtatttcagggatggagttaacgtttaactataacttggactgtctgggcaacggcaggacagtgtgccactgcggagcagacaactgtagtggatttctaggagtgcggccaaaggtcagttgtacagggcactccacccagggcaggaaagggctgtgctacagacattagcttatgacctgcttggctttgttacagaattcccgctgctccctcaggtctgtggtgacgtgggggtggttttgagatctcttggagcacaggctggccttgaactctctcgttcttgaggatgactttgtttttttggtttttttttttaatattttttattacatattttcctcaattacatttccaatgctatcccaaaagtcccccataccctcccccccacttccctacccacccattcccatttttttggccctggcgttctcctgtactggggcatatacagtttgcgtgtccaatgggcctctctttccagtgatggccaactaggccatcttttgatacatatgcagctagaatcaagagctccggggtactggttagttcataatgttgttccacctatagggttgcagatccctttagctccttgggtactttctctagctcctccattgggagccctgtgatccatccaatagctgactgtgagcatccacttctgtgtttgccaggcactagcatagcctcacaagagacagctacatctgggtcctttcgataaaatcttgctagtgtatgcaatggtgtcagcgtttggatgctgattatggggtggatccctggatatggcagtctctagatggtccatcctttcgtctcagctccaaactttgtctctgtaactccttccatgggtgttttgttcccaattctaaggaggggcatagtgtccacacttcagtcttcattcttcttgagtttcatgtgtttagcaaattgtatcttatatcttgggtatcctaggtttggggctaatatccacttatcagtgagtacatattgtgtgagttcctttgtgaatgtgttacctcactcaggatgatgccctccaggtccatccatttggctaaggaggatgactttggattcctgactcttctgccctcactccccaaacactggagtccaggcggaggctaccacacccaacgtgctattcttactttataatgaagcttgttttagtaaggtctgataggttctgaaatgtataaaatccactgaattatatacttttaaaatggtgaatgttacctgggtgtggtgactcaaatcctagaacttgggagaaaaaagattaattccaggatagttaaaaacaaacaaacaaacaaacaaacagaaaatcctgcagaaatacaaaagtatatgttgtcatatgtgaatttcggggaaacctcaggctttctgaagtctgaacactgatgagtaaaagagcttgcagtgaaatctacgttccaaacaaacaaacgaaatagctcagcagtcaggactcttcattaaagtgaacttgtctttaaaaactccatagtagccaatgatagtcactgtgctgccaccgtgccctagaacagagggcagcctggaagtccaggtgctcggctggagtggctcctgaagagcacgcacccctctagaggaccccagctcagttccccgcatctaagtcagacagcttacagcattctgtgactgcagcccaggggatttggttcttcctgcctctgcgagcagccgcatgtacccacacagacatgtaatacagagcaagtcattaaagatcattgaacctctagatgcttatccaaaatgcttcactgtgggagcagacaacgtgggccccaggcacatctgtctgtccctctgagggacagctgtggtgctggtgggcaagaccaccaaggtgtgcaaagcccctggggtatctggaaaacaacccagctctggagaaatggttgcctcgcacctggggctggggctgaggggtgtttatgctcaccaaggagggtctcattccacagtctatgatctgtggctacttaccgctcctgacttgtcctgagttcaccttcccacttgctgaaaacaccagggccgcctgctgctgctcttgctgtggccccagccagggccagagtcagaggaggctaaggggactagtttttctgactaattcctcaagcacccaccaactcagccagcttaatttgagaaacatgtaaatgaaggcctacacccctctctttaaaaaaaaaaaaaaaattcaaggaaggggctggggagcatgttcagttgttagaaagcactggctgctctttcagaggaccagagttcaaatcccagtgcccacgtggccgctcacagctgtctgtaattccagttccaggggatccaactccctcatacagacttaatgccagtaacatcaaataaaaatagatttacaaatgaaggcaaagataagagagtactgtagttcttatccacagctgcctggtagagtcccagctgagcgttgacaggctgctgtactcactgtagtgtcctctggggtcagccccctgctgtctttaggacacatgcagagatgcacaggtggtgcgctgtgtgtgtcttcctgtgtaaagcaccattgttagccgatgttaaaaccctggtctgtctttcttgccagtctgcatgcacatcagcagttgacgagaagacaaaaaatgccaagttgaagaagaggcggaaagtcaaagcggaggcaaagccaatccatgaggattattgttttcagtgtggggatggtggagaactggtcatgtgtgacaagaaagactgtcccaaagcttaccacctcctatgccttaacctgactcagccaccccacggtaagccaggcctgcaagcttctctgtttccatttcaccactgatttgggatacattgctgtctttaatgcaactgtgaaatcagaaacatttaacgttacaaacagaactactcgtcagaaatctgtttctatgcaaatgacgtgtacctcatgtggtattgagggcacatttcctgtttatggtcgccatgggttgtaggtggcacctatgacattgggtttgggccagtagctcatatctgtatgaaagaaaaaacactacaagatggaagtttgtttggctgaagtttggagagggattctctaagcaaagcaggtagaagccaagtacagtggtgccattgttaatcccagtgcttgggaggcacaggccagaggatcgaggccagcctacactttggagaaagaccttgtttcaaaatggggttaataacatatgcctttaatcctagcacttaggaaacaggtggcagagcagccaggctacacaatgagactttgtctccaaaaaggggagggggtacctcttgggtttttggtgggtaatcaagaaatcagctaacagatacttccctctcctccccacccctgcattaggaaagtgggagtgcccgtggcatcggtgtgacgagtgtggcagtgtagccgtttccttctgtgaattctgtccacactcattctgtaaggctcatggaaaaggggctctggtgccctctgcactagaaggtcgtctctgctgctccagccacgaccctgcatctcctgtgtcaccagaatactggagcaagatcagatgtaaatgggaatcccaagatagtggagaagaagtaaaggagtgagcggtggtgacctcctcccactgctctcagtaaagaggcgcagagaggccacgcctgccctgccctgccgtcagtccgccttgacggagatgggcgccagctcacacaggctaaagcacttgctggtgtctgggttttctattttgttgtttgggggataattttgtggacagcaaaattcccttggtctcttcttgcctttcattgtgcttcagtgtctttgcaatcagcaaaagaggtgtccttgtttttagagttgagagagagaaaattaaaagaaagttttgtctatacgatcagtgtaaagcctaagatgtactcccgggttatgtaaagtgaaagtagtcattcctgtatttattttcatttttaggtattctgagaagtgtagttcaaacaatctaacctccatgagtgctcgtgcgtgtacgtgcgcgtgtgcgtgtgtgtgcaagcgtgcatgactgtcacctttatatacctctttcctgagccatagagtggctaacttctctttcctttttcccgggccttttctcgggtcagagaaggctctcagcaagtattcagactggcctcttgaaaacaaactccttgacagcatttacctctgtggtcttaaactgggtgggcttcatggtgcgccaactctacgtagaaatatcttagagggacaaggagtgagtgcattctactcattgtgattttctgaaacatttgagggatgtgaatacataggggaatgctcattcctgctgtcctgaccactggcaagaggctaaagaaagataaggcacagaccaaacattggatcatatatgcaccattttctgaccaatttaatgtagactccagtctaacctggaatttaagggcattttattttctgtctttccctctgccaatcatgtttcctttgccagctgggtcactcagtcatgtttcctggtaaagctatataactgaatctgaattatatgaaatagactttttcagttgatttcctaacttagggatgatgcaagtggacagaaacatccctaagttatatgtgaaccatttctacttagtattatgcaatacttaagactgtccccattgcataaggggaagaacttgctcttttacagggtatgtaggagccacagagatgctccatgtagaaagcacttgaaaccgccccccacaaagtcagtgtttgcaaacatggctgtgaggtttgaatagtacagacccaagcataccaaggcgtcggcccgcagaattcacttgcatctagcacttaggatctagtccagtattacttgtgtgaaatcatgtcagacatggtaacattagactaaataaaaatctagtgttaccatgaaatatgaacttcctcagtgtgtttcaactgcttactggaggtacccagtaggctctcttctcctcaagaacctatactttactaacgtagggcacgagatgctctatgacaccctgtagttatgttaggtgcgtttgtcctttttttagttttttacaaatcaattcagacctcatctctggacaaaagaaagagcaattttgtgcctcttttttttaaatatatataaatgtgcaatttataggcaacagacactacagttcctctctaagctcctgaactgccatttacctagtctagcacttgtggtaatcccgctggctagacaagctcctgtgaggagggagacaggacggtacccagcacccagtgcagtccctacgaccgactcgaacgaagcacagcccacgcaaacactaaactctctgctcttgagcaattatgaagtttgatgtcctttaaaacaataatgtaagagtatctgggttttgtcatattaaattttattttatacagacataacattttttaaacttgttgataagcgacttcctttgatattccaaatgtaaccctcatgagaacaatgtccgatatgagattgtatcttgtttcctttttgacctcgtgctttttagtatctgataacttttatagagtaagccccagggttcatcatgtatttataaataccctaccctgacctatctctctcctgcttctctgctatggctcgcttgtttttatatctataaaaggactttgcacttttcagatcttttcctactagatgactaacaggcttgctctcagaagcctgcctgctccaagccaagtgcaagggcgactgcctgtgccatcatcgcagcctgggtcttagaactgagggttaggaagcagaacgttggctgactggtgtaagtatacgtacaccgtcggtcgtttcatgtcctgtgtcagtgacattgcaaggcactgtgcttactcggagcctgaagctgcttggtggtagcttttcaatatggtttaggtatacagcatttgtggttgattttattcagcccagaaataaaggactcaaagcagcatgggatactagtggtatttcctaacctcaggaggaagatgagagttctggttatcagtggaaagctttagaaattgggctggaaagagctagagatgatagcacgagaccatcacaagcactgtgccttgtaggtgtcgctgggccgccagggtagctgcctgtgtctggccaagcaggatgggaccagtgctcgtcactgccagtgtgctgcagtaacctctgatttcagtctccagtcagggtggggatcagagtggagtaggttttatcttcacttttgctttgcaagccctacctactcttattttaattctcaaaaattacctttcctaagctgtagaatagacttgagttttctgtgcgttatataaataacatatatatatatataaatataaaatgttttatatatataagtggtgtgtgtgtgtgtgtgtgtgtgtgtgtgtgtgtgtgtgtgtgtgtacacatacatactgagttaggaagtatttgaaactaaagagataataagggcctgcagcccactgcttctgtcagtgtctcccactgcagtgtttgcggaagtgtgtgtaactaatatggatctgagatactgagggtctgtctgctcatgtgaaatactcggctggactggtaggcagcttttatgcagtggcttcttttttgagtactttcttactgtttcgggtcaaagccagactacagtttgaagtcctcccattatctgttcagaacatagacccggctctccaagacctgccgctaatcttgtcaaaacaacactcctcttgcagcacttccccacggagctaaaatgctgccaaccacatgccatgccctaatgggagagggagacaaattgcctcagtctccctgagcgtgagcagcgtatggtctttatgtttctcaaggcactgcttcatttctagacttgaattgcttttcacgtggctgttgcatctgaccatcccggactctgccaggctgctaagggcagcgtggaagtgatcggatggcaaggtcctcaggaaggaccgcccacacttggtctttgcttatttgtaacagaatggttggttacggaaaggtctggtccctccttggatggacgaagggatccgtgtaggcagctttgcagtggattgttgtatggactgaggtgtcacagttttcaccttgggtgggggaatgggaatgtggggagaaagggagggaaaggtacagtgcagttcccctaacaccgagacccccccaccccatttgaattcaggctcttcaattccttgggacttcagattctcattttatattttacagttttaaaattaagacatggaaagcatcatgttgtatactgtcagatatgcagtcctcccgacgggagcacgggcatcttaggtttcttggcacctttgaggtcggagctcgtgcatgttgagaaatgatttccctgcgtctttgttttgcctttttctcctttccttgcctcacccctgggtagctggtctttctgtttaacatatgcttgtgtggggggaagagggcgcacttatgttatactcctaaaatgctatgtataacctttgtttcaaaaacccatttccactgggcatggttgcacacgcctttaatcctagcactccagaagcagaggcaggaggatctccgagagttcaaggcctacctaacgcttcccagccagccaggactatgtagagagaccctgtctcaaaaagggggggaaaatcaattgtttggcttttgtcaatccattgcaaaagtggcagatgtgagcgcttgtatttgtgtatgggggaggggggagaaaagtattgtttgtccttcagtaggctctgaaagtcattgacttgtaagttcaagggaaaatagaagttgccaaagtcagtattcggtccttggttttcttgtgacttcactgcgtccgttaagggacgagaagccttccttacctgctgactgagccttgctctgtgcagatggctttcaagtatctgccattttgcctcaacagggaattcttgtcagttaaagggaatgagggaattacacttttgttatcaattaacatctcattttttgtaccctatggtaagtaactgtattgccgctaataaccaagttgctaactgattacagctggctaaaaagttctttttatatacaaagatttgtgtattttcaactgctatggcaaattcatttgtgtccatttaaatattacacaataaacacatatctgcagatcccaccctcaccttgtgttctttgaataaagttcttgatagattgtttacatctgtatttacctgtaatgaacgctgtagacctgtgaaatatcaaagtgtcaacatccattagtcagtctctttagtttctgtgacttggcgctcctaacactaaggggttagtgttaatgttccccaggggtattctactagggcattactgtttaatgacttcaaaatatagtttaaggattttgtttattgaccaatgtcttattgcaaagtatgagcctaccatcttagttaacctgtacatatctgttaactagtgtagtgtatgtgagattgcctgtaacatttgagcttcttactgatgtgtgctggtgggacaggttttgtacattgtatttactggaatcctgcctttttaacttacagatactttagaattcaaatatgttttctgcttctgtaagaatgtgggaaagcttttaatggcattccattgatttcaggtcttgcttgaggttgactttaataaattgtcctgtatggtctacttaagaatatgggctggttctttacctgtaatttcatggtacagtttactgggaaatgagacacaaaaatacaaccactcaccctcagcccagttttttcccttcgaaatgctccaaagacatagtttctttaaagtgggctttctggtttgcttttgtagaggaagcatctctggagaatgacgttccttttcttgtcctataagctgatctgggtggttggtgaaggacacattgctttgagacccaaaggtgatctgttaggtggtactcataacacagcaaatgagctctgaatttcctgtagcccggaggccccgctggtagtcagtccccgcggagttcgctaggtggcgctggacaccgggcgggcggaaccacggcgcgccggggccacgtcagcgtctgatccgcacgtatggcgggatggggacggcggccctgggagccgagctgggcgtgcgggtcctgctctttgtggctttcctgtaaggatctgtcaacgctcccaggcgtccctgggcgctcgcacttcctaagcggctcggggcggcaggttcttccgccgaggtagcctgtcaatcttccccgtttcctccccagggtgaccgagctgctccctcccttccagcggcggatccagcccgaggagctgtggctctacaggaacccgtacgtggaggcggaatacttccccaccggccgcatgtttgtgcgtgagctgccctcccgccctcctccgctggcagggactcctcccctgccttgagttccagggctagggcgaggcgtctggtgggcaatctgagccccgatcttggttagtgcgcggcagctggtgctttaggccaggagggacttggttttaccgaccctgtgttttaccttcaggtcattgcctttctcactccactgtccctgatcttcctcgccaagtttctaaggaaagctgacgctaccgacagcaagcaagcctgcctcggtaagtcgcccttgttccagttgttcctgtcttagtgttggcaagtagctatggggttcagctactctgtacccctaaagtatgtctttttaccccatgagaccaaaaagcagtactgatgagaatgtgcttaataacacaggcgccacacaggtgttcctttttgtttgtttgttttttcgagacagggtttctctgtgtagccctgtctgtcctggaactcactttgtagaccaggctggccttgaactcagaaatccacctgcctctgcctcccaagtgctgggattaaaggcgtgtgccaccacgcccggccaggtgttccttattaacacagacaccacacaggtgttccctattaacacaggtgccacataggtgttcctcagtgctccacttctctgcccctaggccgtttgggtttttattctggttgggttctatctcaaagcaatgaaggctctactcatgaggtggtggcttactcttctccaagcagatggcactaacggcttctttgctttccagctgccagccttgccctagctctgaatggtgtctttaccaacataatcaaactgatagtgggcaggtaagtgagaagccttggcactcaaacctccctgagcgccccccacacacacaccaccacattctcaagcagtgtttacccggattctcagactagtctctcctttctcaccagaactccctctccctgccctctgcctgttccaagtgtaccacctggtctgcgtcctgtcctgagtatttcccacagcgaccacctttatgtacctaaagctgcagtatgactagctgctctgtgctaagatacaatcatatgctagagactttcttgaacattggccgcgtggctaaggcctttttctcagtataaacactaatctcaccccattacattattttgcctatgacattagtggtcaacagattattgacatctactattactgaaaaatacttcctgagagagtaaattatatttcttccaggccccgcccagacttcttctaccgctgcttccctgatgggctggcccattctgatctgacgtgcacgggggacgaggatgtggtgaacgagggccgaaagagcttccccagtggacattcttcctgtatgagtttcatgggaactacttaaatacttacatgtccatgttccgctctttgtgtgtgtgtgtgtgtgtgtacacctgtacatgtacgtgtgcacacgcaaatggtataggggctggaagaaggtgtgtgatcccctggaggtggggtcagaccagtgtgagtgccacgttggggaactgaaccaaggtcctctcaaaagctaactgctgccgactcaactcttggctcctccagctctgatacctactttaaatagagttacatttaaccttaaagctttggaggaatgagccatctcttactagtcattaaaaaaaatatatttaagagctactacttgtgaggggctgcccagccttttacattgtgacctttgtagctcccaggaacccagcgtggtatatttttgtgattcccacttattactgtggacggtgctgtagacttctcaccataagttttataccagaaactactgttacttaaaatactaactctgggacagaaaatacagtccttcatttttttccctttccctgtaatcaggaggggtaagccctgctcttgctccctgccctgtctggacaggagtgacggggaccccacaggacacaaaactcacaggtcttccctttctagttgcatttgctggtctggcctttgcttccttctacctggcagggaagttacactgcttcacgccacaaggccgagggaagtcctggaggctctgtgcctttctgtcacctttactctttgcagccgtgattgcactgtcccgcacgtgtgactacaagcaccactggcaaggtaagcacaggagtttgtgctttgcttgttttaaccccagattggcagagggtggcttgctaagcatcggctgagtgaaggagcagtggaggaggaggggacagcctgtggattgtactgagtgcgcacctgcagccacagaggacaaaggcttggggcagtgaggtgtctcagagttaaaggcacttgatgcacaagccaggcagcctgtgtttgatccctggaaggaaggaaggagggagggaagggaggaaggatggattccagaattctcctctcacctccacacagatcccccgcctaaaacacacacattcttcttaaaattaacttgtatatgttacatatgcacgtgtatgcaggtgcatgtcccccaatcatgggggaagcaagcaagtggctgtaatcctttccaccctccccggcacaggctggtacaaggacatgcacagatgctctcagctttttatgagggtgctggggatttgaacccatgtcttcttgttgatgcaagtaagtgctcttacctgctcagccagctcctcggctctcactgttaacacacccctaccccaccagacagggtttcactagttagccctggatggccctggaacttgctatgcagaccaagctaggctcaaactcacagaattatagcagcctctgtctgctgggtgctgggattaaaggtgtacatcactgtgcctcagctccctttatttttaagacagggcctcgcctctagcaaagcctagacagaagcaggcctctgtctcagcctcccaaatgttgggatcataaccgtatgccaccattcctaggcagaattcttttttattattatttatgtttgtgagtacactgtagcttcttcagacacaccaaaaagggcatcagaccccattatagatggttgtgagccaccatgtggttgctgggaattgaactcaggacctctggaagagcagtcagtgctctcagccactgagccatctctccagccccagaattcttgaaatagtgaaaacaaatcgatgactagagtcaaaaacacttgtttaaaaattctaactcacagggcagtggtggcgcatgcctttaatcccagcacttgggaggctgaggcaggcagatttgtgagctcgaggccagcctggtctacagagtgagttccaggacagccagggctatacagagaaaccctgtctcgaaaaaacaaaataaataaataaataaatctaactcagtccatgctgatttaactgagggtgttgacttgatgtttagagaacaatcagactaataattctgtaactgtatggtaaaatcaagttgctctaaagaaactaatagcataggttcggagctctttttttattttagcccctacaagcagaataactgggagggccaagtactctgtaactgtggagcatctaacatggttttaaaggggttgctattttctctcttcagatgtgctagttggctccatgattggaatgacatttgcctatgtctgctacaggcagtactacccccctctgactgacgtagagtgccataaaccatttcaggacaagcacaaacttccgtcctcacagaagcccagtgagttgcaccatttggaaatttagctgaatctacctcagtggagaacaagcagatcaaccctcctaactggacaggacgcacaagccaaggatttctggcttgacctcttcagggtctaagtgaggacacagccacactgtacttgcctccgcaaggctgtgcactttaccccacttccaaggctagcccctgaggtctcagtgcttggcctggcacggctctgtcaggacttctctcactaggttaatccataggattgctattctaagacctagtgtctacagtgattaaatgtcactccagaggaaacctttccacaaaggaagctttcatgaccccatttaccgaacataatccctgtcctttataaataagggcagtgccagctaaactctgattcggcttgctttttgtggtaacattccattaagccttaaataataaaacattcaattttggccaattttttactttt

SEQ ID NO: 1017 - DNA, 4836 bp, Mus musculus
  misc_feature (1)...(4836): n = A,T,C or G
tcctcgctgtggcccgcggcccgggatgcagtcgcgctgacgtcctcccggctacccacaagcctctgtaccccggtgcgggcaggaagagggcaaccgggtccagtggctgcccgggagatcggggtgccttctgttgctggacgcggactgcccggcaacccccgggcacactggcggctaccggtctctctcccggggaaggagactgccccggctcgggctgtcgtcctaacgtgctggcccgtgtctgggacgccggggccagggcgctctgctgacagctgtcaggctgtcagtgactcccgggcactccccggtctgcgtcaccgcgtaccggtcatcaggttcttcctaacatctaggaatggtagcgcagggccactcgagtaccatatggcgtctaggatcatgggaaacacaattcagcaaccacctcaactcattgactcggccaacatccgccaggaggatgcctttgataaccacagtgacattgttgaagatggtggcccgacaccctttgaagctactttgcaacaaggttttcaatatccacctacaacagaagaccttcctccgctcacaaatggctacccaccatcaatcagcttgtatgaaactcaaaccaaatacccgccatataatcagtatcccaatgggtcagccaacggttttggtgcagttagaaactttagccctactgactattaccattcagaaattccaaacacaagaccacatgaaattctggaaaaaccttctcctcctcagccacctcctcttcctcctcctcctcctcctcctcctcctgctcctcnnnnnnnnnnnnnnnnnnnnggcagggaattgtttgagtcttccctttgtggagacctcttaaatgaagtacaggcaagcgagcacacaaagtctaagcatgaaagcagaaaggaaaagaggaaaaagagcaacagacacgagtcatctcgatccgaagagcggaggtcacacaagattcccaagctagagccggagggacagaatagaccaaatgagagggtggacactgcaccagagaagccaagagaagagccagtgctcaaagaggccatcccggttcagccaatactgtcttctgttccaacaacagaaacatccactggtgttaagttccaggttggtgatcttgtttggtccaaggtgggaacctacccttggtggccttgtatggtttcaagtgatccccagcttgaggtccattccaaaattaacacaagaggtgcccgggaatatcatgtccaattttttagcaaccagccagagagggcatgggttcatgagaaacgggtacgggaatacaaaggtcatgaacagtatgaagagttactagccgaggcagccaagcaagccagcaatcattctgaaaagcaaaagattcggaaaccccgacctcagagagaacgtgcccaatgggacattggcattgctcatgcagagaaagcattgaaaatgactcgggaggaaagagtagagcagtacactttcatctacattgataagcagccagaagaggcttcgtcccaagcaaagaagaatgttacctctaagacggaagtcaagaaaccccgaagaccaagatctgtgctgaacagtcagccagaacagaccaatgctggggaggtggcctcctcacaatcaagtactgaccttcgaaggcagagccagaggcggcatactagcttggaagaggaagagccacctcctgttaaaatcgcctggaaaacagcagccgcaaggaagtccttaccagcctccatcacaatgcacaaagggagcctagatttgcagaagtgtaatatgtctccagttgtgaaaattgaacaagtgtttgctctccagaatgcaacaggagatgggaagtttattgatcagtttgtttattcaacgaagggtattggtaacaaaacagaaataagtgtcagggggcaagacaggcttataatctcttcaccaagtcagagaagtgaaaagccggctcagagcgcgtcatctccggaggcaacatctggttctgcaggcccagtagagaagaagcagcagagaagatccatcaggactcgatctgagtcagagaagtccgccgaggttgtgccaaagaagaagatcaaaaaggagcaggttgagacagctccccaggcctccctgaagaccgggttacagaaaggtgccagcgagatttcagattcctgtaagcccctaaagaaaaggagtcgcgcctcaacggatgtagagacggctagttgcacgtacagagacacatctgactccgattctagaggactgagtgacgggcaggtaggctttggcaaacaagtagatagcccgtcagctactgctgacgcagatgcttctgacgcgcagtcggtggactcgagtctgtcacggagaggtgtcggcacgagtaagaaggacactgtgtgtcaggtctgtgagaaggctggcgactgccttgttgcttgtgagggggagtgctgccgacactttcacgtggagtgcttgggactgactgcagtccctgagggccacttcacctgtgaggagtgtgagactggacagcacccatgtttttcatgtaaagtgtctggtaaggatgtgaaacgttgttctgttagtgtctgtggaaagttttatcatgaagcctgtgtccgcaaattccccactgccatctttgagtcaaaaggattccgctgtccccagcactgttgctcttcctgctctatggagaaagacatccacaaagcaagtaaaggccgcatgatgaggtgtctgagatgcccggtcgcctatcacgttggagatgcgtgtgtcgctgctggaagtgtatctgtgtcctcgcacattctcatctgtagtaaccattccaagcggagtagtcagtctgctgctataaacgtaggcttttgtttcgtttgtgccagaggtggaagattgctctgctgtgaatcgtgccctgcttccttccacccagaatgcctgagcatagacatgccagaaggctgctggaattgcaatgactgtaaagctggcaagaaactgcattacaaacagattgtttgggtcaaattgggaaattacaggcaagttttccaagcacaaaaaaggaaatggtggcctgcagagatttgcagtcccaggtctgtgccgctgaacatccagggccttaagcatgacttgggggacttccccgtgttcttctttggttctcacgactactactgggttcaccaaggcagagtgttcccttacgttgaaggagacaaacactttgcagagggacagactagcattaacaagaccttcaaaaaagcactggaagaagctgcaaaacgtttccaggagctgaaagcccagcgtgaaagcaaggaggctttggagatggagaggacctccaggaaaccccctccctacaagcacatcaaggccaacaaagtcatagggaaggtgcaggtccaggtggctgacctgtcggagatcccccgctgtaactgcaagcctggtgatgagaacccgtgtggcctggagtcgcagtgtctgaacaggatgtcacagtatgagtgtcacccgcaggtgtgtcctgctggggaccgctgtcagaaccagtgctttacaaagaggctgtaccccgatgcagaggtcatcaagaccgagcggcgaggatggggcctcagaaccaaaagaagcatcaaaaagggggaatttgtaaacgagtatgtcggtgaattaattgatgaagaagagtgcagactccgaatcaagcgagcccacgagaacagtgtaactaatttttatatgttaactgttaccaaggaccgtataattgatgctggaccaaagggaaattattctcgtttcatgaaccacagttgtaatccaaactgtgagacacagaagtggactgtaaatggagacgttcgagttggactatttgctctttgtgacattcctgcagggatggagttaacgtttaactataacttggactgtctgggcaacggcaggacagtgtgccactgcggagcagacaactgtagtggatttctaggagtgcggccaaagtctgcatgcacatcagcagttgacgagaagacaaaaaatgccaagttgaagaagaggcggaaagtcaaagcggaggcaaagccaatccatgaggattattgttttcagtgtggggatggtggagaactggtcatgtgtgacaagaaagactgtcccaaagcttaccacctcctatgccttaacctgactcagccaccccacggaaagtgggagtgcccgtggcatcggtgtgacgagtgtggcagtgtagccgtttccttctgtgaattctgtccacactcattctgtaaggctcatggaaaaggggctctggtgccctctgcactagaaggtcgtctctgctgctccagccacgaccctgcatctcctgtgtcaccagaatactggagcaagatcagatgtaaatgggaatcccaagatagtggagaagaagtaaaggagtgagcggtggtgacctcctcccactgctctcagtaaagaggcgcagagaggccacgcctgccctgccctgccgtcagtccgccttgacggagatgggcgccagctcacacaggctaaagcacttgctggtgtctgggttttctattttgttgtttgggggataattttgtggacagcaaaattcccttggtctcttcttgcctttcattgtgcttcagtgtctttgcaatcagcaaaagaggtgtccttgtttttagagttgagagagagaaaattaaaagaaagttttgtctatac

SEQ ID NO: 1018 - protein, 1367 aa, Mus musculus
  VARIANT (1)...(1367): Xaa = Any Amino Acid
MASRIMGNTIQQPPQLIDSANIRQEDAFDNHSDIVEDGGPTPFEATLQQGFQYPPTTEDLPPLTNGYPPSISLYETQTKYPPYNQYPNGSANGFGAVRNFSPTDYYHSEIPNWIKPSPPQPPPLPPPPPPPPPAPXXXXXXXGRELFESSLCGDLLNEVQASEHTKSKHESRKEKRKKSNRHESSRSEERRSHKIPKLEPEGQNRPNERVDTAPEKPREEPVLKEAIPVQPILSSVPTTETSTGVKFQVGDLVWSKVGTYPWWPCMVSSDPQLEVHSKINTRGAREYHVQFFSNQPERAWVHEKRVREYKGHEQYEELLAEAAKQNHSEKQKIRKPRPQRERAQWDIGIAHAEKALKMTREERVEQYTFIYIDKQPEEASSQAKKNVTSKTEVKKPRRPRSVLNSQPEQTNAGEVASSQSSTDLRRQSQRRHTSLEEEEPPPVKIAWKTAAARKSLPASITMHKGSLDLQKCNMSPVVKIEQVFALQNATGDGKFIDQFVYSTKGIGNKTEISVRGQDRLIISSPSQRSEKPAQSASSPEATSGSAGPVEKKQQRRSIRTRSESEKSAEVVPKKKIKKEQVETAPQASLKTGLQKGASEISDSCKPLKKRSRASTDVETASCYDTSDSDSRGLSDGQVGFGKQVDSPSATADADASDAQSVDSSLSRRGVGTSKKDTVCQVCEKAGDCLVACEGECCRHFHVECLGLTAVPEGHFTCEECETGQHPCFSCKVSGKDVKRCSVSVCGKFYHEACVRKFPTAIFESKGFRCPQHCCSSCSMEKDIHKASKGRMMRCLRCPVAYHVGDACVAAGSVSVSSHILICSNHSKRSSQSAAINVGFCFVCRGRLLCCESCPASFHPECLSIDMPEGCWNCNDCKAGKKLHYKQIVWVKLGNYRQVFQAQKRKWWPAEICSPRSVPLNIQGLKHDLGDFPVFFFGSHDYYWVHQGRVFPYVEGDKHFAEGQTSINKTFKKALEEAAKRFQELKAQRESKEALEMERTSRKPPPYKHIKANKVIGKVQVQVADLSEIPRCNCKPGDENPCGLESQCLNRMSQYECHPQVCPAGDRCQNQCFTKRLYPDAEVIKTERRGWGLRTKRSIKKGEFVNEYVGELIDEEECRLRIKRAHENSVTNFYMLTVTKDRIIDAGPKGNYSRFMNHSCNPNCETQKWTVNGDVRVGLFALCDIPAGMELTFNYNLDCLGNGRTVCHCGADNCSGFLGVRPKSACTSAVDEKTKNAKLKKRRKVKAEAKPIHEDYCFQCGDGGELVMCDKKDCPKAYHLLCLNLTQPPHGKWECPWHRCDECGSVAVSFCEFCPHSFCKAHGKGALVPSALEGRLCCSSHDPDVSPEYWSKIRCKWESQDSGEEVKE

SEQ ID NO: 1019 - DNA, 127284 bp, Homo sapiens
  misc_feature (1)...(127284): n = A,T,C or G
caacctacgccatctgggctcaagcgattctcctgcctcagccttctaagtagctaggattacaggcacaggccaccatgcccagctaatttttgtatttttagtagagtcgggttttcaccacattggccaggataatctcaaactcctgacctcaagtgatccgcctgccttggcctccctaagtactggaattacaggcatgagccaccatgcctggccaaggaatattgtttcaaagaaacatttgatggtcactgtaggaattaaccagtcacataataccgccttgcctatgcagtgtctttgaacccctcaaatgagaggaacttacagctgaaatacccttcacctaaattcttctagaacattgggctggccgcgatggctcatgcctgtaatcccagcgctttgcgaggccaaggcaggtggatcacctgaggtcaggagttcaagaccagcctggccaacatggtgaaaccctgtctctactaaaaatacaaaaattagccgggtgtggtgtcatgcacctgtaatcccagctactagggaggctgaggcaggagaatcgcttgaacccaggaggtgaaggttgcagtgagacaagactatgccactgcactccagcctgggcaacagaacaagacaccgtctcaaaaaaaaaaaaattagaattgggcaccccaattaagggtctctagcttctggtattgcaacagcccacagtttgcagttaaactaccatatcagattgtttgagaataaaaatatgggccaggcacagtggctcacgcctgtaatcccagcactttgggaggccaaggcgggcggatcaagagatcgagaccatcctggccaacttggtgaaaccccatctctactaaaaatacaaaaattagctgggcgtggtggcacgtgcctgtagtcccagctactcgggaggctgaggcaggagaatcacttgaacctgggaggcagaggttgcaataagccaagatcgtgccactgcactccagcctggcgacaaagcgagacttgtctaaaaaaaaaaaaaaaaaaaaaaactaaaataaaataaaataaaaatatgacagatactggcaaagaaagttactggcaaagagatgtctttttccattctttcagttttttggtttttttttttgtttttttttttttttttgagacaggaggagtctcactctgtcacccaggctggagtacagtggcatgatcacggctcactgcagccatgacctcctaggctcatgtggaagaaatcaacacaagttctcaacagctatagaattaaatgcatatgcaatattcattattttagaacatgccaaaaacaaaaccaaaaacaaaagcaaaaaaaatttgtcgccaggcacgctggctcatgcctgtaatcccagcactttgggaggctgaggaaggtggatcacgaggtcaagagatctagaccatcctggccaacatggtgaaaccccatctctaccaaaaatacaaaaattagctgggcgtggtggagtgcacctgtagtcccagctactcgggaggctgaggcaggagaattgcttgaacccaggaggcggaggctgcagtgagccaagattgcgccactgcactccagcctggtgacagagcaagactctgtctcacaaaaaaacaaaaaacaaaaaacaaaaaaacaaaaataaaaaatttgtcttggttctttttttttttttttttttttctgagacagagtctcactctgttgcccaggctggagtgcagtgacgcgatcttgactcactgcaacctccgcctcctgggttcaaatgattctcctgcctcagcctcccgagtatctgggaatacaggtgcctgccaccacacctggctaatctttatatttttagtagagacggggtttcaccatgttggcaagactggtctcgaactgctgacctcaagtgatctgcctgccttggcctcccaaagtgctgggattacaggtgtgagccatcacacccggctcttttttttctctttctgtttaagacacagagtcttgctatgttgcccaggctggcctcaaacccctgggctaaagcaatcttcctacctcggcctcccaaggagctgagattacaggcatatgcaccatgcctggcttggttcttaaggtgttaaaaaccgaggctggagtagagtggtgtgatcacagctcactgcagcctcgacctcccaggctcagcatcctgagtagctaggactacaggcccgcaccaccacgcccagctagttttaaaaatttttgtagagatgaggtcttgctatgttatccaggctgttcttttttttttttttttttttttgagacggagtctcactctgttgcccagactggagtgcagtggtgtgatctcggctcactgcaacctccacctcccaggttcaagcgattctcctgctttagcctcctgagtagctgggactacagctgcatgccaccacgtccagctaatttttgtatttttagtagagacggggtttcaccacattggccaggatggtctcgatctcttgaccttgtggtccacccgcctcggcctcccaaagtgttgggattacaggcgtgagccacagtgcctggccccaggctgttcttgaactcctgggctcgagctatcttcctgtctaggcttccaaaagtactgagattataggtgtgagccactgcagccagcctcagactatttttgaagcatgccaagataaaacgctctttgaatggccaaaaagggaaaagtaagtgctcagtgaatagtctttagtctcagtgaataaataaatggtggccgggcacggtggctcacgcctgtaatcccagcagtttgggaggctgaggtgggtggatcacttgaggtcaggagttcaagatcagcctggccaacatggagaaacaccatctctataaaaatacaaaaaaattagctgggcatggtggcccatgcctgtaatcccagctactcgggaggctgagacaggagactcacttgaacccaggaggcagaggttgcaatgagccaagattgtgccattgcactccagcttgggcaatagagcgagatttcatctcaaaaataaataaataaataaataaataaataatggtaacagaccctaatgggacacgaatatgccctaagactggctgttcatcagccattttactcgctttacatctaaggacctcacgtgatgttcatcaattacagagatgtcactctaaaaccagtacatcttctggctgggcacagtggctcacnnnnnnnnnnnnnnnnnnnnnnnnnnnnnnnnnnnnnnnnnnnnnnnnnnnnnnnnnnnnnnnnnnnnnnnnnnnnnnnnnnnnnnnnnnnnnnnnnnnnnnnnnnnnnnnnnnnnnnnnnnnnnnnnnnnnnnnnnnnnnnnnnnnnnnnnnnnnnnnnnnnnnnnnnnnnnnnnnnnnnnnnnnnnnnnnnnnnnnnnnnnnnnnnnnnnnnnnnnnnnnnnnnnnnnnnnnnnnnnnnnnnnnnnnnnnnnnnnnnnnnnnnnnnnnnnnnnnnnnnnnnnnnnnnnnnnnnnnnnnnnnnnnnnnnnnnnnnnnnnnnnnnnnnnnnnnnnnnnnnnnnnnnnnnnnnnnnnnnnnnnnnnnnnnnnnnnnnnnnnnnnnnnnnnnnnnnnnnnnnnnnnnnnnnnnnaccatgttggtcaggctggtctttaactcctgacctcaggcaatccgctcgccttggcctcccaaagtgctgggattacaggtgtgagccactgcacccagcctccaagaaacttttaattgtgtactaagccaatcctttccatctagaaggatgaaattcaggccaggcgaggtgactcacgcctgtaatcccagcactttgggagcccaaggcaggcggatcacctaaggtcaggagttccagagcagcctggccaacatggtgaaacctcgtctctactgaaaatacaaagattagccggaggtggtggcaaacacctgtaatcccagttacttggaggctgagggaggagagtagcttgaacccgggaggcagaggttgcagtgagccgagattgcaccattgaactccagcctgggcgacagagtgcgactccatctcagaaaaaaaaaaaaaaagaagaagaagaagaattacgttcatattggggggtaactccaatgcttaccttgttcgagcaatagccagaactgaattataactgtagaaggccatatttatttttgtctcaagtagttaacatagggacctaggcaaaaggagtaagtaaacaatttagtagtttaaaaatacatcaattaaaagacatcaggattttagtgtttttaactattgcaaaggtagaacatttgcatagttaaggtacaaaacctccttcaagctcatttccaacaatcagatattttcgtagctctggacttgagaatggtactttgagattccaacaaacggtaatgatctctaagatgatgatgctcatgaagatggtacaatcttcagagacattttgatttctggtcaatagtatctagtaatgcaacttcaatgattgccaagtacttaaaagtagagcaatacatatctatctgtagccttaaaatataggtagaaagtgaatattctgaatttcttttcagttagcattgttctatatttaggcaagttgtcccaaaccctgaatattggacgtacccactaatctaatttatgtagcagtggatgaaggtagacatgcaacctactaatcgctcaagtggaggtaaaactgtttcccttgctactgattctccagagcccaaactgagctttgaacctgtaaataaccttcaccaaaacccatctccatccaggggcgcttttctgctaagggccgcgaggaacggcagaagagctgacattcccaatggcagctttgctctcttgtggttgggaaaagagttccaggagctctcctgaatagaaaccttagccacagagctgacattttcaacaggggctcgaaacctgtggacccacactaacggtgggtggtgtttcgcgggcaggagacgacacctgaggcggcggttaatccgctcgggcccgggcgctcccgggcggcggacaccactcgcactcgcattggcgccgccccacgcccgctgctcccgggctccctcggctttgcccatcaccacacgggagcaaaacgcgccctcggcttcctcgcccggcggcttcggcgcgcctgatgtgtgcgcggcctgcatgcggcggggtctgggggatatgctttggttttctggtgcggaggtgggacaggcacgggaacgacgaccctcgtggatgatcggggttgttggaaatgaagccgaggagaaagaagcagggcctgggacggaaaaaaggacggagcgcgctgtgcggggaagggggaggagaggccgagcttcagagttcgcgctgtgctggggaactggcggggatgaggtcgtgggtggaggagagcgcggtgggaactggaagctgtcagaagcctggatcatgctctgatgagaggagcaggatgcggaccgagcgggatccggaggaaaaaaaggcagcgcggcccaccaggtcgcggcctgagggctgggcctgcccacccctacctcctcggccgggctccgcggaacggccgcctaggtcctcccagctccttcccgggacccccaagctagaagggcccgaagccaagtctctacggttccgcctctttcctcgcccctgacgtcactctgagtgacgacatcgccaaccaataagctctcaagttctggggagggcgggcgtccttcaccttagcagcccaggaagccgcaaagtcgcgtttacatcgccgaagtgacttctttgtggggcttggtttaaggcgcgttggtgctggggggcccgaaggtgacgtttttctgccagtccacactccgcaggcagtggctaacgcccgaggaaacccgtgattgaagactggattaaacaggctctttccctgacagcttaatatgtctgatagtcgccatggtaaccatttcggagtcatgaatgacatcactttgatgtattctccctcggaccctgcaaatccggaactgccagaggggcgctgagaggatttgatggtgtcgcagaaagggcgggaatcggaaggagcgcattcctctcccttcctctccagaggctggaatactgtgaaatcttcatatggaaatctgtattctactaaaaatatttgctttctcaatggtcccttaacaagtgttgtttgtgattaataatttgtatagaaatctcagcatataaaatgtatgttatagtagctgtgaaatgacagacactgcaggtttgagggcacttcagttcctaggatggccaactgagccatcttgggaaaatgaaacatctagaaatattctcattccccagttatcttttcccatccattttatctggctccagaagaaagagttaaaaattttttttatttaggctgggcgcggtggctcacgcctgtgatcccagcactttgggaggccgaggcgggcggatcacaaggtcaggagacagaaaacatcttggccaacatggtgaaaccctgtctctactaaaaaaaaatacaaaaattagccgggcatggtggcgtgcgcctgtagttccggctactctggaggctgaggcaggagaatcgcttgaacccgggaggcaggggttgcagtgagtcgagatcgcgccactgcactccagcctgggcgacaagagcgagattccacctcaaaaaaaaattttttttttcttagtggctctactcgaccaccatacagcaaggaatcgctttctcacggagaatacgtctcctgacatgtgagctgaccacagactttactcatctgggctacacatttttaagaatggaagatggcggtattaaacgtcagtaaaaaatgcagactgcttttaatccacaaaggatttttcagctaataaccaaatagatccactgttaaataggcaaaacttttcagtttggccactagaggtctctttgtgcatgtctgatgttcaactttgcacataaaggtttcacttcacgttctgtttaccagtattaaaatctacaaagctttggactctttacttttccctcactgaaaattcctggtggtcaaattttgagctctagaaggtagatgtagttttcacactaatttcataaattaatcattgcactaccatgtactggtacttttctggaaaagatcttaaaggatgcaaaaatattttcagttccctgggagacattttatacggggaaatattcttattcatgcattgtattcacttacaaccaggcacagtgaatatcattaagtattcataaaccagatgaacgattccatgcccagtatttgaaagatgagctaggttttctaccatggccatatgtcagcaatcctatcctaaaaagggaagggctaagaactcttcttattgagatatctgttcaaagtaatgtccgtcttccctagttatgagacttggcaatttctttgactttcaggataagagatttatcatgtaagattctgtatgtaatcttcagaagagaaatttttaaaaaaatattttttcctccatgactctggccctgagaattgtgttagattgctgtcttaatgagctccttgttcattttctatggcgaacagtaagcatcgtctaaacctcagaagatgttagatactgaaaatgtaaactattatttttaatggccattttcctaaatatgccaccagatcaagtatactaactgtattttgtaatgttttgcaggaaaagactatgcatctacttcacataactccaattttaaactcttgctgtcagcatagctattagaaacaggctaatataagatccctggggacaatttactagattctcctcaagggagaaacccaggtgccgggtcaaggcaacagtttatcaacaaagcaaggaagacacaggaggaagaaaaagaagaatggaggtagaaaggctcatagaaaaaaaaaaaagaccaatttaatccctctttcctggagatagaattaagctagacttggtggcccgctttggccatctgtgttttaaaatgtcatatcacaaataaaaagtatgcttttactgatagctgtaacttgtggtactacttaaagcatacgtttaaaaatatttaatgattaatagtaatgagatttttttttttttttttgagacatagcctctctgtgtcgcccaggctggagtgcagtggcgcgatctcggctcactgcaagctccgcttcccgggttcacgccattctcctgcctcagcctcctgagtagctgggactacaggcgccccccaccacgcccggctaattttttgtatttttagtagagacggggtttcaccgtcttagccaggatggtctcgatttccggacctcgtgatccgcctgcctcggcctcccaaagtgctgggattacaggcgtgagccactgcgcccagccaatactgataattctcagtatctagtattaaccgggttacgtttaaaaaaaatagttcataattagtgcccttttaaataactgatctgtagaaatcatttaatttccttaagtgatatttaaagatagagatatctaatttcttgtaatagtaccaaagacatccagcactataacgtctacagagtatgacgtctagcggtaaaatggctttattctcagaacagagtatcggtttcctcatttgcttgctgcctctgtttcctttttacgttcacgtctctgtgctgtaaccttccaaatccttatcaccaggccccaggaaatatcacctggtcggcacactcctgcagggccagatcactgtgcacacacttaaccttccattgttttccatacgtttcctaggatgcggggggctagaggatgacggagagttgcctcccggttcttcctctcgttcttatcttgggccctctaggacaaatgtccctcacgtccctcgatgcgaaggtctggccgcgagcagccgcggcctccggcacgtgacggtcacggagccgtcgcggtcccccgcggctggggggcacccggggatgcggcgggcgctgacgtcgtcctcccggttacccacaagcctccgggccgcagcagagcaggaagaggcgcgcggggccggcgcctgccggggaggtcgaggcgctccctcggcgagccggcgccgccggccgggtctcctactgcttgcaaccgggggagggggaccatccgacagctcagccggggctgagagggagacgacgccaaggcggtcttgcatcgcccccggctttccaaatgcagaccctaccggaaccggagcccttccctgacagccgtaggacgggagacggccgaggggtcgcctggactgccccgccctcgcgcggtgacccaccggggaccgtgcgagggtcgcttctaacccttaagagctagagagccgagtcaccctgaggagcgccgtatggcgctggttgcgcgttgttctttaatcagcctcactgaacgcgccgatcccagttttacctcccgggccccacctttccacgcctcctccggcttcccggggtgttttgtgtgtcactctcccacgtacagtccctccccgtccctcgttcctcggccctctcgcccggtctccctagtcgtccagacgctagctgccgcgggcgttcctggttcgcgctcccgccccctccgccccgccgactcgccgcttcctccggagccccagcgtcccgaaccagggactgcatttcccggcaggcgccgcggcccgcggccaatgaggggctgaggatttggcggcggcggcgccccgagagtcggggtgggggggctttgtgcgcggcggcggcgggagaggcggcggcggcggccagcacggaggcggaggccgagggggctgtgcacaggtcgccgcggagaggcgtgcgaattccgagccgagcgccgaggaccgtgctacccaggccgggctgccagccgcaggctcctctctggcagcagcggcggcgcggcgacccccgtccctcggcctccccttcccatcccacctcccgagccttcctcttcccgcagcacgcccggcccggcccggccgtggccctcctcagtgccggccgccatggcagaggcgtccggcgcggggaaaatctagcccggggatttcatgcggcctagctcggttccgcctcctcctcgcgcggccccagcggctgcccgcaccccagccccactccgggcctccgtgtctctcctgtgatcgcactgacacggccggggggttagaatggaacaaactgaaggtaaagtgcgtgtgcgtgtgtgtatgtgtgtgtgtgtgtgtgtgtgtgtgtgcgcgcgcgcgcgtgtgtagtgctaggaagggctgaggagggaacgacggggagggggcgacctagggatggagcgccagaccccaggaggaatggaaggggaagcgggtggcctgaaagggctcgaggggagtcctgacggaggagcagatggcaaggtggggggtgtggagggaattggggggtggggcaggggaggtggggagtgggatgggagtcggagtggcgctgagctgggaattgggaaagtgggatgggggcggggataaggatggatcggggaggggcagggaaaggggagaagagttgcatggagattacagacctgggtggactgataaatagggagatttggggatggagtgtaggaaccagaagagtctgggagaaggggataaatttgctggagaaatggggcattttatgggaatgaagggagaaatgaggaatggaagtgaaggaaaaggtggattaggaaaggggatgaggcaggctgcaataggagaatgggaaatagacgcaggaaactggaagacaggattgggctagggaaggaaattaactgaatgatgacagggatgagaacgatcgacttagcgtcagagtgggaggaagagaaggggatggaggtcgttaaagtgttaggaagggaggccttttgttcctgtatttgtgtgtattctgtgtctttctttcaaggctagagaatagagaagctggtggttatgggattgtgattgttgtgaaatggggaggtgtgggttttactgttttgagggagaaggcgatgtgtttgtgttatggaagggaggcagggagagacatggccataatttgatggttttggggagggagtgaagattatttcgatttaaagggggcaggggcagccatgtttgctgccaaggcactgcagtgtaaataaattccttttcctctccgacatcagtatgaatctggaaggggccaattcagactgttagccccctttctttctattcatgaactcttttccccttacgtcttgggtcattttaaattattcataaccgccaaaggaggtagtgatgttttccatcactacctttttgatgcttttctccctctctttaccctcttccttctggttgcaaacaaggtatgctaatgagctgcagtgtaaatttaacccatttaatcaatttaaaactagatttttactagctgaaggaatcattactacgcttacatatcaaacatgatcgtgaagtcttttacgtattgaaaattcgtttgtttcggaagcctcagaagcagtcaacatgttttctgcaattctttaagtaaacaaggaaattgcatcggttattttacttgggcctgtgctcttggcaaagcgctgtgtccgggtgaaaggggtaggaagctctgcttgtggtagattatcggcttgctgtattttgaatgttgaaaaattagaaatgtatgtatttttaaatagtatttctgatagctcttgcttataggtgatgagcgtgttaagtgatgagtgtgttaagaatagtattttcttttttaaataaactctcttttccccatctcttctctttgccttcatgtagctggctcaatacaatctccagatgccagttcagcacagtgcaatgatctgtgaagtaggcatgcagttcttagagtctcattgagatgccagggtttttttgttgttgttttgtttgttcgttttttgattgaaacttcagttgactctcaggaaactacagtaactaatatattcaactgtaactacttgtacaatttgaaataattactattctaaggtttaaatcctgacaaatttacagaacatacattggtgttaagtagagcctattttatttcatattggattaaatgtgtgtgtgaccttttgtttttattatagcagttggagtaatccaaactttaacctatcacattgatattgaaactgttctctaataccaagaaggcctgttaacattgtaatatggtggactcaaaccagttgaactacatttaacctacctaaatggcaacatcctctcagttgttatacagaagcttaggatatattcttggtttgttagaaaaatgaaattgaatgttgttaaagtggtactttgtaaatctggcttttacactaaaagcaccctctcagcttgtagtattttaatttgataatattcagcctgaatttgtttgaaattctgtgaggaacagttgcattaaaaaaaaaattcagcatgctttttctggaatttatttttatggcaatttaagttttatatctcctacttgattgacatgttatttgtaattagctggtaaattgtgtgcatgagctatcagtgctgcaaatttttaggaaaataagcaatcattaaatagaaaaatttgtgttggaagctttcattgcttaaaaaaaaaaaaaagaaaaagtttatttttatgtatgcagcatcctttaaagatcagggttcctgcccagctgtcataagtatcctggttccttggacaggtattcatatacgaagaagcctactcttgttaaataacacttataaccaattaatatgtccatcagcccacctgttacctgtgttggcttttttttttctttttttccctaacccttaaattaacaaatgccgtctcttacactgatcagattgaatgagttttggataaaggaaactgtctttgagattggtgattgttgagtgaactgtcaaatctgattctaatgacagcgtttctggaatttataataatattcataatccactaatagctgctcacagttgtcctcacactgtgctatgctgagtgtctcacatgcatgatttccttttatcctcctaacagttttatgaagttagtactttttttttttttttttttgagagatggagtctcactcctgttgtctaggctggagtgcaatggtgcgatctcggttcaatacaacctccacctcccaggttcaagtgattctcgtgccttagcctcccgagtagctgggattacaggcacacgccaccatgcccttctaatttttgtgtttttttgtttttgtttttgttttgagacggagtctcgctctgtcacccaggctggagtgcagtggcatgatcttggctcactgcaagctccgcctctcgggttcacaccattctcctgcctcagcctctggagcagctgggactacaggcgcccgccaccacgccctgctaattttttgtattttttagtagagacagggtttcacggtgttagccaggatggtctcgatctcctgacctcgtgatccacccgcctcggcctcccaaagtcctgggattacaggcgtgagccaccgtgcccggccaatttttgtattttttttagtagagacagggtttcactatgttggccaggctggtctcaaactcctgacctcgtgatctgcccaccttggcctcccaaagtgctggaattacaggcatgagccaacacgcccggccaagatggagtttgtttgtttgttcgtttgtttgttttgacacggagtttcactcttgttgcccaggttggagtgtctcaaaaaaaaaaaaagttattcacatattcacatattacagaaggctaagaagttaaaaaaataaagttagcattcttctccactgataaccacttgaagtttcttgtatgtccctctggaaaacttctatgcatgtatgtgtatatttctcttaaaatattttcaaatggatcatactatctgcattttgcttttttgtttttttgtttgttttttgagatagttttgctgttgttgcccaggctggagtgcagtggcgcgatcgtggctcactgcagacttcacctcccggttcaagcggttcttctgcctcagtctcccgagtagctgggattacaggcatgcaccaccgtgccggctaatttttgtatttttagtagagacgaggtttcccaaagtgctgggattacaagcgtgagccaccgcacctggccactttttcattttaacagcctatctgggacatctttttaaattagtacctatgaatccacggctgggcgcagtggctcacgcctgtaatcccagcgctttgggagggaggctgaggcgggcggattgcttgaggtcaggcgtttgagaccagtctggccaacatgacgaaacacccatctctactaaaaatacaaaaattagccaggtgtggtggcggcgcctgtaatcgcagctactcggaaggctgagatgggagaactgcctgaaccccgagggggaaagccgcagtaagctgagattgcgccaccgcactctagcctgaatgacagagcgagattccgtctcaaaaacaaaacaaggccaggcatggtggctcacgtctgtaattcccgcactttgggaggctgaggcaggaggatcacttgaggtcaggagtttgagaccagtctggccagcatggtgaaactcccgtctctactaaaaatacaaaaattagccgggcatggtggtgcgtgcctgtaatcccggctactccggaggctgagacaggccaatcgcttgaacccaggaggcggaggttgcactgagctgagattgtaccactgcgctccagtctggtaggcaaagcgagactccgtctcaaaaacaaaacaaaacaaagaacaaaaacaataaaaattagtacatatggatccacagcttttttttttaaagagtcttgtaagtatttcattgtttaaaacatcgattaacatttagtttgttagcaggttttgctattataagtaaataatagttggtcctgaattaagttcctaatagcctgttaaatggaagagagatagtacaactactttattttagaagagagaaaactgaggcctatggaagtgaagtctggggcttttttgacaaacccgttacttggttctttacagcacaacctattacttccttaaagtattggagctgcctggccgggcgcagtggctcacgcctgtaaccccagcactttgcggggccaaggcgggtggatcacctgaggtcaggagttcaagaccaacctggccaacatggtgaaaccccgtctctactaaaaatacaaaaaattagccgggcccggtggtgtgcgcctgtaatcccagctactcttgaggctgaagcaggagaatcgcttgaacccaggaggcagaggttgcagtgagctgaggtcgcgccattgcactccagcctgggcaataaaagcaaaactttgtctcaaaaaaaaaaaaagaaagaaagaattagagctgcctatgaaaactcaaggtgagggggcaaacttaaggttaagtatatttagtagaaagagttaaaggggagtaagctgcagtgaggcaagagatcttgtattttttcatattttattcaccatgttgtgaacatatatgcataaaatatttttacatgcaaaaatgaattgtgtccaagttatcttgaggtgtgtgtttttgtatgaagtggattttagtggactttttcttgtttgaataaaattatcaataaaataagatagcgatgaaacgaaaaaaattagaggtccatcatggtcttagaaaaggacctggaaaaaaaatagagacattggtaaaaattttaaagtgagctaaaaatccctatttgaaaacaagttaaaaatcttagcatggactgttgcttactttatttaattttttttttctatcaagaagaaaatgggttacttattcattgggatcttttaaaacaaaaagatagtcttgtctgttgtagatacttcagaaattaaaattgttaaaactttaaaaatgcttagaacttggcatctgtccataaaatctgtttttcaatgcaattctgtttttagttttactttttttttaaaagcagtctattattttttgaaaaagcaactaagatgattcatttatttgttaataaacatgtccagcatttgagtttttaaatgaatggtgaactttatttctgcaggccaatctttttatgaattatatttataagttataaataattatacttatattgttatattaacaaggacaaatgtaagaaattgcttatactaacattatctaacctttttttaaaaagcttacagttttgttttcatttttactgttgctgttagtaaatatgtaataaagactttaaacacttctgtagtatgttgtacctgcactgtgtagcatgaaaagaaggtaaaggtatattttaaattttgtggacttagagaatgttcagtttttaccacatggatgtgttgttactcctaaagcacaacttttttgataagattttgaatttgaaaaagctctttgaaaaagtattcttagcttgtttttttagatgtggatctttatcgtcattaactgatctacagtgataacttttcccccttctaatatttaattactaggttcttttttccatctacatttagggctacttagagcaagtgactaggaaaatgaaaattgttaatattcatactgtttcagttttagccatgtgtagcatggaaagataaaacatgaataataccttacatttatgtggcatcttctgaggtgtttggtagaattcccacagaataacttggctttttaaaaatgtgaagttagaaagcacaagaattattatttatttatttatttttaaatttttttttcgagacagagtctccctctgttgcccaggctggagtgcaggggcgcgatctcggctcactgcaagctccgcctcccgtgttcgcgccattctcctgcctcagcctcccgagtagctgggactacaggcgccccccagcacgcccggctaattttttgtatttttagtagagatgggttttcaccgtgttagctaggatggtctcgatctcctgacctcgtgatccatccacctcggcctcccaaagtcctgggattacaggcgtgagccactgcgcccaggcaagaattatttaactcagtcttaagatgggaaaattaagatttcagagaccccttcaggccaaatagactgtcatgttacggagaataaaattttcagatttccgtataattaatcttttctctttttttgtgagacagggtctggctctgttgcctctgctggactgaaactcttgggctcaagcagtcttcatgtctcagcttctctagtagctgggactacaggcaggtgccactgcgccgggctctgtatgattacttaaaacaaattaagactgtgtgtgtcctgatttttcttcatagcttatattacccacattctaatagataattaaatattaagtaacaagtatttttctacataggtgtgctttttcttattttggtgtaagttatatacatatttcctaagatatatagatttatttattttttttatttttagagacagggtcttgctctcttgcccaggctggagtgtagtggcatgatcctagatcattgcagtcttgaactccttggatcaagcagttctcctagcctcatcctctggagtagctatgactacacacatgtgccaccctgcccaactaatttttttttttttgagacagggtcttcctctaccacctaggctggagtgcagtggcacagtcatggctcactgcagcctcaacttcccaggctcaggtgatcctcccacctcagcctcctgagtagctgggactacaggcgtgtgccaccacacccagctagttttgctttttttttttttttttttttttttgtagagacagagttttgccaagttgcccaggctggtcttgagctcctgggctcaaccaatcctcccacctcgtcctcccaaagtgttgggattataggcatgagccactgtgctggtccccctagctattttttaaaatttttttgtagagatggagtctcactttgttgcctggctggccttgaacacttggcctcaagtgatccttatagggaggcgttttaaatttaagaatgggtagcttattgggatttcataggttaaaaaaattagtttatcaaattgatttgagattaagaagatcatatggagatactcctagtggcatttgggccatagccaagacaatattgtgtctattgaatcttatgttatctaatttctcttagctgtggaggcttaagaaagctatatgtaaaaaacaaacaaaaactttaagaaataggcattttaaagccttttacgttatgaaatgtgaaatataaaaaaaagcatataaaacttgaatgtacagtataaacaaataattaggaagtgaaaatacaaaaattaggcgtggtggcacacgcctgtaatcccagctactcgggaggctgaggcaggagaatgacttgaacaagggaggcgtaggttgtagagagccaagattgcgccactgcactccagcctgagcgacaaagcaagactctccatctcaaaaaaaaaaagaagtgaacatcgggtaactatcacccaggtaataagtcctttaagaaaagctgcagagacaacctcattggtttagctggtattgctttggtggtagttggactttagggacaaaaatgtattgatgtccttggtttttcttttttctttttttctttctttcttttttttttttttgagaggagtctcgctgtgttgcccaggctggaggtccagtggcgcaatctcggctcactgcaacctccgcgtcccgggttcaagcgattcgcctgcgtcagccttccgagtagctcgactacaggtgcccatcaccacacccggctaatttttgtagttttagtagagactgggtttcgctatattggccaggcgtgaaccgccgcgcccggctggtggttttttttttttttttaataatagtaagaacctgcggccgggcgcagtggctcatgcctgtaatcccagcactttgggaggccgaggcgggcggagcacctgaggggaggagttggagaccagcctggccaacatggcgaaacccgtctctactaaaactacaaaaattagccaggcgtggtggcaggcgcctgtaataccagctactcaggaggctgagccaggagaatcgcttgaacccgggaggcggaggttgcaatgagccgagattacgtcacctcacacgccagcctgggcgaaagagcgaaactgtgtctcaaaaaaaaaaaaaaaaagaacctgaagaattcataagcatgcgagttcaacgaatataaaaactgaataaccagtttttaattgttattgccagaaggggtctctgaacaatatttttaaggtagctttctaacatttattgtcagtgtttagtgatttgaaatcttagtaccttaccgatgaataacaaaaaataatactgaatcctgtaagaaagtgccattttatacaaaatgttgtttgtttagagttcatctctgttgcactttttggtaagattcagtgattaggttttaaattaacatgcaaactctaaaatgacttacttagaaaatgtcgatttgtctatattgttaatttcttagcttaactatcttaattaacaaaaatgagtttgacactcctgcttttgcagtattggaaccattcaaaaagtattaacctgagaagtaatcagtgatgacaatctatgtttgacccttcatccttggtacttcttgagttttaacttttctgtaatttgggcaagagaaccaaatttcttttgaagctggagaaactgcattatgctttcctggccttcaagaatattttcttaggtatttggaaaggttaagtgttgatttttgaggattaggatagcagaaaaatttgaatgcttttttcccactgagtacctgctgaatacggtctatttgcgtacaactctgccatgtgaactttgagaaaggcatttttataaattaaagcctttatttggttattataattttgtcactctaagtggtctccttttgtatgatctctgcaagattcaaatgcatcagaatatagtatttcatattagattgtggtgagaaacttcttgctttgttttattgtatccttgaattcttttctgtagtgcaatagcatgttattcttttttactcccactgaaggttaaatatatttcttgctaatttttcccctgcatgggcgatagcgattttaaatcttgaacgtgtatgttgagttttcctagatgtggaagtaatcataatttgatatttttagaaagataaattaggtaatgtggctttgtgtatgcagtagagttaatatgcttttattcacctcatggtttctatgtcattaccacctgttggtttttattttttaatggaaaacttgaacttctccaaagtgactagttttaaaataacatttatgtaaggattgtttatacagagaaattgaaaaccagaaggtataaagacaattaaaattatctaaaattctactagttagaagtaactactattaatattttgttctatatccttccaatattttttcatatgtattttttttacatagttggaattgtgcatccatattattttgtaatatgttttattatttaatatattatgaaataaatgtttgtgatttaaaaaatcaatatagaatttcagtgtacaggtgtgctattatctgtttaccattctgtgttgaaggtcttttaggcagtttgcaattttgggatattgtaagttgatggacatccttatacattaaaaaaaattatatggctgattatttcattacaataaattcctagaagtagaattacttaaaagatataaacattttgaaagcttttgatacatatttccaaactgttctcttgaaagattttttaaaataatagttttattgagatataattcacatacccaaaatttatccatttaaagtatacaatgcagtggcttttagtatgttgacggggttatataaccatcaccacaatcaattttagaacatttccagaaaggtttgaaccagtttaaacccagcaatattataaagttttgttttaaaaacagcatttattcataacatttaaagtagtacagtatacaggaacacaacagcttgtgtgatatatactttatatgcatttgagagagattttagaaagtccttcatgagaagatgatgctcctacgtcccattttaagaaaacctgacatattaagcttaagctgattaaacaaaatatgaggtatatttttttgaattataaaattattctcctgagcctgggcgacagagcgagactctgtctcaaaaaaaaaaaaaaaaaattctcctggacagtcagaatgtctttattgagagagtattgtgtatggtttaaaatttttttaaaaaattcaaatttgatttagaaacactttattttagaaaacatctgtggaaagtatgttttacctatacagttaactgtagcaaacttatcaccttatagaaaatatggttttcttttaagagaggtttgctttgttctaattgaccttccccccgaaagttgttcttttgttatgttcgcttaagccgtttaacaaaacattttttaaaaactgggtgggctggctgggcgtggtggctcacacctgtaatcccagcactttgggaggccgaggtgggtggatcacttgaggtcaggagtttgagaccagcctggtcaacatggtgaaaccccatgtctactaaaaatacaaaaattagccagtgttgtggtgcacgcgtgtagtcccagctactcaggaggctgaggcaggagagtcgcttgaacccagaaggcagaggttgcagtgagctgagatcgtgccactgcactccagcctgggcaacagagcgagactctgtctcaaaaacaaaaacaaaaacaaaaacaaaaaacaaaactgggagggcagtgaagtatagggcaagagtcaaggagatctgagttcctatccccacttcactttaccactgaagatcagtgttcttatctctaaaagtgcaaatgaaaattattcttggagttacagggattcaaattagaagtactagagtgtgcgtagaactgtaccagacacatagttgataatgaataacttttttaatagaagaaaaatagtgtacacaaaatgaactagtctttagtcacatgtttaatggaagaagaactgaactcaattggctaaactcactttcatagaagttaaaagttgaacatcaactaatacctgaagagaatctttgcctaggttatatgagtttttcttaattgttgagagaattcatgctggttcaagtttgaacatgaagttaactttccagtccaattttacttccactgttttattacaactcatgatggctaaagcttcactaaagcttggtgttctgattaaacaaacaggtgatgtgaaatttggatatatagtatgaaattctgaattttctaacttttattacttattttgaaaactacatgttgaatactaaaatactacatgttgaacctaaaatactaaagcgataaacaaaaaaaacaaaacccaaactggtctttatagaaaagataaacttagtaaattattatttagatataataaattgcttagtgccttaaaaactacatatcatctttggcatacattctcttttgccttttttgggggaatggaggatacaagctaaaagaaagtaaatttgaatgcttgcaaaattttaagaaccaatctcaaaccattttaccataatttaaaagtttgtccaggaaataggtaagaaaatatgtggatgaacttgttagtttactagatttcatagtgaatggaacaagatgactgatgaaagttgtttgtagtaattttcattgtgagcaactacccttgctgtaaaggattggaaaataatgtaatttccttcaagtggtaataccatgtctgttgttgctgggtgtggtcagcaacaaagcgaagacagttgaggttaaactagatagataagggaaacagggtgttttactagtaagctttgtattggtaaaaggcagttcaatagtaatgtggtttagtcaggaaaaaaatatgaactacaaagccacctaaaatgttgtataacttaatggaatcatagtcaagtgaaaactgtatgattgaatttagtgacaggatttatggttaaatgaaacacttttttgttgttgttgttttcttttttgtattttgttaactaagttctacttcacgcaggttacttcctaattcaggatattttaatgtctttaatcatcatccttctctaaacatctttctctaaatttttagtggaaaatttaaagtgaacacatttcagaaaatatttgaggtgacaacgctaaagttaaacagattatggagtagcacagttattctttacagataatttgctgcctggtgcagtggctcacacctgtaatcccaacactttgggaggccaaggcgagtggatcacctgaggtcaggagttcgagaccggcctgactaacatggtgtaaccccctttagctgggtgtgatggtgcatgcctgtaatcccagctacttgggaagctgaggcaggagaatcacttgaaccctggaggcagaggttgcagtgagccgagattgtgccagggcactccaacctgggcaacaagagcaaatctctgtctcaaaaaaaaaagatattttgctttattaatagtttaaactcagaaaagtttaaaaaaagttaagagaaaacatacaacttctctaacacaccttgattccttactaggattttgtaaagagaatcgtggccatgctgattttactccctaaaatcctatctatgtcactaactgtattggttgtgaatttcatataattgtttgatattacaaataatggtcatcttaaataatgttaaggtgatagatgagatttaaagttagttttttatttatttatttttttgagacagagtctcactctgtcacccaggctggagtgcagtggcacaatctcagctcaccgcaacctccacctcccgggttcaagtgattctcctgcctcagcctccctagtagctgggaccacaggcatgcaccaccacacccaactaatttttgtatttttggtagagacaaggtttcaccatgttggccaggcttgtcttgaactgctgacctcaagtgatctgcctgcctcggcctcccaaagtgctgggattataggcatgagccaccacacctggccaaaagttagtattttaaccacatatatatatatattcttttcagaatgaaaactcaagccctacacttatgtattgataataggaggaatcacagctcattttcccatttttcgtggtcattttatatatgtggatcacctgatccaacctttcttatgatgttaaatgaaaacccaaagatactgtctgtcctcggaatttatgcagctaagttaggggtagaagcagaactaaaattcaagtcttatgactctaagaccaatgttagagtacatccttctactctgtggacattttgcttgtccctaggtatatgagtttgtcttactctggcatagagatctatttgctgaacttcctcttatgtgacttctttctagcatcacagtaatattaacagatttctttaaaaatttataattcttatttaatataagcttttaaaggatgtttttgttaaggtaaaatttgaaaaataatgtagatcagcactgtctaatagaattttctatgatgacagaaatattctgtatctgcactgaccaatatggtaaccttagccacatgttgatgttgaatgcttgaaatatggccattgtaactgaggaactaaatttttaatgtaatttaattttaacttgtttaaatttaaatagctacgtgtggttagcccagaattagctattcttagtgaagggaaagaattaagtagatataggctgggcacgttggctcacacctgtaatcccagcactttgggaggccgaggtgggcagatcatgaggtcaagagatcaagaccatcctggccaacatggtgaaaccccgtctctactaaaaattcaaaaattagccaggtgtggtggcgggcgcctgtagtcccagctactcacgaggctgaggcagagaattgcttgaacccaggaggcaaaggttgcagtgagctgagatcataccattgcactccagcctggcgacgacagagactctatctcaaaaaaaaaaaaaaaagaattaagtagatgtgaacataattgtacattctttgccttgtgattactatatttgtgtgtttttgtgggctagatgtttaaaatctcatttttccagtgtgtttgctacgttagatggtaaataaattcttcatggcaaagaaagataactataacttatcagtaatagttgtttgaaagctggaatattttaaaagtcttttaatcagtgcaattactagcagactatagattgccgaccaacaaaatgatttaaatacagaatgcattgccttcatttcagcttttttttttttttttttttttgagacagagtctcacactatcacccagactggcgtgcagaggtgcgatcttggcccactgcaaccttcgcctcccaggttcaaatgattctcatgcctcagcctcccgagagttccatttcagtatattttggatcagttatgtttacataacatttaagatttaaactttatactacatggaatacttgagtaaaccgtaatttaaatctttttactatagccataactcagaagcctctgaaacagagtgaacgtcaaaggaaataaaagtacctgatgatcatctttttccttgtctttttccagcctctctatatgactgattcctggttttggtttcattagttttttaataagaatctaagccgggtgcggtggctcacacctgtaatgccagcacttgaggtcaggagttcgagaccagcctggccaacatgcggaaaccccgtctctactaaaaatacaaaaattagccaggcatgatggcgggcacctgtaattgcagctactctggtggctgaggcaggagaatcgcttgaacctgggaggcagaggttgcagtgagctgagatcgtgctagtgtactccagcttgggtgacagagcgagactccgtcttcaaagaaaagaatccagccccccgtccctgtattgtattaccctgttttatagtagcatatcactatctgaaatttccatgtttattttagctccatgagactagaatcttatttctttggatttcccaagatctagaacagggtctggtacatagttagtgttcagtagtgaaccacatcacagacaaaaacaaaaataagactctacaaggagaaagatatataacatggcacttggagtctgggaataggcaaggtgagactcagcttttgcttatcttggcagtgttggtgtgggtgattcaagctggttagtttaattttgtatagaaatgtttctctgcgaactcaattaaaaacaaaacttttgtccagacatacaatatatactaaataaattctatctgcctcatggagctggaaaagggaaacaaacatgagaaaatatttccgtggtcagtttttgactagtcagtctcatttatttgggaaaacagaggttatgggatttactcaaatgcctgttcttgagtagtgttttaaaatgtgaatgaaagtctgtttatttaggaaacttgcacattatttatctttacaaaataaatttccacctagtgattactctttagaaaaattgttggattaatataattctttgtgatggctatgaggggcttttcttaaaactgtgactattatatgtttaaattaacaagactttaaaaaatgattcttactatagtgctgtctttattactacaagttttctttctccctatatatttttatgaaaatcagccacaaaattcaatgtggcccagagattttggttgtcagaaatggaaaatcttaaataggtgttttagtagtaaaaggacccatagcattttattatgtcatgcatagtagtggcttgactgccattttgttatttgtatcaggtctacccctagaatgagagtaaactccagagtatagaaagctgcggcagctgtgccaatgaaatgggagaaattctttccatttcttctgcttatgtgagagatgacagtaacaccctaccagcaattaaaatctaatggcttttcctggttgtccagggacaaattgtaggtcacatcatcatgcctgtatctatagataaaactatttatgttgtaatggggcaagacttctgttgttgttgttgttgttgttgttgttgttgttgtttgagacggagtcttgctctgtcacccaggctggagtgcagtggcacgatcttggctcactgcaacctccacctcccaggttcaagcgatcgtcccacctcagccccctgagtagctgggactacagacgcgcatcaccatgcctggctaatttttttttgtatttttagtagacacggggtttcaccaggttggccaggctgacctcgaactcctgacctcaaagtgatccacccaccttggactcgcaaagtgctgggattacaggcatgagccaccgcgcctagcctaagacttcttttttaagtgatatttctattttgggtacaccaaatcttaggttaatgaatctaaggattcccctccttctgtttatagggatgctcctgaaactgaagacaaccaagtgagtggaaaggctttcagaaaaacccttgttgctgctgtaacaaattacaacaaacttaatggcttaaaacgacacagatttattcttttacatttcttgatgtctgacatgggactaaaatcaaggtgtcagcggcagaggtgcgttccttctggaggctctaggagagaaactgttaccttgatttatctagctgtttccttcccttttttttttttttttttttttttgagacggagtctcactctgttacccaggctagagtgcaggtgcaatctcagctcatggcaacctctgcctctcaggttcaagtgattctcctgcctcagcctccagagtagctgggactacaggcacgcaccaccatgcccagctagtttttgtatttttagcagacaagagtctcaccatgttggccaggctgctctcgaagtcctgacctcaagtgagcccccgcctctgcctcccaaagtgctgggattacaggcataagccaccatgcccggccctcttcctccattttcaaagtcagcagtcttcaaatctctctctgactctgatccttcccaccaaaaggatgataaggatccttgtgattatgttgggtccacctgaatagtataggataatctctccattgcagcattgtgtttgctgccattcctatgttcatttagcagctttcttccctcacatactaggggatggggatacagcagtgagcaagatgtagaagtacgcagtaccttcgttaacacggaagtagttttgttttgtttttctttccatgactgaaggcactaccacactttactttggaaactaaagataaatctgaacttcagttatcagcgcacatttggcaattctctgagcactgaagttactcaaagacacctaaatatctcgtgacattccaaaataaattgattttatgttgagcacaggttttgtattagtctataaatgatacaaaaaaggaagtctttttttagagtttcagattctcatcatgtgttatgttctacagtgatgatgttgtgacagtttctcttacgctgttcatagtgaatgtaggttttgtatactgatacaaaagacagagcttcgtgtcataatatcccactgtttaggaaaatatgaatcacaatatgttgtcaattgtttatatatgcttgtagaattattattagattcatggtagagcatatttaatgtggttatgtaaatgtttaaagtttcttggaaaaaaattcttgacaagtcgtgactcttttggatgatgtacttacactcgtattttgagcacttaataaaatatctaattttaattttccaatgaaaagattacttgctaaaattaaaaaattacatactaaactttttaaaaagtttaaaaataattggggcaaattttttttctgttttcctctgagtgacgttacatttatgaggtctttcttaggaaggaagaagcaaatctgtactctcagttcaaaatccatgccattaaaaaacagcctgtgatatttcaataatactgcttaatggtattagcacatattaagctttttaaattgttaatccaatcttgtgcccccccccccccccccgccttactgtaatactctattctgttttggattgatttgtttattgataatgtgccaggcactatagttggctctgggaattcaaggatgaactagtttcatgtcctgtaactttcagtctgtccatattctctggcatctaagttgtttttatttcctggaattttatagtgtgctttcattaaatacttataatttggttttgcaacatatgaagaaaagcccttctaaaaatctagatcatttgaaacctgtgatattaagaagccaagaaggttctcaatggaagtctttaggtactggtttataataggtctttggaaaggagctcctctctcttccactacaggttagaacttgtttcctaagccaaaaatgcctgaggtcccctgcannnnnnnnnnnnnnnnnnnnnnnnnnnnnnnnnnnnnnnnnnnnnnnnnnnnnnnnnnnnnnnnnnnnnnnnnnnnnnnnnnnnnnnnnnnnnnnnnnnnnnnnnnnnnnnnnnnnnnnnnnnnnnnnnnnnnnnnnnnnnnnnnnnnnnnnnnnnnnnnnnnnnnnnnnnnnnnnnnnnnnnnnnnnnnnnnnnnnnnnnnnnnnnnnnnnnnnnnnnnnnnnnnnnnnnnnnnnnnnnnnnnnnnnnnnnnnnnnnnnnnnnnnnnnnnnnnnnnnnnnnnnnnnnnnnnnnnnnnnnnnnnnnnnnnnnnnnnnnnnnnnnnnnnnnnnnnnnnnnnnnnnnnnnnnnnnnnnnnnnnnnnnnnnnnnnnnnnnnnnnnnnnnnnnnnnnnnnnnnnnnnnnnnnnnnnnnnnnnnnnnnnnnnnnnnnnnnnnnnnnnnnnnnnnnnnnnnnnnnnnnnnnnnnnnnnnnnnnnnnnnnnnnnnnnnnnnnnnnnnnngcaggcggcttgcttgaggccaggagttggagaccagtctggccaacacggtgaaaccctgtctgtgctaaaaatagcaaaattaggctgggcgtggtggctcacaactgtaatcccagcactttgggaggccaaggtgggtggatcacttgaagtcaggagtttgagaccagcctggccaacatggtgaaaccccgtctctactaataatacaaaaattagctgggcttggtggcgcgtgcctgtaatcccagctactcgggaggcggaggttgcagtgagccaagattgtgccgctgcactgcagcctgggtgacagagtgagactctgtctcaaaaaaaaaattatttctccttcatttattgaaaagagtggtccttcttatgcttttgcttcgttatttaataactaaatgtcatataacaagtcctgttctggaagggtaacttctgttgatacatcttgagtttattatatatagatggagctagactactttgttttggatgcatgttgttagtaattatacaaaaatggcataatttgcttcacgtcttggaggaaagtgagtaaaattacatgaaaatataaagggaatgtatttttcccaaattttttttttaagcaagcagattttccagtttaacccagaaattagtcagcagcttagagttctttctaaaaggctaccatggaaagtacctttaagtcaagatatacagataaggtttactaatatagaacatttgttttacatactaaaatgctgtaagccctttttgtcatttggagaattgatgttttattagtataactgctgaaaagtagtacaggaaaatgttttcccctaaatcatagccttaaactttgaaagagtcagcctcaaccagaatggtagtaaacctctttaaatgattcagagtttgaccagcagtcttttcaaacctcataattttgacatcctcaagttttcattaaaaaagctataggagaactaaaaatgtgttaagtgcttatacaattaatatataatggcctttgaatctgagaagtccaagtatatgcattaccatgggaatttaagaaattatttggactggcacagtggctcatggctgtaatcccagccaaagtgggaggattgcttgagtccaagagttcaagaccagcctgggcaacatggcaaaaccctgtctctacaacaaattttaaaaattagccaggcatggtggtgcacgcccatagtcccagctacttgggaggctgaggtgggagaatcacctgagcccaggaagttgaggctgccatgagctgtgattgcaccactgcactccagcctcagtgatatagtgagaccgtctcaaaaaaaaaaaaaaaattgtttgagaggaaatgcccacattttagtgagaaataatttgcatttgtactatcgtggttcaaactttttggataactgtaactgccaactgtataacacttggatgccactaaaagcactgtattttgtttgtggatgaaatagtgagatctattttatagatggtgtttgttccctcaaaggataaaataatctaaagacaaatagaacaatcacttgcatttgtaatttcatttttatttccttgacaaaacattttcaagcaggatccgttttgtttgaaagttaacattgagttgtatagtcactgtaccaaatttggttattgcttttgtctgtagtgagggctagattagatcctatcgattctagctgctttcagtgaataaaagacaaacatttttgttcatttcctttttggtaccataggggcgtggtcaagttcttagaaccaggtggttggtttttactttttgtttcctccagaagtccacacccacatctctgctttttcttgtgtatgtgtggggtgagggtgaagttaaaatgtgattagaaaggactcatggctttcaaaggaagaatattgatttttagtgtaatttgtgccctgtccttagggtagaaattgacttttgcttctgttcatacttcatagcagtttggttttgctgatttctaaaggtatgtgtttgggtcctttaaaaatatgtatgtactacttcaaaaagggatgaggggcttgcagtttcacaataaatagcattaaaaacttacctccattatttttaaacaatacacatttgttactgtattactaaaaattttttaattatgaaaacctaaatgggcaataccagaatttataacttatagtcaaagggttactctgatcatatatttagattaaaatattagtagaacacagaaccagaaagaatggagtcttttttaaaaactgacattagaggattttagcatcttctatagttacgcattttttctttgtagagtttctggtttcaccctaccaaacccatatactgaaaataatggagcatattaaaaaaaaaattaactgttcctttccccccatttacttcttggtgtcaatttggggaaaaattgtaaaacgagaatctcccttgatgctgtcacccggagatctttatattctgtgatcaaatgtgagtcacattcagaagatgtttttaggggggctttgcgtgtatgtacatattaaattgatttcaaagacaggatccaaatacaggatcactgaaacattaagtgatcattcagttagaaattagtatatgaatatatttgatagctttctctttatacttcacagaatctatgcttaagcttgtctttatgtactgcgtttaaaacaaaatgaccctctagttttttaacattatgtatcttaaaaaaaatttttttaaataatgtttttgctgcataaattgccaaacatgctaggttttcaagaaccagcatagctggttcattactgtagactgtctgcatgtactccattcctgttactatggaaacacattgagtgtggatttatcataaaccttgagaaatattccttgcaacagttcatataaagaaacatctggatcccttgtttatcctggggtgaaggaagaccaccgtcttcctctgtgttgtgaaaatcatattatattccaccatttttttctagctgtaaaaattctcatgtacatctatcaagtatactttgttttatagtatgattgattatgtttactagaacaactttggaaaatagattgattttcatgctgattcagttaactacaactatgacaattgtattttgagagcttctacattctgaatttcagacctacattaataaggttttaaatatatatatacatatgagtttctttttttaatatattttggtctttggttgggttaacactccctctggaagtttatttgacttcattccagtctcttggaactttaaaccttcatgaaagttaagtctagaactaaagagaatctcagtgacatctaagtgagctaagttgttagtctcattttaccaaggatattacctgaggagactgtaactgcttttatattctgttactacctccatgcaaagacccacagcagctctgtgaagcatttcatttatataaaataacttctttaagtttatgtagtttagtttaaaagattcattgaagcccctcctctgagcctttgagttaggttccaagagcatatatgggaataacattacttcctgctcttaagaaaactcacataaacagatcattttatggttaattctgagaggcacgcatagaatatcttagaacacagaggaaagttactcagactaacttagagcttaagtgactacttcttggaaatgacattctgagctcaaaagatggttaagagtcaagcaaaaaaaataaaaaaggaaaagggtatattatggataggatataatattagtaaaggcacagaggagtgaaatcatggtgtgcagagaaatttccagtgattttatattactagagtacaaaaatgacttgaggttgaagaggtaggttagcgaccttgcttggagggccttatatgatctgtcagtctaagtgcttggcctttttctgggcaatgggaaaccattgaaggattttaatcaatagagtgttgtggtttgatttacagattaacctaggaatgtatttgtagagtagctgtgtctgaaaacagaaatagacaatttatatgacatcttaaaaccacttctaattccaaaatgcttaaataatgatatcaatgtaaggattttttttttttttttttttttttttttgagatggtgtcttgctttgtcacccaggctggagtgcagtggtgtgatcttggctcactgcaacctccgcctcccagattcaagcaattctcctgcctcaccttcccaagtagctgggattaccggcgtgtaccaccatgcctggctaatttttgtatttttagtagagacggggtttcgccatattagccaggctggtctcaaactcctgatctcagttgatctacccacctcaccctcccaaagtgctgggattacaagcataagccactgctcccagcctaaggaatttttaagtataattaaatataaagtttctattattgagaagagactggcattttaaacatagaaaaaaagaatatatacagcacaacatgtaattctatagagtagaatctagcaatacattccacagaaataattgtttatgaatttgttatagtgacttaaactataaatttagcacattatgaatacttaattgatatttataggctcaagttgttcatctgaaacacgtaacatgatttctttctttctccctcttgctcttttttttattttagagaaagagttttactgtgtcacccaggctggtcttgaatgcctggcctcaaacaggccctctacttcagcctcctaaggagctgggattgcaggcatgagccaccatgcctggcttgatttcttttcctgtttttgtttttttcaactctgtatctgtgatttggcttaaggattctataaacttttctattatcagcccaccatcccccaccaccatgaataagttggtaaataataagagcactaaagctttgattgataattttcaacttttttttgcttatttaaaactgtatagtttcagcaaaattagaagtattcattgattgatttatcttttttaaaaaattagcctagaaacattgttcagaggatgaatttatcagaaatgtttttgtgtggtgatttcatttacttgaaagtacatattagaatggatagattagtacaattatttagtctcccaccaaattgttagttaactctggggagtgggagtggagaagggtgaagtgaggttctgttgttgtttacatatttagggattgtgggaagtaagcttacttgttaagagccaatgctgtggaacagagtgtgtgtttgaaccctccatttacttgatctcagactatggcaagttatttgatcatactggccttgatttttcatttgtaaaatgggatagtaatagtatttcctcaaaggggtgttctgtgaagtaaaataatataacaaatgtaaaatgtttagaatagtattgacactaagctctcaaatgttagccattaaaattattgctttaaaaataaattgaacacattatctttatcagggatttatttaggacaaaggtttaagaatttctgatggcctgtaccaagtaatttgaaaagcaatgtgtgaagaacaccttacttccacatcctacttgtttctcatggcctaaatgcctccttgcccagcatttttcttctccttagatgtctgttataattgtagtagtaacacaattcaattcttagtcatcttctgtttcacattgtttgctactattttatgtgtcttactcacaaaatcttacattatcttgctaaagagattgaaagtacctttaggtcagtgatttttttttttttttaactttttagcagttctgtatgcccagcattgcaatgaatgataataatagccaacaagtggccaggctctaactgtatgccaggcactgtcttaagtgctgttcatggattaactcttaattcttacggcagccctgtacaaggtacacaattgcaggtatccacaatttctggctaaggaaactgaggattagagatgctgaataagttgcctgaagtcacacagccagcaggacttgaagtatgcttttgaacttagtttgattctgaacctgcactctcaagcacagtgctcagtagagccccctaatctagtaaggtcttaaccattttatcagttggtgtgtctgctgcgtgaaggctggccgccagactccgctgcccataaaaatcactatgtaaagaaatttacatgtagtcccaaaatatctgtttttatgaactaccaaaactgctttcttgattgcattgttgtattatttggaggcataatatgaagaagtatggccctcttaatgcttacggtttctagaaaatataacaatgtggcccctttagcttgtttgcttagaacatggcaccagaatttaatggaggcttataccactttaggtacctgtagctttttatttttagtacttcttccaaacactagccaaatcatttgttttttttttccccgaacttttcagtttaaaaattttcaaacctttagaaaagttaaaagaatattacattcaacacctagattcgccagttgttaaaattttgtctcatttgctttactctaggtatatataccttttttaaaatcctcaaccatttgaaagttgtagataccatgacactttatcacatatttcagcatagctctcctaagaatgagaacattctcgtatataaacagaatagcattatcagaaccttgaaattaatagctccattgtttaaagccagttcatattttaaaattctttagttgtctccacaatatctgtttaatctttgtgtttgtgtgtatttaaatccaggatttaatcaaagttcatgcattgtattaggttgataaatcttgtctcttttaatctagaatagtctttccacctttcatttgttttagacattagcctctttgaagagcccaggccagttgtctgggagaatatcccccattttggatttgtctgattatttcctcactttagattcggtctaagcactgggaagaatacttcaaaggaagaaaatgcgagatttgctaaatgactggttttatggcttaacaaagagggaagaatcaatcacctgtgagcctgagatttctagtctgggaagctagaaaagtggtggaagcaatgacagactggggtagtctgaaagggacattgcactaggaaaaggacagtgcattcagttttggactaatgacctttagcgtttagtgtagttgtccttaagtagttggttattctctggcggtaggatgttgtgaaaaagagcacaggattagaaatcaggagactgattatttttcaagctttatcactaattagctttgtggtcttggaaagtcagtatttgaagtgttctatgtggttacctaaaaaatgaagttaatgcacaccttgccctgtcagtctgacagagttgttttgaggatcaaatacaaatgtatatgaaaacactctgtgatacaaatgtatatgtgttcactccatggactcctgtgtaattataagaaggtaatgttattttcttagttcagactaaaatgaaatatttggagttagggctagagaagacaggaaaaggggaaaatataaaactttttgtgtttgaaactcaatcaaaagcatcagaaatctcagtctctgaatacatatgcctgaaaaaccctgaagactataatttgggaggcgaatctggaagctgatcttgtatacaacagttacaagaaccaaaaacacaggttgcatcttgttagatgtcattatttgacttgccttcaagttggaagtataaatgagaacttttgaattctgcctgtgtagttggtccatgcttgttaacagaatttttaaacatttccttcttatgtctgttgctgtgagctatacatttttgccaaaagttaaattaaggtaatgtttcagttgttaaacattgtcagtaaatatggtatgctaatcaagagcacagaccctggaactgcggtttttttgcagtgagccaagatcgtgccactgcactccagcctgggtgaatcttgggttgaatcttagccatgtgcacttgagcaagtcatttaacttctctgtgcctctatttccctatgtataataggagataatagctacatgaatgttgttgggaggattaaacgtagtacttatgtcaagcacttagaatggtgcctggcatatgcaaagtgctatgtaagtgttaatggtggttattagaatatttgtgattttggtagtgacgaaggaataaagtacctgaacaaaagaattcttttcccagaactgatagctgagggaaacagaagtgatacagtagtaaaaatcatggacatcaggagctcgagatcagcctgggcaacatagtgaaactccatctctataaaaaatacaaaaaattagccaggtgtggcgcatgcctgtagtcccagctacttgggagcctgaggtgagagaatcatctgaacccaggaagtcaaggctgcggtgagctgtgattgtgtgtttctgcactccagcctgggcaacagagtgagaccctatctcaaaacaaacaaacaaacaaacaaacaaaaacaacatggacttcagagtcagacatgcctagatccaaattcaagttctcccactttgtggtttaagcaggccacctagcccctctgaagctcactttcttttacctatgaaccagaaatcacaatccctatcttgcagagttgtgattattaaatgagctgatgtgtaaagtgcctgacactgaggtgacactaagaaaatgagagcgctctggatccctcccaccccccaccaatgtaaagcaatacatacagttcaatttcttgtgtgcagtcttattcatttgtttgtaattttaggacttccaaaatcatttccatttgctaacagcagaagaaacagtggctgtataattggatacaccttgaaaagtgtattgtcagctttgtttccctcttccatttgctgtttggggttatttgttttattattacagcagatcctactggaaccaagatggtagacactgttaatcagtctattattaatctattaataataggcattgttaatgattctgttattaacagagtcgaactggaatgtagcctcaggatccttttttttttttaattatactttaagttttagggtacatgtgcacaatgtgcaggtttgttacgtatgtatacatgtgccatgttggtgtgctgcacccattaactcttcatttaacattaggtatatctcctaatgctatccctccccactccccccaccccacaacaggccccggtgtgtgatgttccccttcctgtgtccatgtgttctcattgttcaattcccgcctatgagtgagaacctgcggtgtttggttttttgtccttgcgatagtttgctgagaatgatggtttccagcttcgtccatgtccctacaaaggacatgaactcatcattttttatggctgcatagtattttttttttttttttgagacggagtctcactctgttgcccaggctggaatgcaatggtgcgatctctgctcactgcaacctctgcctcctgggttcaaacaattctcctgcctcagcctcccaagtagctgggattacaggcacttgccagcatgcccagctaatttttgtatttttagcagagacggggtttcactgtattggccaggctggtctcaaactcctgacctcgtgatccacccacctcggcctcccaaagtgctgggattacagatgtgagccacggcgcccggcctcaggatccttcttcacagtattctaggaagctacaatcagttcatcagagttgatatagctgtgaaaactggtttgtccttcctgctttagaactttctagaagaggccaggcatggtggctcacacctgtaatcccagcactttggcaggctgaggcgggcggatcacgaggtcaggagatcgagaccatcctggctaacacggtgaaaccccgtctctactaaaaaaaaaatacaaaaaaaatagctgggcatggtggcgggcacctgtagtcccagctattcgggaggctgaggcaggagaatggcgtgaacctgggaggcggcgcttgcagtgggctaagattgcaccactgtactccaacctgggcgacagagcaagactccatctcaaaaaaaaaaaaaaaagaactttctagaagaaatgtttgttggattatcaaaatattatatggattgtccattaatcttctattctgtgatgtgcacgtgtcaaaccttatgacaaggcagggtggtcttgtagcattttctaacagatacttatctatattgtaacgttattacataatgtaggcatcttcggacacctactggaggaggtgcaataattgaaagattataatgcaatgatctaaccaagaatatgcatcaaagttaccggggatatagtcttaaaaaacttatgcccaggaccccaccccagatttattcaattagaatcttcaggaggcagaccctgccacgtacattttgtaaaagtactccagatgcttctgctatatataccacttgttaaaaataagtagatactggcaaaaaagtcaaacatatttacaagaaaaaaacaaccccatcaaaaagtgggcgaaggatatgaacagatacgtctcaaaagaagacatttatgcagccaacagacacacgaaaaaatgctcatcttcactggccatcagacaaatgcaaatcaaaactacaatgagatatcatctcacaccagttagaatgacaatcattaaaaagtcaggaaacaacaggtgctggagagggtgtggagaaataggaacacttttacactgttggtgggactgcaaactagttcaaccattgtggaagacagtgtggcgattcctcagggatctagaactagaaataccatttgacccaggcatcccattactgggtatatacccaaaggaatataaatgatgctgctataaagacacacgcacacatatgtttatcgcggcagtactcacaatagcaaagacttggaaccaacccgaatgtccaacaatgatagattggattaagaaaatgtggcacatatacaccatggaatactatgcagccataaaaaatgataagttcatgtcctttgtagggacatggatgaagctggaaaccatcattctcagcaaactattgcaaggacaaaaaaccaaacactgtatgttctcactcataggtgggaattgaacagtgagaacacttggacacaggaaggggaatgtcacacactggggcctgttgtggggtggggaaaggggggagggatagcattaggagatatacctaatgtaaatgacgagttaataggtgcagcacaccaacatggcacatgtatgcatatgtaacaaacctgcacattgtgcacatgtaccctagaacttaaagtataataaatatatatatatatatatatatatatatataaagaaagaaattacaataaaaaaataagtagatactggcaactatagagaagcacacactattggtatgagagttcattgacatagtataacctatagaacaattttacagtatctcaaaatttcaaatctgtcctatagaaatatatatgtgcacaaaaacagagtttagagaatgtttcaggccaggcgtggtgactcatgcctataatctcagcactttgggaggctgaagcaggaggattacttgagtccaggagtttgagacctacctgggcaacatagcaagaccctgtctctatttgaaaaaaagagtaaagaaaagaaaagaaaaataagtaaaaaataaacgaggttttctgcagacgtatttattatatcaaacaattgtgagaaactgatgatcagtacataaatggttaaatacaaataccacgtttgtttactatgcaaccatttaaagaatgaatatgtatgaaaattgtctatacatgctgatgtagaagtatatctaggatatattgttaagttaaataagcaagtcacagaataagccctattttaaaaatttatatgtaaaaatgtagagaaagatgtgaaagtatacccatcaaagtgtttatagtggttgtcttggcatagaagagtgggaataatgaagtggggacaggaacaggccttttcactttggtgtttaaaatatttgcaggccagtcgtggtggctgacgcctataatcctagcactttgggaggctgaggcaggtggattgcttgagcccaagagttcaagaccagcttgggcaacatagtgaaaccctgtctacaaaaaatacaaaaattagctgggcgtggtggtgcatgcctgagtcccagctactggggaggctgagatgggaggatcacctgagcctgggaggttgaggctgtagtgagccatgattgtaccactacattcaagcctgggtgacagagtgagattctgtctcaaaaaaaaagaaaaaatgcaataacattttattatttttgtaataaaaacaaccactggacaaaatatgaatgattttaaaggaagctcttatggaagcagattgatatgtgtcaggacactgcttattttgcaaacaccagttttaacctgagacgatctctaacttgggaaataaaaaggaatgtcaaaactatttcgtgtgttggtggtgatgataaaatcttgttgccacagttgttgtgaaagtaatcaggagtttcaaacagataagcattgaagataaaaggtatttgccctgtgtcagaattatatcagttatctgttttagaaatatttaatgtctatgcatatctggatatgaaaattgagttcaaaacattttagtttaatcctttttcagttgattagcctctagcctatgagaatagtaacaccttctaatcccctcttttataattttaggcccgatgagagaaagggaaagttaaggatgctggagcagaacaatggatttctctttctctttcatgcaagggatcatgggaaacacaattcagcaaccacctcaactcattgactccgccaacatccgtcaggaggatgcctttgataacaacagtgacattgctgaagatggtggccagacaccatatgaagctactttgcagcaaggctttcagtacccagctacaacagaagatcttcctccactcacaaatgggtatccatcatcaatcagtgtgtatgaaactcaaaccaaataccagtcatataatcagtatcctaatgggtcagccaatggctttggtgcagttagaaactttagccccactgactattatcattcagaaattccaaacacaagaccacatgaaattctggaaaaaccttcccctccacagccaccacctcctccttcggtaccacaaactgtgattccaaagaagactggctcacctgaaattaaactaaaaataaccaaaactatccagaatggcagggaattgtttgagtcttccctttgtggagaccttttaaatgaagtacaggcaagtgagcacacgaaatcaaagcatgaaagcagaaaagaaaagaggaaaaaaagcaacaagcatgactcatcaagatctgaagagcgcaagtcacacaaaatccccaaattagaaccagaggaacaaaatgtaagttgaaaagtcgttttgaaaaattttgttatatttcacatttactggaagttcaagagatctttttggtttttatctctttaaatatgaatctgtctgataacttctttaatcactagcaacgtgctcagaatattataataggtgctgagtatttgttgaatatatgaatggacatgattagttaagaaatatttttaaaacatgtaaaacgaatctttctgcttatgtttctttgtcctgatgacctcggttatttttatttgcttacaatagactgttggtttttgaaaatcaagaggaaaggcaaagagaagatagctaattatattgggttttcattattttagaccaactttttccagtagagcttagatttaacactcattgctaatgtttgctacaaaataacctgaaataatagaaatctttttattaaaatcagagttagtattaataaatattgattaaaacttcaggtgagtttttataaaagtcatcctttataggtaacttaagatatatgctgctgaattttttaatatctgagatttcagcgtgaatttgcttagcaataatataataagtatgtaacataattctagcttaaatgaagagttcataatataaattgcaaatgttttctaaactttgacttgggaaaactatatttatttttatgacagctatctgcttttatatgtgttatacctgaataagttaatttattttctgttcaaagaaatgtttacttcttacctattcatcttttccttggtagctggcttctattacttcatacaactcacatgtgatgtttttctggagtaaaggtcacaatgcttctagactctcacaagtcccagtgtgacatttcaacatgttttctcactttttatagttttcttatttattcattaacaaatgttggtgaaatgctcctcctactgtgtgctaggcaatgatctaagacttaaaggtatgacaatgaatgaaaagtagagatgcctgctctcaggatgcttatattctagtgaggggagccagaaaatacacacacatatacatatatatatacacatatatacatatatacaatatatatttatatatacatatatatacatatatacatatactatatatactatatacatgtgtatatacatatatacatatacatatactatatatactatatactatatatgtatatatacatagtcttcatagcatctaaagctaacttatgtacacacatatacatatgcatatatacataatacataggtatgtatatacatatatgtatatatacatatatacatacatatgcatacatatatgtatatgtgtgtacataagttctcatagctttagatgctatgaagacaataaaactgggtaatgagataaagagtaatcagtgatgtttctagtagtcattttgcaatgagattctaaaaccagttctgtctctgttagatgtctgctatacctagttctttatatcacctaaaccttcagttaactattatagctcaggattagaatgtttagattttattttattttattgtttttgagacggagtttcactcttattgtccatgctggagtgcagtggtgcaatcttggctcaccgcaacctccgcctccagggttcaagcaattctcctgcctcagcctcccgagtagctggggactacaggcataccaccacgcctggctaatttttttttttttttcaagtagagacagggtcatgttagtcaggctggtctcaaactcccgacctcaggtgatccacctgccttggcctctcaaagtgccgggattacaggcgtgagccactgcgcctggcccagatgtttagattttaatttaagggttttaattcattttcccttttattgaatcatgatgagcaaaatttactatttgattgtttaggatcttacaatagcttgggataaaggaatatcaacttgaccaaaagtatagctggagaaagtggcattgactgcctggaatattactaggagcattgcctgaaagtcgagtcttggggggaaatccaggtttttttcttgttcgttctctctctctctccctctctccctgtctccttctccccctcttcctctccctccctctccctgctcccctctctgccccattcctccccctttccatcctaccccctcgtcccttcccccttccattccttccttcttctctcccttcttctctgcctctctcctctctctctctccctctccctctcaccccttctttcttcccttccttcaaagaagtaaagaggtaagttcttgttaattgaattttgattaattggaactgtatcacacacgggggcagttgtagaagttgtagtccattctgaccacagaccttcaaagccagagctcccacagctcttgcctatcgttaatgtcatgcttttgctaagctagagatgtgtataaattaatgtttcacaactgcatatatttttaaattagatttccttaacttgaacaacatctacagtgcttccttcaggacagttgttttaagtgttttaatagtcaataccctatgcctactggttgtccataggggtcccagcccttggtgtttagcattgtagagaactgagaagtgaaaaggaagcccaaagaagcatccactgacttcactggacagcttccctcccccagatgcctcagggaaacataatgaaaaatgtattcctggagaaaaaagtctgatttaaatctcctggagctggatttgcttttatatagattttttcttttactttactttgttgttgttgttccttaaaagctcactcataggttcataggttcttttttgagcaaacaaaatctcatatagttgagttccatgtttaagtccgggcatggtggctcaatctgtaataccagccctttgggaggctgaggtgggtggatcacttaaggtcaggagttcaagaccagcctggccaacatggtgaaaccccatctctactaaaaatatttaaaaattagccgggcgtggtggtgggtacctgtaatcccaactattcgggaggccgaggcacaggaattgcttgaacctgggaggtggagattgcagtgagccaagatcatgccactgcactccagcctgggtgacagaatgagactctgtctgaaaaacaaacaaataaaaaaacacaacaccttaagatttcacctgctactttttttcttagtacttgatgtgtaagtatttccccctaattctaagctgtttggccttctgaagagtggctgttatttggaacaacctaagtatatcttctcagcaatgaaaatgtgtccaaacatctaggcagcaggagacctgagatcactactgaaattgtatattttaaaaatctgcatgagctgtttttcctcccaccaaatcagaaatatgtggctgtgtttctgcatgtcttcctccttggcaggtggaatgcctcaggcatgtgagcgtaggccctattattcaaacagtcactggtctcctatcagcacttcagtgggctaatccactaaggcagagtctcattaacccttagtttgccatatccccttataaaaagcagagtggctggatcagtcccgtgaacactaaggtagcaggtttggttctctagcctcagagtattaggccttaaaattcttagaaactctttatatgcaaaatgttctttattgtacacattttttatttgattttatgtgtttatttttgagacagaatctcactctgttgcccagggtggagtgcagtggtgcagtctcggctcactgcaacctctgcctccaggattcaagcgattatcctgcctcagcctcctcagtagctgggattacaggggtgtgccaccacgcctggctagtttttgtatttttagtagagatggggtttcattatgttggccaggctggtcgcgaacccctgaccttagggtgatccacccaccttggcctcccaaactgcttggattacaggtgtgagccactgcacttggcccacattttttatttttaaggttacaaacttaagtcattcagaaagtaaaataaaaatgcacaatttattacctttaaaattttctttccaactttaatgttgacatcagttttttgttcttttagggactatgattttactctatgtttttgaaatttatataagtaatattattaaggctttgaaattctgacagatttgatgtgtattactaatcttttttttttgaggcagagtctctgtcacccaggctggagtacagtggcacgatctcggctcactgcaacctcttgcctcccgggttcaagcgattcctatgcctcagccccccaggtagctggaattacaggtgtgcgtcaccacactcagctaatttttttgtgtatttttagtagagacggggtttcgccatgttggccaggctgatcttgaactcctgacctcaagtgatccacccaccttggcctcccaaagttctgggattacaggcgtgagccacggcacctggcctgtagtatactcatcttaatgaatgtcttgggttttaataaaagtaataggctgaaggccgtggtggctcacggctgtaatcccagcactttgggaggccgaggcgggcggatcacaaggtcaagagatcgagacctcctggccaacatggtgaaaccccatctctactaaaaatacaaccaggcgtggtggcgcgtgcctgtaataccagctacttgggaggctgaggcaggagaatcgcttgaacctgggaggcagaggttgtagtgagccgagatcatgccactgtactccagcctggcaacagagcaagactctgtctcaaaaaaaaaaagtactaggctaaaatttgtaaaggaatatttaggataatgtaatttattttagctactcttaacataatttttaggtgttcttatgtggagtcaattaaaaatgtaaaaaagtggtatatacccacaaaatcataattttaaaattaagatgaattgaacattaaggagagctaactcactgtcatctttttctctgatgttttctctttctgacaaagcagtggaattagtacccaaagagggtatctctgtccctacttaattttaatgtcttaaacttgtctctgtctctgaatgcctaccaggtatatctgttttgctcacgtacattttataatagatactccctctctattattgcagcatccttacttgaattctttttcttctcttacttatatagtcttgaaagcttagaataaatcctcttgggcatccttcgctccctagccacttatttcttttaaaatgactgtgtaaaaaactttaattctttgaaagtgattttgatggtgtttcaaaccagcctgaaggaaacaccaacaatctggaacaaatcaaaaaattaaaaaagataagacatttgaattataagatttggaaggaagtccttttttttttgtttttttggagacagggtctcactctgtcacccaggctggagtgcagtgacgtgatcatagctcacacagcctcaaactcctgggctcaaacaatcctcccaccttagcctcccgagtagctgggagtatataggtacacatcactacgcctggctctttttttatagagatggggtctcgccatgttgcccaagctgttcttcagttcctaggctcaagtgatccacctgccccagcctctcaaagtcctgggattataggtgtgaaccactgtgcacagctggtaccgtttttaacctcaggtatctcacacatgctactccttcctcctggaatgttctttcctccatgtttactaagctaattcttcgtcctttgattcttagattgtaatttttctttttttttttttttgagacggagtctcgctctgtcacccaggttacagtccattggtgtaatctcagctcagtgcaacctctgcctcccaggttcaagcaattcttctgccttagcctcccaagtagctgggattataggcacccaccacagtgcctggctaatttttctatttttagtagagacagggtttcaccatcttggcacggctggtctcgaactcctgaccacgtgatttacccaccttggcctcccaaagtgctgggattacaggtgtgagctactgtgcctggcagattgtaatttattttcttagagaggcttttcctgaccttcatatctgaaaatacatatacacttacactattatttatctttctcttcctagcacttactttttttgtttgttgttgttgttttaagagacggggtttcgctccatcacccaggctggagtgcagtcatagcccattgaagccttgaactctgaggcataagcggttctcctgcctcagcccctcagagtagttgggactacaggcatttgttgtttttaggtactgggcctcactctgttgcccaggctggtcttgaactcttggcctcaagagatcattccaccttggcctcccaaagtactgacaggtgtgagccacaccatgccgagccatagcacttactttttaactggatgtttgtgtttctgttttttaatgtcagtctctcctgcccagctgtaaactccttggggtcaggaatcacatctgtttgtttcactattatatatagcctatatagcttctagaactgggcctggaacgtcctaggcactgtgaagtgaatgatacttgggtttggggacattagtctggcttatagaacatatcattttcctaaaacttaaaaatctttttaggccaggtgtggtggctcacacctgtaattccagcactttgggaggccaaggcaagtggatcacctgaggttaagagttcaagaccagcctggccaacatggcaaaaccccgtctctactaaaaatacaaaaattagctgggtgtggtggtgcgggcctgtattcccagtttctcaggaggctaaaggaggagaaccacttgaacctggtaggcagaggttgcaatgagccgagatggcgccaccacactccagcctaggcaacagcagagtaagactctgtctcaaaaaaacaaaaacctttttatactttttttaatttaataaaactttgttttcacaacagtgtctttaaatgttttgaaataatagaatgagaattttaagtagcttttagaattaatcatattcttttagtggagtgaagacctactttaatggctataccctctttttaagccatctaaattaaattctgttctctaacaagtaacatattttaaaaatcttttaaattgtagaagtaatttggttttttttttacagaaaagacgaataataaaaaggtatagaatatcttccttcaccatttccctcatgtcattcccaaaagataattactggtatcaattttgtttacattgtaccaaatattttcaaggcatgtataaattacatatttttaaataaaaaattggaagatattggtagacatgcagattactgacatgaaataatactgtagttaccattcctctgcttagattttcttgttttggatatttctatagaataaatttctacaatgtgattgctagatggaagagtgtacatatcttgaattttgatagctacttccaaattgcctccctaaagggttttagaaacttctttctttccttttttttttttttgagatggagtcttgctctgtcaccaggctggagtgcagtggcatgatctcggctcactgcaacccccacctcccaggttcaagcaatcctcctgccccagcctcctgagtagcttggactacaggcgcacaccaccacacccagctaatttttagtgtttttagtagagacggggtttcaccatgttggccaggatggtctcaatttcttgatctcgtgatccacctgcctcagcctcccaaagtgctaggattacaggcgtgagccgccatgcccagcccatctagattatgtttaatacttagctcttgtaagtagcaatggtatgcatatcttcatacttatccatattttttacatctctcagtgcttttcaaatatacattcttagaagtagatttgcaaggtcagagtctgaaaatttaatgtttttcatatatacaaccaaattgctctcagaaaagtttcaagttacatcttactagtaatcttagagtgcccattttttctagaatctgagcattaaaaagaaaattaccagtttatttagaaattaagtgggttttttttttgttttttttttttgagacagagtctcactctgtcacccaggctggagtgcagtggcacaatctcggctcactgcaacctccgcctcctgggttcaagtgattctcctgcctcagcctcccaagtagctgggactacaggcatgcgccaccatgcccggctatttttttaatttttagtagagacggggtttcaccatgctggccaagctggtcttgaactcctgaccttgtgatctgcctgccttagcctcccaaaatgctgggattacaggcatgagctactgcacccggcctagaaattaagttttaaaagtaacaaaataagaaaaaggagataaagctatgatatggggtggaaaatgaatgttgagacagcattaggtattgagtaagttgtattcttactccttacattgttcagttaataaatgccctttattctctttatttagttttctttgattctttttatgtatgtcactgttttttgtttgtttgtttatttaatgccattttattctacttacctataccttttcacctagagaccaaatgagagggttgacactgtatcagaaaaaccaagggaagaaccagtactaaaagaggaagccccagtaagttgttttactgaatactgtctaaccaaatatggtggaagaaggtgaaacacagtgattgaattgcaacacaattgtattggtactacgcttcttaatttcagaaattatattgaaataagtcttggagctggtttgataggtggatattttcagtgaatcattttccttttcaaaactatgacctgtttttttttcaattgatcatgtgtattttttttttttttctttttgagacggagtctcactctgttgcccaggctggagtgcagtggcgcaatctcgactcactgcaacctctgcctcctgggttcaagcgattgtcctgcctcagcttgccgaatagctgggatgacaggcacgtgccaccatacccagctaatttttgtatttttagtagagacggggtttcactgtgttggccaggctggtctcgatctcctgaccttgtgatctgccctcctcaccctcccaaagtgctgggattacaggcgtgagccaccgcgcctggccgatcatgtgtattcttaacatgccttgttaataatttggcaacagaaaccatcaatcctatcttcagtatttggggtggggcttattaatatttttcctccttcccttttgctagttttagataggaggcatcagagaaaagtataattgaagataaatttacattgttagcacttttaatgtactttatacatagtttctttttttgaatttctgatgttttttgaccctttcctgtatcaaagtataattgaagataaaattacattgttagcatttttaatgtactttatatctagtttctttttttgaatttctgatgttttttgaccctttcctgtatcaaagtataattgaagataaaattacattgttagcatttttaatgtactttatacctagtttctttttttgaatttctgatgttttttgacactttcctgtatcaaagtataactgaagataaaattacattgttagcatttttaatgtactttatacatagtttctttttttgaatttctgatgaagttttttgaccctttcctgtaggttcagccaatactatcttctgttccaacaacggaagtgtccactggtgttaagtttcaggttggcgatcttgtgtggtccaaggtgggaacctatccttggtggccttgtatggtttcaagtgatccccagcttgaggttcatactaaaattaacacaagaggtaagaaaaggcataaacagatactaagtaaaaggttggaaataaaagtgacttttaaatgttgtatgtgaatataagaatacacacgtaatatataatctgatacaaaaatgtgcatatccgtatcagttttgtggattttttttttttctttttttttttgagacggagtttttgctctgttgcccaggctggagtgcaatggcgcaatctcagctcactgcaacctccgcctcctgggttcaagtgattctcctgcctgggcctctggagtagctgggattacaggcacccgccacaattcctggttagtttttgtatttttaatacagatgaggtttcaccatgttacccaggatggtcttgaactctcgaactcaagggatgcacctgcctcggcctcccaaagtggtaggattacaggcgtgagccactgcgcccggcctctgtatcagtttttaaaaccagtgaaatactgatagtcattttaaattgcagagtgcttctatggctaatgcagtccttgtttcccttatgataccctacatttgcttataatttgcttacacttgctttttttaaagaccttaatctgactgaaaatatgacctcatatttcctaaagaaagcatatggacaagcgatcagatgttttatatgaacttaataagcatttgcgccaagccttctttgaacatttttatttcatcgttgactgctatggatagtaattttttacccagacaagtacttttcatcctggcaaattttgcaggatgcttttttttcctctacactccattcttgaatcggtaaatttactggggcatccttgtaaatttgatatgacatgtagcctgaaggttgctatataatatagaatcctaccttaggaatgttaataaaaattaagaaagacaattctaacttttctctactccttttctgggatttgaccaaagaatgatgtggagtagattgctgagattctagcatttgaaatgaacttgcttagtagccaaagaaaggtttgagcttggaacttacttctgggtgttaactttgtgaattgactcttgtcatgtgtagagttcctcattgtctgtgacaagtttgtacctgtttctttttcttttactttaaaccatctgtcttggtccttgttcactcttctgaagggaaaaagtatctctttatgtctggcaaggcacatttgtgataggatcagccatatctgtgattcttgtgctgcataaccaagaatctctcccagtatagaaggccatctggctcaaccatttttcgtcttgtcaatgtgacctgctgattaaaggttaggagacgggatgtgtcagcgaggcagaagtgaaaaaccagcattgttgggtgtctgctttagtgcaaggtcctgtgttcagtagttctcttatatattttcttatccaatcctcatagcagcaacacagtgaagtaggtacttttattatcccatattttaaataggtaaacagaatctcaaagaaatcttaatttcataacctctcctcctaaacactgccttatattacagggaaagcagttaaattcacctagtcatcatttacagaggttggaggaggcagtcttattatagttccttcatttatataagaagggtattggactagtcatctctgaagtaccctacccctctaataatctatggttatatgagtgggaaaagaaaagacaaggattttccaagaagaccatgctttcttaaataaaacaattcatgtccacatctaggcctccagaactctctaagaagttacatcatgtcagaactctggatcttcacttctgtcccctgaggaaagcatactgttgagattatataaagagtttcatattcaattactttatgaaaacctgcagatttcagcttttttcaagatacaaatgaaagcacaatttatgtctcatctgtatttcaaaggaagtatttacatttagttttattaattaacctaatctcagctgggcaaggtgcctcatgcctgtaatcccagcactttgggaggccaaggtgggtggatcacctgaggttaggagttcaagaccagcctggccaatatggtgaaaccccatatctactgaaaatacaaaaattagccaggcgttttggcgcatgcctctaaggtctcactcaggtgactgagacaagagaatcacttgaacccaggaggtggaggttgcggttgcagtgagccgagatccaccacttcactccagtctgggtgacagagtgagacttggtctcaaaaaaaaaaaaaaaaaaaaattctagcctggtacccccaggcagtttcctactttagtgctggaaaaaccgattttgtttatattactaccagaagtctgaaattttaggttaagaaatgcatatattttaacctatatattttaataaaaatttaaattatttttctatagtagttttaaaaactttattgaaatataattctcatatcataaaattcacctgttttttttgtttgtttgtttgtttttgagatggattgttgcccaggctgtagtgcagtagcacgatctcagctcactgcaacctccgccttccaggttcaagcgattctcctgcttcagcctcccaagtagctgagattacaggcacccaccaccacaccggctaatttttttttttttgtatttttagtagagacggggtttcactgtgttggccaggctggtctcaaactcctgaccttgtgatctgcctgcctcggcctcccaaagtgctgggattaaaggcgtaagccactgctcctggccaattcacccttttaaaatgtacagttcattgatttaaaaatctgtacattcacagagttgtgcaaccatcaccacaatctattttagaacatgttcatcaacccccaaaaatcctgtatccattagcagtcaccctcatttctacccgctaagcagccagtaactactttctgtctctgtagacttacctattcatctggcttcattcacttaccataatgtttttgaggttcatccatgttttaacatggtatcagtgctttattcctttttattgccaaataatattccatttatggctatatagtatagttttaaatgcagtagttttctgacagtttttctgaaaaccaaaaaaacacagcctaaaaattctgttaattatgttccacgcatgatgcctattaagcattttatgctgatcattacttttttaatagcacatatactgcatgtatacatgggagatacccagagaaatgagtgaatctcctgtgttgctttctatctaagcaactttgtaaaatttatcttaatcatatatagtaatcactggtttccatattgttattagtcagtattttttttttcttttttttgagacggagtctcgctctgtcgcccaggccggactgcggactgcagtggcgcaatctcggctcactgcaagctccgcttcccgggttcacgccattctcctgcctcagcctcccgagtagctgggactacaggcgcccgccaccgcgcccggctaattttttgtatttttagtagagacggggtttcaccttgttagccaggatggtctcgatctcctgacctcatgatccacccgcctcggcctcccaaagtgctgggattacaggcgtgagccaccgcgcccggccattagtcagtatttttattagattcttagcactggaaaatgtacttaacagtttttcacacataaagatgtaataattatttgtaagagcatgttgaaagatgtttggatcacaattctattttaagttgtattttattatttaggactcattaaaaatttagctcttcagtcagagacagatgtgcttgtttcttgacttttcaggtctgtagcttcttatttcagtcttatttcatagttttccaggtgtcaggaaacaaagtgctaacaaataggcaaaatgtttgtcttgtttcctctctagtaaatgatttaatgggggaagaagttgaaaatacagattaaaatgaaattgtgttatctataaatttcggcttttatgttaagtcctttgggattatctgttcatatctgaagaaataactctgatgtttggaaacattatgtactatgtttttttaatctgaatacctgtacccactaccctgtccttgaaattcacttattagtttaggttatatttctatttttccccccaaaaaccctttggatttcagataaatcttctttgactaattataattagatttgtgcttgggtctttattctcagatgagatgatatgaaaatctgagtccactgttgcctttttcttcctaattactttgggttctctgaaaagatcagttcctgcatttctccattgatctaatactttttctctagaacagtatttttcagactatttttcgcaaaagatcagtttttttttacttttttcaaatgtctagtctactatgtactaatacctctgtaaaatacaaccaaacttaattatttaaaaaaaaaagaatgcccttcccctgaaaaaacacctagtgcaagattcttgatcatgtgtctagatatcataacaatgtcaaattgctgtcagagcttctcaatgcttactcaacttctgtacttacttttgtcccagactggcttgtttgtcaaaccaatttcagagtagcattgcccttaatcagcagttctcagatgttgtggtcccaggaccccttttactcctaaaacttgaggactcaaaaaggcttttgtttacgtgggttatatctaatgttatttaaatttagaaattaaagctgagatgcaggcgcagtggctcacacctgtaattctaacactttgggaggctgaggcaagaggattgcttgagcccaggagttcaagaccagcctgggcaacatagcaagaccccatctcagtttaaagaaaaaaagaaattaaagctgagaaaatttcaaaatatttattgatttatttaaaaataagaacctatcataggctggggccagtggctcatgcctgtaatctcagcactttgggaggctgaggcaggaggatcacttcaggccaagcgtttgagaccagcctgagcaacatagtaagactcccatctctacaaaaaaaagcaacaaaaaaatttattaattaactgagcatgtggcatatgtctgtagtcttacctgctcaagaggctaaggcacaggattgcctgagcccaggagtttgaggctgcagtgagctaggatcatgccactgcagtccggcctgggccatagagtgagaccatgtctctaacaacaagaactccttacatgctatcattaattatatttttatgaaaaatgactattttgttaaaaagttaatgagaagaatgttattttgttttgttttgttttgttttgttttgagacaagagtcttgctctgtcacccaggctggagtgcagtggtgcaatcaattatttgtggtgatttttacagtagctattagttctataactggtgggtattggaacatatctttggacaatccaaacatacaagttttagtgggagtaatactgaggaacctgggttagattcccatttttggcaaagtagatgtgaatgcttatgttctgaaatggttaataagaatttttacttacaggtgcccgagaatatcatgtccagttttttagcaaccagccagagagggcgtgggttcatgaaaaacgggtacgagagtataaaggtcataaacagtatgaagaattactggctgaggcaaccaaacaagccagcaatcactctgagaaacaaaaggtaactaacatgttaatattatttacctagtatggtttttaaagaacttaataatttagaagaatttttcatacttgaattcagataattattagaatcctttttttaaacccctttcagctgttttaatcgtaatggtaaatgactagtaagtttgtaagtacaccaatgagttttatatgtcatataaacgacgtatagtactattaaaaactttagctacctgcttaatattgaattctattgtgagtttcattaatgtgcataagtgtaccagatgctagtgaaatgtggatttttgccagggatttttactcttttttctatttcagcatgtttccataatttcttttcattcttgtttaacaaaattgttttatgaaagtaaacttttaaaaatatttaatgagtgcctattgtgaaacaggtatgcttttaagcattttacatatattaactcacttattattcataacaacctgtatgaggtagatactattattcccctttttacagatgaagaaattgaggcacagaaagcttatgtaactggttcaaccgagatcacacaagtgatggaatcaggaaatatatttgatgtggtggtggatattttagaattttgacatgaactcttggtaatctggttaagagtttaaactcaactaaattagtgtgggtctcttatgattcagaaatttgtcattttttacacttgaaaaactaaattttatcacagaattttgattaattttatgagacttacattttacagatttatatatgaatatttgacatatgctatctcatagttttattaactaatttctggctacatcagtctagccacctggataattcctaattgctctggccatctcacacatctttattcaaagtatttttacccctcttgccaatccaaagtcttctgattgactctggacctagagacctatggaaactataattcaggtctaccttttttctcatccatgcctgttctcctttgtcttgttaattttcatttgttccttgaggctctgtcctttcacttcattctgtccctgcatgcattgtggttcaaactctgccagtagctttgttgtgatctctgtagcacccctgacttgccctctgcccgagatatgggagagaattgggagtttcagggtatcatttttaatgttagtgttttattagccactgaaaataaccatttctgtaatcattgttctcttttccctcattatcactagctttttatgtatatgagaggagaaggatgtctccctcttggggaccttgtccagcagagtgatcagcaaaggaaggatataaaagagagtagatcctcatgttatcgaatatctttttatcagaattatggagatagaacattccacttgtttgaccaaagaacctgaagatatttatgtagacctgaaaagataacaggatcacatgggaaatacatatcaattttaatgtacctattagagtaaagcatgtctgataatctctatcttttttaaagattcggaaaccccgacctcagagagaacgtgctcagtgggatattggcattgcccatgcagagaaagcattgaaaatgactcgagaagaaagaatagaacagtatacttttatttacattgataaacagcctgaagaggctttatcccaagcaaaaaagagtgttgcctccaaaaccgaagttaaaaaaacccgacgaccaagatctgtgctgaatactcagccagaacagaccaatgcaggggaggtggcctcctcactctcaagtactgaaattcggagacatagccagaggcggcacacaagtgcggaagaggaagagccaccgcctgttaaaatagcctggaaaactgcggcagcaaggaaatccttaccagcttccattacgatgcacaaagggagcctggatttgcagaagtgtaacatgtctccagttgtgaaaattgaacaagtgtttgctcttcagaatgctacaggggatgggaaatttatcgatcaatttgtttattcaacaaaggtacctccttttttcgtggagttttttgggggatggtattttaaaagtggtcaaccttggcatttaaaacaatgaccttggcataatttaaataccctttctacccactgaatttgaaacatacagtcattgtactctgtgggcaaaaaagacaggcaaaaaggctatgtttttcttcttttttatccccttcttttgtgattttcccatctgtagtagattagtcttgagctgtgcagccaaaattgagcttagctccctaaagtcatggaaaaaaactgggcactttgcctgtttctagtttgcgtagttagcttttcttagttgcaaagtgtacttcttattaaaatcatttttgtcaattatatgaattaaccattgttataaaaaccactgtaataattgtacctgctgacctgtttggttccaccagcaattttgttagattcttatgggcttgcgatatctaactgcctttcagagaatcccagaactgtgtttgttctgtaacaattagctgtggcaataacttgggtaatggggtaaaaacagcctctacaaactgtgtgccttcatcagtttgtcctgggcctccatttagggcacttatactttagcttgaagactttaaaactcttccataatattggtaggtatttattccgtgtacctcttcactaccatcccatcccatcccactgtgttgagtttgtgattctgatttagttgcatttcattcatgtgtattaaagaattctatgcttattttttcctaatatagtcatatgcagattaattagttaaacaggggaatgcttaattagtaatacatcttcctagagaaatgtcaagggtgctcttttaacctggtctgcccataggttcagctgacttcagttaaggccaagctacctgcaaaaacttgaattgcagtccccacttggttctcttgatagcaaatgaatatttttcatctttcaaatagcaaatgagtatgttgcatcttttttgagtacaaattggctttattcttggagctagttttactgcttctgatgcacaagtcaaactttgtcactaccaccccaaagaatgctatttaaaggaaattcaagataaaactgatcttttcaaaatgaagactctaaaaatatatgcatgtatatatttatatttatttttttcctttttaagagatgaggtctcactctgtggcccaggctggagtgcagtggtcaataatagctcactgcagccccaagggatcttctgccttggccttccaaagcactgagattacagtcatgagccactgtgccagaccttttaaaaattttttgtagagacagggtctcactatggtgcccaggctggtcttgaactcctggcctctagctgttctcctgcctcagtctcccaaagtgttgagattacaggcaggagccacggtgcctggccaaaaaaatacatatatgtttataaatcacttctttacttctattccattgcattaaaaatacctaaaaggagacctaagttaattatacctgccttctttctgcttcggattacttattgggtcacattttggtcaccatgagtgacatatttctgtatctaggggtattcttgtctcttaagacatattggcatttttttctgtgtaatagagcactttaccaaatgcaaatgactagagttctcttactgtgatatgtataaagaccagaaaatattttgtttttatagaaaattgagtgatacaggtatattttttagtgacatttatcacctagacttagacaaatactctacctcacgtgatcttactgtgcattttaaaatgtatcttggaattagctgggcatggtagcacatgcctgtagtcccagctactcgggaggctgaggcagaattacttgaacctgggacgaggcagaggttgcagtgagccaagatcacaccactgcactgcagcccaggtgacagagccagattccatcttaaaaaaaaattttttttggccgggtgcggtggctaacgcctgtaatcccagcactttgggaggccaaggtgagcagatcacctgaggtcaagagttcgagaccagcctggccaacatggtgaaacctcatctctactaaaaatacaaaaaaaaaaattagcagggcgtggtggcacgcatctgtattcccaggtacttggggaggctgaggcaggagaatcacttgaacccaggtggtagaggttgcaatgagccaagatcacaccatgcactccagcctgggcgacagagggagacttcttctcaaaaaaaaaaaaaattgtttttaatttttaaaaaaagtatcttgatcacttaatcaaatttctgataaaggctaagataacttaattgcaatcaaagaccatataaaatttaagcaaattatgatcattttaagccatctttataagcccatgatgccacttgcctggtaatcacctgttttgttgttttttcttttgccttattttaaagggaattggtaacaaaacagaaataagtgtcagggggcaagacaggcttataatttctacaccaaaccagagaaatgaaaagccaacgcagagtgtatcatctcctgaagcaacatctggttctacaggttggtatgaatgaaaagtatatataggtccattttgagaaatccttgttctgttctgctataatgtggtagctgtgtttctaagaaactcttagttatcaaaagtaaattatatttaaaaatcaaaatataaaagcagttactttaataggaaagtgggttaggggctagagaactttattcatagcaagttattttttgtacaagaattaaaataatagggttctataattaaaagtgtatagctataaaactctatatgtatctgagtaaatacaccatcgactatctctctttgcataataacagctttacttttcccactctattagcacacacataccatttcctcctttacccctgttggaaacaaatggctgatgccaaagctcttgtcattattcctagttgtgctagatactagtagctgaggggcctagagcctaattgtcctaatgtaacctgttttctgattagcagacaccatgaattgaaaatcaagccatgttattcttgcttaaaggagaagtgactgtattcagtaagattgtgcctttggaatgtttaactttttttttttttgagacagagtctcactctgccactcaggctggagtgcagtggctcaatctcggttcgctgcaacctccacctcccaggttcaagcgattctcctgcctcagcctcctgagtagctgggattacaggggcatgccaacacacccagctactttttgtatttttagtagagacaaagtttcaccatgttggccaggctagtctccaactcctgaccttgtgatctacctgcctcggcctcccaaagtgctggaattacaggcatgaaccaccacgtctggcctttttttttttgagacggggtctcactctgtcatgcagagtggagtacaatggtacgatcatggctcactgcagcctcgacctcccaggctcaggtgatcctctcacctcagcctcctaggtagctgggaccacaggcatgcaccatgatacctggctaagtttttgtactttttgccatgttgcccaggctggtctcgaacccctggattcaagcgatctacctgcctcggcctcccagtgtgctgggattataggcgtgagccattgcacccagccaacataatttttttgagactaacttactaaggattttagagtttcaattgaatgtctggtgggtttggtttatgtaacagtattatattagtagtatttctgtaatactgcttgcttcatatagccatcaagaaaagagttaagtattaactagcgtgttcatttggaatcttagtttagaagaaaggagtttgtttcattttgttctttaaaaatttgttttgaatctaagaagcgactatagtagaaaaaaaagttaaactattttctgaacgtacttatagacccatatatgggtttctttgttttcccacactgaccagctgggtgtcctatgattcaatttgattctcacactatctccctggtgttagagtccaatccctcaggttaagcgctcaatcctatgagactgcccccacttcagatgtcagttgcaagtctggggcttcagagcttctgactgaccagctataaattggaggttctcgtgaccccctccttgggtttagtcatttgctagagcagctcacagaactcagacaagccctttctttacatttactggttcatgataaagcatatggcaaaagatacagatgaacagccagatggaagagatgcacagggcaaggtatatggaaagggctgtagagcttccatgccctctctggccatgccaccctacaggcaccttcgtgtgttcagcaacctggaatttctccaaaccctgtagctcagggatttttatggaggctttatcatgtaggcatgatcaattattaactcagtcttcagccccactccccttctcggaggatgggggggtggagcttaaagcatctaatcatagcttggtttttctagtgactagcccccaactaggaacccaccaagagttgcctctttagagcaaaaaacacttatattatgcaggaaattccaagtaggagctctgtgccaggaaccaggggcagagatcaaatatatgtttcttatcatatcacaatatcacagtgaccaagtaattttctggatggatcaaagtcttaagacctgaagtggtaatcttgaatcagtagtaactcaggcaaacctgtgactgagtggcataaagtgtaaatatttttgtaagggaaatttaaataagattctaattattataatagcaaagtaaaaaaaaatcactgttcacaaaagtacttgggctagctttcttaaaaagaaaataatgggagctgcaggacagggagaggtaatgccagtggagatgcagcacatgttggatggggcattttaaacagcctttttcaatatggaattgggaaggaaagttgagttaaagaaaggagggagtgaatagcaaagtccagtactacatttgcaacttgtatcatttcaaaatactttataaaaagatgaacttacaatgtcaaaggaatgagtagatggacttagaagatttcatattagccataattgagaatgttcccttctttgaatattaaaagaatcttttggcctccactttccaaattaggtatgtcagttttgttacctctttacactaaatgattagtaatttgtctgaatttaaatgggatacctaggaggatctttatttgaaatcagcagtttcctaaggagaaagtaaattcttcctatattagactgatcttaactcaaatattatgcttttattttggatggagcttgtttttctttctcctctgaaagttactgaatttttttttttttttttttttttgagacagggtcttgcacccaagttgaagtgcagtggtgtgatcttagttcactgtaaccttaaactcctggactccagagatcctcctacctcagcctcctggagtagctgagactacccagtgcctgccaccatgcttggctaatttattttatttttattttttgtagagatgagtgtctcaccttgttccccaggctggtctcgaactcctgggctcaaacgatcctcctgtcttgccctcttgaagtgttgggattacagacatgagtcgctgtgcccagcctgaacattttctttttatatagtattttcattgtaagatttaatctctgctatgaatatttcctttttttcttaagtggaaggttatacttctttatatctggaaaaaggcagtgttgttttttgcttaagcaggaacgtagaatttaggttgtaaattaagattgaaaacttaatttagggccaggtatggtggctcacacctgtaatcccagcagtttgggaggctgaggcaggcggatcacaaggtcaggagtttgagatcacctggccaacatggtgaaaccctgtctctacaaaggtacaaaaaaaaaattagctgggcatggtggcgcacgcctgtaatcccagctactcaggaggctgaggcaggagaatcgcttgaaccctggaggcggaggttgcagtgagccaagatcgcgccattgcactccagcctgggtgacagggagagactccgtctcaaaaaagaaaagaaaagaaaagaaaaaaaacttaatttagggactggtgctctaaagctttgagcttgtttgaagtttggttaacagctgtggttgataagcataccttgtctttttaagtgaccattttgctttttgtgaaaataacttcagtagttgaaaagtcaaaatagaaacttgttcacccttcagaaaccaattgcatcatctcagctgatgttaactgcttaaggaaattattgagccttttcttagtaaatttcagggatatataaaatgtttggcactgtcacatttttgtcgtttgaagaactgtacttgtattcacactagatttcaaagttattttccaaacccagaaatgctcacctcctctttcttagaacatgaacataatactcttcaatggttttaaatgtatatgttctttgggtaactttcagaataattttaagaaatcatgttgctttatcctctataagacagtaaatcaaatctcatctgctcttcatggtgtgattatattaccctcaacacaagtaaatatttttttgttcgtttttaagcaattccattttcatttttgcccttcctagtagtagttgaatattgacactttaatactaaagtatggatctcggatcctcaggttggtctgggagggtagcatatctgctgtcttagtaaacattttcgtcagtgtaaggagaagagtgagagtaaagaaaggagccaatacctttatttgtgattactataaatcgattaaccacagctctaaaacaatatattgttatcaaactacccgctccttcccaaaaacaaaacaaagtagtgggatccttcattttggctttgaactaaagtgagggaagtcatttatacatagccaagagcaatgaaaccagaaaatataaaggttatatgaaaggctttatagatagagcttctatctgattttataggtcttagtggcttcttcctatggcaagccagaggtgattatgatttaggaaggaatacgtaggtggtccaggcactgaaaacatggagaacagctgcactgcaggtatcattcctcctcaggctcacagaatgaaatcattcctgacaatgttctttcaagttgtgttcttcaatttcagttttatcctttccaaaaatggggtccatgtgagttttcttcaattcgcttttaaagaattgtactctttaaaaatcttaatagtttgttttaccatttaacatgaaaaagcttgataatttgtttcaactagttttccacgactaattatttccagagtataacagatcccttgatagtcaaattaatgattaggttttggtcacattttttgccttccctgcttttcctgcttttgttattaataacaacagcaaaacttacataagtgcaacaagcactgttaaccattttatgtatagaattaattaaactcatttgttaaaatgcagaatgtgtggcactgattgaattttgaaccaataatttctaacatcaggtggataataaagtttatttttatgcatccttcagtcccttcattccctaattatatttacctaaagatgtttatgtgcctttaaaactaatgtgtctgctgttttagtttgacttttcaatttttaaaaaaccaatccccctttatttgtataatttaggaccctttgtgaatcccagtctcagcttatcagcctttacaatttgatctgttaaataatttatatgctcctgaatgtttagcattttttaatgattttaattaaaattccaaaagtaatgggtaagaaaagcaaggaatgtggtcatatcttaattacatagatgtcaaggtatccttaagtgagtttttgtttgtgtgtttaaatcatttcttaggctcagtagaaaagaagcaacagagaagatcaattagaactcgttctgaatcagagaaatccactgaggttgtgccaaagaagaagatcaaaaaggagcaggttggcttcctacatgtagagagttaaaacattgtatttgtaaatgttgtggcttacattcctgtcttaaaagaaagagaaactttcccccacactgagtttcctttctggactatcttaacgcttctgtcctggtgggttccagtgctcagttttaatacagccatccctgtgattctgcttcaagcattttcacagaaaacaggtttcaggagatgggaagccagtggtgcaagacttaaaaaatccttcacatttatttagaagtttctgttatcagcagaatgatttcatgtttttatgatttttatttggaaccatcattgagttcctttttttttttttaagtttgatttttggtttaagctgctggtatatattgttttttattttttaaacaaatcaatttaatttatattcttatatttaagaagcagatattcatagatgatctgttttttctgttaatatcgcagattttttggaatgttattttcccagtggaatattcacctgatatcaggttgtcagataaataatatttaggtaaaaaaaggtgtgtgggggggttgcattttgactgaagtgtattaaaccagtgtaatcaatgtagtaagatacatttaaatcaacttttcaaataaaattttagaagccattcttctttaaattaaactcacaatcagattttttcttaatttttttgttaaagaatatccattcttacagcctaaacacctgctagcaaacaaaacaaattctgaatagaattagttccaataagttttatattttttaaaccatttatatggaagaatgtgagcttttctatttaaaatatttccttcatgattttaaacttccaaatttaaaagctaactttgtgggtgctctgtggtatcaccaagcaagtgaaacagtttttccagaatatttaactaaaatttaaatagtatactaatttgtcattcatttatcatattaactttcatatttcatacttaggaaattatattccaaaaaatctttctaagctcttgaaaatctatagttattcattaccaaaatgaagttgtgattttgccagctggttcccaaaatcagtctgtgaccagtcagttttaaactaataagcagaatgagtataaaaagtgggacaaattgttaatgccactgtgttatagttagtagtagaacaataccagtgattgtttagaagattttatatttgtattactaattgtatcttataaaagcgtttctgttgtatgtttttttacctgttgtaaaaaaaataaaattttttttaaaaagcttagaacaatccttaaatatttacaaaatgtgtttcaacattcatatttcaccacatcttaaagaaacatgaaattcaatttatagcttaaacaggaactcctccaaacagcctcctttctctaattccaatggttcaatcctcaaattaccacgtgttttacatatacattggcagaataacttctgatctcgctctcctaatgtaggatcaagacactgttcataagacactcaagaaagtgcttttgcaatatcacaaacttattttcttaagtttgtactagcagcaaaagtattgagcttccagctgtatggagccctgtagcactctctacagagagggtcctgattcccagcaacttagctgtgagtgcaggcgcggaagggtcttaaagtggcgtgagttacattaacctgagtatcatagtaagtaaaaatttatcctaacgtctttggggcgggaggggtttttagcaacattggggccggttgcagaaacaacccctctcctgccttccagacactgaggaaagtattcttgttctcttcatataccaagggaatggtgggaaaagtctttgctagagagcatgtggctgtgtgttgtcacttgatattcagcacaggcagctaggatttaaaccctccctgatcttgagacagagaactttacccaaaagatgggactgagttcagatttcagatacattaatcactcatcattgcttagattgatgaaagtatcttttccctctgttaataattaaaagggaaaaaaattctttgttaatgctgtatttttctgtccaaacaggttgaaacagttcctcaggctacagtgaagactggattacagaaaggtgagttaatattataatgttgctttgcatttccttgattaaaaccaatttttaagaattatttgtacttcatgtatttttgtctgtctctgtaaatcgttgttgctcttcagtgtgaaattgcagtattccccagtgttcgtgtgtgtgtgtgacttttagagttgatcttattctgtacctccacgtgaaaagtcttacttgttttggtaaattggagaacacaacgtagacttgatactgtttccaacttttctccataagattctggggtttcactggcttataaactagggatgtgacgaatccactttttttggtattcgactgaataccgaatagtagctattcatgtttgtcaaacatggactatgacaaatcagacaagacaagctgattgaaaaaatcttgccacatttatttttacagtgctgtaaaatctttttgtaaattaaaatgattcatagcatttatggccactattagatgaccttatgcgaatctatttgagatatgcacaaagtttaagaaagcttaaacttatatctgtattttctgtgtgcaatttgactacagtacaaactccatagcatgattcgtgcgtttttggtgagatcaaactgtatttaatacctgtagtttactctgggcaaattgcattatttaaaaataaaataaaacaacagcctctctgcattctcggggagaagtctgcagcgatggtctccgtggagatcctcagcagaactgaacagcctctcggagggaacactgcttggcggagctccaagaaaagacatcgcgatcgctgcgagattaggaggcctgattgcgttgtgtttccaccattccacagggtcggcggaccggggagtgcagggctctgtcagattcagtgacagctccgtctccgcagcgattgaggaaactgtggactgagattcctgtacaatttcatcccagaaactccagacttgtagtctccatgcaagatttctttgtcggcggcttgataaacagtttctttgttttcgattttgatttcgccaatcatcattattggcattttcctgcctggtttcttcttcaagactctgaacaattgctttaacagtcaaatgatttttttttttcggtttgagctggatgggtacagcttaaatcatgggtccagcctaaaaaccaccatttaacttacactgatcaatttcaacatggactgtttttggttttttgtttttaaataaagcatcattaatgcacatctgcaggggtttgccaaacagcccaaactgtatacattacaatcattaaaagttcttattttttttaatattagtgccgttatcatggagaacagcatgacagctgtctttggcagtctgtcatttttctagcattttcagaaactcatcggaaatggcggtacctgtgtttcccttcgaaagcctctcagtacagcactcctgttcctctgttaaaactccttgttaatccagtgatcttttaggccaaggaaatattttgtgatggtgttctgggtccatacaccagcaatgaaggagatagatttgtgtacttgtgttttttaatcagcattaacatgggcaggcaccctcatttatagatgtcaggaaacattcagtgaaaaacttgtagaatgggatgtgataacgaggttccagtaatctgagcagtctaacgaggcccacctcctccaccacagaacgtggctatgttccaagtgctactctcactcagcctgttgcggatcttcatggcctcaggagacttgtttctccatgggctcttctggactgcacacttccaccatagcttgctgggttgatctagatgtctgtttgttgtatggaaattttgggggaaaaaatccaaaacacaaactgtgggttgaaatattaaccgtctccttggttccttggtattcaccgtgcctgatctgcacatttcatcgtggctgtttctgtatagcctatactgcattagcccaagagattgttgctttgtaactttttgcactattgttttggctggatttgtattacacacagttttaaaaaaaacaattccacactattctctgccttttttttcctatttatttcttcccgcacaaattccacatagaggccttcccatccagctctacgtgatttggctgcacttgaacactgattgtccatttacagccctcagcaatgtgccttctaaatggcatgacatatgtagatgtgctgcagcgcttgttaatggtcacaataaatgccacttcaccaaggaagtctcagatgaacaattatgaacatccaaattttattggggggcaataatcaactgaattgcaaaatttgggggaaaatggcactatccgtgtacgaatcgaatacaaatcaaagatttgtcacatccctaataaaaacaagatggagatgtctctgcaaccatatttgtaagctacacagtgtgttgggttttatgtcttccccctccaaattgaatggttctttgaattgctccaaatccatcagctatcctgcaattttcatagaattgatttttaggttggaacgtgggctctgttgactgaaaatagctttagagaggagaactgaattaaatgttttgatagagcggttgtaaattaaatcagtcactaccaggaaggtcagaagttctgaagttttgactcattatttcagtgttacaaagagagctatgctttttccacactaaagatgagtttgagaaaagaaaatattctcccacacacaaaaaaattaaaacaaaccttaagtactattttaggattaatttcagtgtgttgtattaaggtgccagcgagatttcagattcctgtaaacctctaaagaaaaggagtcgcgcctcaactgatgtagaaatgactagttcagcatacagagacacatctgactccgattctagaggactgagtgacctgcaggtaaatatgtgcaagggtctggacaaagtgttctttcttgaacataatgcttttcccttatttatttggggaaatcaggacattttaaaaatactcatagaaaaaaatcactttgtttattttgagtgtcttaattcttttgctctcatgttatataacaaaactatagtttgtttgtaattttaactacagtttttcccaaaacagcagacctatgatatctgtggattttggaaagaaaggaaggaaaaaggtggttgtgtcaagatctaatgtttgagcaagtcttactaggattttcatagcatcttatcttggagggaattttcattttgtttttcttaaaaatgctatgttttctatgtaggtaggctttggaaagcaagtagatagcccttcagctactgcagatgcagacgtttctgatgtgcagtccatggattcaagtttgtcgagaagaggcactggaatgagtaagaaggacactgtatgtcaggtaggcaggtaactggtgctatggcttgaaataattgctattatattctgccagtaatagacttaactcctgttgaagaggataatatgtttccaaattattatgatattactttaaagctacagatataaaacctctttgtggttctttttttccctttctgagttggaatacttacccacatgccaatctttagtgtgatatactataattaattggaagtaaatggcagatgactgattggaaaaactttcttaaattcaaaattttaaagtaataactttctcagtgtatttttaccgttcttgaaaaaatactgctttgccctgtgaagaaaacttaaatatgcagatcccaaagaaggaatcctaaaagatcaagtatgactttaaactttataccatattgtatctggaaatactgtaattgtctagttctctggttctcaaagtgaaggccaaggacaaacaatatcagcatcttctggatacatattagaaatgcacattcttggggcccccgccagacctactgaatcacagtctgtgggtgagggacccggtaatttgtgtttaacaagccgcccatgtggtcttgatgtttgccaaagtttgagaaccactgctttttgccatattacagatttgtgaaagctctggtgactctctgattccttgtgagggagagtgctgcaaacactttcacctggagtgcctgggattggcatcacttcctgatagcaagttcatctgcatggaatgtaaaactggtaagatgacttatttcgatagtcatgaaaagatgaatgggattgtgccaggaatgtgcactgacaacctctcctaggacatcttgttcccatcacttttattagccctcctcctctcttcccaaaggtatttcaacaaattaagatttggcttcaagatttaaaaagtagttaaatttcctcctactggtgccttctaccataaaacctgtcaaattaccaagatgaatttgtgttttatctaaagagttatataaagtatgttaattgagttatttttcagatggatttgagattttgggggctcaataaattggtttaaagttctttaagagactggaagaagtatcagtgcataactacagtgattatatttctagtggaaatttggagctactggaaatcattttttaaacttgggattcaccatttatttcttatctcactatacatagactaccacctactaaaataatttgtagagaaataaatatgctagtttatatttcttctctctgtagccataattctggttaatatcatggaaagcaagtcgtagttgtttaatctgtcacaacatggcaaattaaaaataactggagatgacatggtggtgcttctaggaaacatgttgatgtgttttttgttttgctttgttttagctatgaggaactaagccaatcagatagcaagtgtacatgatatgctgatcttacctttgactctttattatttttctactccttcttttccttttatttggattcttacagatatttattttatcttttcttatttgattgtatgcctcctaaaatctttcagacaaaaagttagtaatttttttttttttttttttgagacagagtctcgctctgtcgcccaggctggagtgcagtggcacaatctaggctcaccgcaagctccgcctcccaggttcacgccattctcctgcctcagcctcccgagtagctgggactacaggtgcctgccaccacgcctggctaattttttgtatttttagtagagacgaggtttcaccatgttagccaggatggtctcgatttcctgacctcgtgatcagcctgccttggcctcccaagtaatttttttttttaactgaacactgacttactaaatgttaggtgctacaagtactaagcattttctcctgctatttcatttgatccatgatgagataggtactattatgatttccattatgcagaaggagaaacaggattagagagtttaatagcttccccaaagtcacaaagatagcccatgatgactctgtgatttaaacccaggcagctggactccagatttattttttctttaccatggtcttctactgccctggtgaataggatggacatcacaagtcatatgtcatatatcccaatacacattcattcacatacatacacacacacacaaatacacacacacatgtacataaactaagctatggaagctgtttagaacatataacttaaaattttccccttataaaatattttattcatcacatttagactctgcagtaaaacttgtgaacagtttgccaactggcagccccggggtcatattatctgcacatcgttttatttggccttcagaatgcattttcatttttgaacacggatagagcatgtaatcctggctcctcacattccccattattcctttttctaaaattcagtcattccagtcacttatatatgctgcctggcccctttaagcattcaagtattgtattagggacttcttgcattgctataaagaaatacctgagactgggtaatttataaagaaaagacgtttaagtggctcacaattctgcaggctgtatagaaaggatagtgccagtatctgcttggcttctgaggaggcctcaggaaacttacaatcatggcagaaggcaaagtgggagtaggcacttcaaatggcaaaagcaggagcaagagagagagttgagggagagggccacaatttttaaatgaccagatttcacaagcacccactgactgtcgcaaagacagcaccaagccatgtgggatccacctccatgatccatacacctcccaccagacctcacttccaacattggggattatatttcaacaggagatttgggtggggacaaatatccaaagtatatcaagtatgcaatccctgatttaagatattgataggaaggaccatatatctcagtattaaaacactcttagggcttctctcctaactctagaatccaggagaattcttccaacagaggctaggtgtatttaatttggtacacatctattagaaaatttaagagggaaatttgctttaaaaacagttaagtatgggatgttatcagtaagcatgaaaaaaaatttttaataaaaaacagttgggtagaacaaagtcagaggactcacatttcctcatttgaaagtatactacaaagctacagaagtcaaaacagtgtgatactggcataaagacagacatatagaccaatggcatagaaagcccaggagtaagcacttgcatatatggtcaaatgatttttgataagggtgtgaagactagtcagtggaaaaaaagacagtctttccaacaaatgatgctggaagagttggatatatgcctgtaaaagaatgaagttggacccttacccaacagcataaacaaaattaattcaagatgaatcaaagacaaagatgtaagagctaaacctataaaactcttggaagaaaaaattgcatagaggaaaagcttcatgacaatggatgtggcagtgatttcatatacatgacaccaaaggcacaggcaacaaaaggaaaaacagacaaattgtacttcatcaaaattaaaaacttttgtacaccaaagggtcttatcaacataatgtaaaggcaaccctcagaatgggagaaaatatttgcaaattacatatctcataaagcattaatacccagaatatatagagaacgccttcaactcagcaataaaaaactaaacaactcaagccaggtgtggtggcttatgtctgtaataccggcactttgggaggctgagttgggcggatcacctgaggtcaagagtttaagaccagcctgaccaacatggagaaacctcatctctactaaaaatacaaaattagctgggcatggtggcacatgcctataattccagctactcgggaagctgaggcaggagaatcgttgaacctcggaggcagaggttgcagtgagccgagatcgttccattgcactccagcctgggcaacaagagcaaaactccatctcaaaaaaacaaaaacaaaaaacgaaacaattcaaaattgggcaaagatcttgagcagatagttctccaaagaagataggcagatggtcaatatacatatgaaaatatgctctatataatgagtaatcagggggccaggtgcaatggctcatgcctgtaatcctagcacactggggagccaaagcaggtggagctctttgagctcaggagtttgagaccagcctgggcaatatggtgaaaccctgtctctattaaaaaaaaaaaaaaaaagtaatcagggaaatgcaaatcaaagccacaatgagatgccacttgatacccattagaatgaatagtatcaaaaaaaaaagaaaaaagaaaacaacatgttggcttaactatggagaaattggaacccttgtgcattgttggtggggatataaaatggtgtagtggctgttgaaaacccaatgatggtttcttaaaaaattaaacagaataacaaatggtcaagcaatttcactctgggtatatacccaaaagaactgaaagaaggggccaggcgtagtgtctcacacctgtaatccaaggattttgggaagccaagacgagcggattgcttgagtccaggtgttcaagaccatcctgggcaacatggtaaaacctcatttctaccaaaaaaaaaaaaaaaagttagcctggcatggtggcgtgtgcccatagtcccaaatactcaggaggctgaggtgagagaatcacctgagcccaggaagtcaagactgcggtgaactgtaatggcatcactccactccagcctgggcaaccagagtgagactctctctcaaaaaaaaaaggactccaacagatatttgtactgtcatattcatattcatagcaacattattcacagtagtcaaaaggtagaaacaacccaaatgtccattgatggatgaataaacaaaatgtagtatgtacctacaatggaatattattcaaccttaaaaataaattgtgatacatgtcataacatggatgaaccttgaggactttatgctgagtgaaataagccaggtataaaaggccaacaaatattgtatgattgcatttatatgaattacttggaatagtcaaattcttagaacagtagtcaccagggttgtaggggaggtgagatgaggagttctttaatgggtaccaagtttcagtatgggatgatgaaaatgttctggaggcagacagtggtaacaatgtgaatgtacttaatgctactgaaccgtacacttaaaaatggttaaagtgttaaattttatgttatatatattttaccacaattattaaaaaaattaagtgcttttaattaatgacatgaaaattagtttagtacctatttggtacacttctaacatattagaagtgagaactgtgattcttcaaaccattgtttaaggtcatttaggcaattttcctttgtttacaaaagataaacacttcacatgtaagaagtattgcaggtacatacctaatatgttcttatactaccactttctattatttaagtcaaacgtgatttctggaaagaaagcatctttatttgcccttttgaataaaatgtacaatagaataagtctccaaaaagagttctgtaacagatagttttacttattctgtttttccccacttcccccatggtccttgactctggaccgatggactgacttcttttttttggtcccattgcccaggctgaagtgcagtggtgcagtctcagctccctgcagccttgacctcccaggctcaggtgatcctcccaccccagcctcctgattagctgtagggactacaggcacgcagcaccatgcccagctagctttttatttaattaattatttatttatttattgagacagatttttgctctgtcgccctggctggagtgcagtggcgcaatctcagctcactgcaacctccacctcccagattcaagtgattcttgtgcctcagcctcccgtgtagctgggattacaagcacacaccaccacgcccgactaatttttgtatttttagtagagccagggttttgccatgttggccaggctagccccgaactcctgacctcaagtgatccacctgccttgccctcccagagtgctgggattacaggtgtgagccactgtgcccagcctccagctagttttttggttttgttttgttttttttttttagtagagagacaggtttaccatgttgcccaggctggtcttgaactcccatactcaagcaatgcacccaccttggcctcccaaagtgctgggattacaggcatgtgtcactgtgcctagccactgactgacttgttcttaatgaaagccatttcctagtgaaaaggaagagtatggaaagcactcacatgttagagctctaacctaagtcttaaaggagtttgatagttcagctctctgttagcataacatttgcactagttttcactattttcatttatattaggcttattttgatcattacataaatgaaggcttattttatattttcttgagagaggttcttgctctgtcgcccaggctggagtgcagtggcatgatcatagctcactgcagcctcgacctcctgggctcaatcctcccacctcagcctcctgagcaggtggaaccacaggcacataccaccacacctgcctaattttttaatttttttgtagagatggggtcttactgtgttgctcaggctggtcttgaactcctgtgctcaagtgatcctcccgcctcggcctcccaaagggctgggattacaggcatgagccactgtgaccatctgaagtcctattttatttttacagagagtagtttatttattaaaccaatctgtgaagtcaaacttcctaccttttaaatatatttttttaatttttaaaacttttaaaagttattttaaaatatataattaccttcatatctatatacatggtaaaatgtactttattggccttaaccatgtggtgaaaaaatgtactttgaaattacatatttacaatgggaccaaaaaaaacccaccttactgtactttatttctgcaaaacaatttaaaaagtgaacatcacagtttcaactactcattttaaagaacttttataattcagcaaatttgtaaagattgggtacttccagaatcaaagaacaataatgcagttcacctaactttctgtaaaaaagcaaaactatcccttatattttttccttcagatttttagcaggcattataagaaaagtggacaaaagacttgaacactttcgaaagatgatattcagatgaccaataaacatttgacaagtttgttattataatttgcagttctttgcttaaacatttctttctgtatctttattgactcttgtgaattatctgtttatgtgtcttatccatttatgttttgtggtgttaaaagtattcttatcatttgttaatattttaaatttatttctaattacacaagtaaaacataaccacattgttttgaaaatattataattactgttcttgctgatgttaccctcgatcatcagtcttaatcctaggcccttacttagttccagtcctgacaaccattgtcagtttgacgtgtagccctgtaaacctttgtgtgtgtctgtgtgtgtgtgttttagtacaaatctgtcataccattgttctgtcggagctcttcttatgtcaatacagatgcattctatttaattgctgcatagtgccctagtatacatatagtcatagtttatttaactcttcccctatcgaaggacatttgagttactttcacttgtttgcaattacaaacaatgtttcaggcaacatcctttaacatttactctcagtcttccccagtgtagttattgagaaattgaatttctaggcagaaagtgaatgtacttttattttaatggatattgcccagttgccttctaaggtagctgcttccaacttaaactcctgccagccccctacacccttatcaataattggtattatcactgtagtcccaattactctggattctggggcacgagaatcacttgaacttaggaggcaaaggttgcagtgagccaagatcacacaactgtactccagtctgggtgacagagcgagactctgtctcaaaaataataattggtattatcaaactctttaagtttttttgtatttatttatttatttatttattttattttattttttttttttttgagacggtatctcgctctgtcacccaggctggagtgcggtggcgcgatttcggctcactgcaggttccacctcccgggttgacgccattctcctgcctctgcctcccgagtagctgcgactacaggcgcccgccaccacacccggctaatttttttgtatttttagtagagacggggtttcaccttgttaaccaggacagtcttgatctcctgaccttgtgatccacccgccttggcctcccaaagtgctgggattacaggcatgagccaccgcgcctggccgtttttttctgttttataactggtttcagttagcatttacctgattactagtgaagatgaacacattttaattttcttttgcctatttgtctttatgtaaattgcccatttacatcctctgcccacttttacattaggctgctttggtttttttctatattgatttgtagtttgtaagtcttattccattatctttgcttatatatgttgtgtgcgttttctccatatgtaaactgtttatacaacaaaacataatcttttgtcatttttgttgcatatttccctacatctgtttgtcttttacttgtttcttctttttttcctgtttagttttttcatatttggcattattttcctccttgaacattggacatattcaccagtggagccatctgggcctaaaatttttttttgttgaaagatttccaattatagtttcaatttcttttaatagtttacagaactattcatatgtcctgtttatttttgtgccattgttcgtaagttctttttttctaggaatctgtccgttcatctaaattttcaaatttattagcaaaaatatagtgatatccttttactatctttttaatgtttgtaggattggtagtgatgttccatttttcatatctgatattaatattaggatctttctcctttttttattattcttaccagaggtatcagttttattattctttttcaaagaactaggttttgttaattctccctggcgaatgttgatttcacttcattcttgacgaatattttcactgggtatagaattctggtttggtaattattttctttcagccctttgaaaatatcattctattgtttttttggcttccatttttctctttcagtcagctctgtttgaaagtaattgtcttttttgtggataatttgaatattttctttatccttgattttctatagttcgaataagatatgtctagctgtaattttcttttttattaggattgtgagttttcattttatgtatattttgcacatagaaataatcagtgattatctaatggaatcagactttcctttggtaatttatttattctatgtggggaaaactttgctgctgtctgctaccagatgtcaaacaaattctgttctggcttttctatggaatcagttttggagatctaaattgtttttagtattctgtctccaaattgataatcaattattctagcaaaatttaaaacataattttaatttagcatttattttaaattttttttgtgcattaaattcttaagtatagtaatagagtctgttttaggagtagctgtttgatgtctgtagctgcttctacttgaatatgctttagtcaattttatttaatttgtattcctcaccaattttccagggcagcacccatgtttttcgtgtaaagtgtctggtaaagatgtgaagcgttgttctgttggtgcttgtgggaaattttatcatgaagcctgtgtccgcaaattccccactgccatctttgaatcaaaaggattccgctgtcctcagcactgctgctctgcctgctctatggagaaagatatccacaaagcaagtaaaggtaaaacagctgaagaaggagacaaagatttttgttttaagggcagtggcaaataacattatcaagcatatattacaaacaacataaggcattcttcttctgtgtatctctagctttaacagttcagccacagtacatacacagtacatgttaagtagagattacattctaaattcagaccatgagaagaaaattccatgtgttcaaaatacccttgaaagtccttcaggtaggtgccatattggataccaccgtctctgcagcattggaacaaataattttttctttggatgatctctacgtgactattaggcttacatttaggggccatatagcataggatgacagagccagactagggaagaaaaaaatgctttccatctactgtaactagcatctcagagggacccaaaaaagcccaactccagaaacttatttttatgtcccgctgatgccttattagattcctttttgacttgtctttaaacaggccgcatgatgagatgtttaagatgtccagttgcctatcactctggagatgcttgcattgcggccggaagcatgttagtatcctcctacattctcatctgtagtaatcattccaaacggagcagtaattcttctgctgtaaatgtaggcttttgtttcgtttgtgccagaggtgagtgtctgacttttctcttcatttatttttgaggtcattggcatatttctccattaacatagagtctcagcattgggaaagaactcaggccatctagtagaatctcctacccagtgcagaattccactgtaatatatccctgagagagatgaacatttccagtaacttttataatgctagatgtccaaagtgttagaatactaattcttccataagttaagctaaaatctgcatttctaaaaataacagaattatagttaagttcttagtttttctgtttggagcattaaaagattaatcttttcccttctgcaaacaactcttctattcaaagtagatccttcccatttcataatcttaaaccagaactttcaactgattgagatttcacttggaaggcaaaactagcacatccatttttcagttgtttatgctgtattttatcataatgttttggtctggcattgaggagggcctgatgggacacagccaaggcagcatatgtggtggtgttagttcagagccagccatgtgggctttcttgttgccagctgttgacgtttaagtacaccaagagattgatcaactaaaaacaatactgtagccctacgggggtcagtgaacttgggttcatgataaatataaaatcaaacttctttagttgaatgttatacagaatatctggctttatctcaagccatattataataaaacttttttggtacttagtaagcattataaaaactaactaatatccctaaatattgctttggtttgtttttaagtgcaaagttttctgactttccctctgaactattctcaaggcctctaaggcccatcatgcttgttagattctatttagaccatactgaacatgaaagtggtttttgtttggttggttgcttttgctttaggagacagttattttaatttggtgaaagtactataacaactttctaaaatagaatttaggtagtatgatagatcttaggtggttttgcttttgtgtctctcattatgaaaacattacttggaggtaggcagtaaaagattaaataaatcgtagtcctttgtggagtagctagcagggtctgtagtagacactactttctgtttgcctgttttataagcacatgtgactgtctgcctttggagcaggaagtactgtgtctttcttaactacagcagtgtcaaatgtatcctgctctgaaacctggctggtatcatggaggagtaggtctgaaatgtttcctgctatatcgtaacaggtgggcaaataataaataaaaaggtgtcactcattgcctttcccatctctgcattcctaagaaagtaatgattagaagaaaaaattattgtattatcagttgaatgtttagctttagagtcttttaaacggatgagtggcagtgataacataaagtctcttattgctttgcaaactctatgctaccattgctgggcactgacatttcctgtcagtgtataagcatgcataatttagcccgcattttaatatcaagtttataactattatgttggcttatgttggggcacattctgaatcaaatgccatcagtagattaattaatattctcttttgctctacttcattcaataattgggatacctttaaaataggtattttcaggctgggcacagtagctcacgcctgtaatcccaacacttgggaggctgaggcaggaggattgcttaaggccaggagttcaggaccagtttgggcaacatagcaagaccccatctctacaaaacataaaggaattagccaagcatggtggtgtgtgcctgtggtcccagctactcgagaggctgaggagggaggatcacttgaccccaggagttcaagactgcagtgagttgtgaaacaaaatatagtattttcaatttaggacagctagaaaattgtacgcttatagaaactctagccactttgttaaatttaacttacataacttgattaaattctgagaataatgtaagtggagggaaaacccatgtttaacaacagaatctgtatttacatcttaacaatttgacggttatccaggaatatttactgaatttaaatgcctgtttaagcaaaattatttaattcccacatattttaactgtgaaactttgtatggtaaacataaccttcattttattttctagcatttgacaaagacttactctaaatagatcagatgctgggaaggcttaaatcaaaagtctttcagaagtaaataatatgtgttcttttataagtatttataaaggtcaccttttttaaggagacataactgtaataaatccacacacagaaaggagcactttagtcatttctgtttgggtattagaaaacttagcttgttttgcttgtttcttgccttatacagaatttttccctccacatagattttctcttagttcttggttattgggtgtttaaaatcattaagctatttcttaaggactacaatgtctggaaatattttttgaaatgtttcagggtttgacatcactcctcttccacatgccacctaatcgtggagtcacaagaagtgtgcggacatttttcagtgtagtgcacattctttagcatctcctttcatcttagagggttgtgtaaaataagttacttaacattctatgcctttctttgtaatggtaattttaaatggataatgtaggctggagttttcttttcattttaacagtaaataatagcaatttattttgcatatgtaagtcaaactttactaaacattatctgaatgaattgccacagtttccctaagaagttatctctccatagtatacaggtgagaacactgaaacctagattaaataatttacctaatgacacacaagttgttaaatggagggactagtatttgtacttaatccttcttatttcaaagcccatattcctttacactactccatctccctctattaaatgtacaaagttcatttcaacattatataacttttttttttgagacagagttttgctcttgttgcccaggctggagtgcaatggtgcagtctcagctcactgcaacctctgccttctgggttcaagcgattctcctgcctcagcctcccaagtagctgggattacaggcatgtgccaccacgcctggctaattcttttgtatttttagtagagatggggtttttccatgttggtcaggctagtctcaaactcccgacctcagctgatccgcctgtctcggcctcccaaagtgctgggattacaggcgtgagccaccatgcccagcccatataacttttattagaagactctggctgagcaccatggctcatgcctgtaattccagcattttgagatgctgaggtgggaggattgcttgagcccaggaattcaagaccagcctgggcaacatagcaagacctcgtttctacaaaaaaatcaaaaacgtagccaggcatggggacaaatggctgtagtcctagctactcgggaggttgaggtggtaggatcactcgagcccaggaggttgaggctgcagtgagctgtgatctgccactggactccagcctgggtgacagagcgagaccctgtctcaaaaaaacaaaacaaaaagaagattgtcatattgttagtaatttcaagttccattctgttatttaggtcagagatatttcttgaattcgtctcagtgtagagtatgaagacaatgcccacagaaaaaagtaaatggtaatttccctccccttcaaaatgatctcttaaataaaactgctgccgtaatttgtattgtaaatcctacatcattatacactgatccagtaaccaagatagaggatagagaaatgtcccctggtctcacagttgcctaggtttaggagtggcttatagctacatcatgaattaactgggggaggggtaagggaaagaagagggaaccacaggtagctttagtgttttcctccaagtagcatagctgtaattggtagatcaaaaagattgtttttattaacgcttaagttggtaatccttttatattgtggcagggaaaaaatgaaaatgtttgcattacctcagtaaagttcaggaaattatggctcctttaaaatcatgtaccaggcctggcacagtggctcatgcctgtaatcccaacattttggaagaccaaggtgggaggattacttaaggctagaagttagagaccagcctgggcacaaaagctattatagaccccatctctacaaaaaaatttaaaaattagcctggtgtggtggcatgtatctgtagtcccagctactcgggaggctgaggccagaggatcgctagagcccagaaattcaaaggtgcaatgagccatgatcacaccactaccctccagtctgagtgacagagcaagactctgtctcaaaaaatatatatataatataaaatgaaataaaacatgtaccatattgatagagaagagtttcattatctggcagagaaagttaggatttctttgagtatgtctgaagatatgaatagaaaaaaggagagacttccattctgcattaaagtgctacttgatatattgaaggtagatcagggtctacttatgtaaatgattcttatttctatctcattacatgatatataatatcattttgttctttgggctgtcgtcattgtacatccaaatacgaagcagtgtagctttgttttccctaaggggttttctgtatgatgtcaagtgtttatatcttcaaattatttgaagttttcttctgcagaatttaggtttctataatatatagggataaggaattgagtagttcagactccctttgaaaactgtagaaaacctttctgtcagatctttcttttttcttcatattctcattttcgccctccccaccccagctttgaagcatacataataggtgttggtttattttttcctcatggaatcatgggtagtttcattgcagctcatctctttctgtttgtttcgtatagggctgatagttcaggaccattcagaccccatgttcagttcatatgcctataagtcccactacctactgaatgaatcaaatcgtgctgagttgatgaaattacctatgattccttcttcgtcagcttccaaaaagaaatgtgagaaaggtaataatcaaaatagtttctcttgcttttatttttgcatttcctatttttttctctttcaatataggggggaaatgtatgcctgtcaagcaccatctgttgcttttggtaaattctgccttggtggttgtgactgtttcttcatatggctgcacaattattaaaaagggcttaaaataattccattgttgcacatttttacatactcttcccttgaataaatttttacacattccatatttataagttattaaaataggaagactaggattttggtcagtataaatatagaatcatattctaaatgttctttctctttttcctggtgtgaaactatcattcaagttggaatagaaaagatagggtataatttgttactaactttcaactaaataacaaggtaggttattaaaagagggaaactaagatactgatacttgaaagtttgcttttagaatatgttctgtcattgggcttcttaaatgtttggttaagatgctatgaaaactagttgcccttcccttaggagacattggtgggaagctggttggggagaatacccctaatactggatgctggaaggcagcccagctgaattgctgatggataattatccacacagtaccaagagctaaatggatatttctgttctcccagttaatttaacctatggaagaaaactttatattgtgtttagttttccatagcctacctgttataaaaatgatttaacaatgatgtattatttggggagttattatcccactgggaaaaataaatgagcttgaaaggtgagggccttttcctgtgtacattcccattatgatctggggccaagttcagaatctttaaagaaaacttcattcataactaatatactctatacacacacacacacacacacacacacacagtaggtgtatttgaaatgggcttttgaaaaaattctttgtgttgcctgtttgatgtatctttgctctttgtcagacatctgaagtggcaactcatgactaaaagaaagtgagactaagcaagtcgattggaacatattagaagtattggagagagtactggcttttttgtctgttttctgcagtcagattatatcaccttattgataatactgcctacttccaaaacaaaaaaatgaacataggtttgacttactccataattattctgcctgagacattttaggaaatgctttattttcttgctggtacctatataaaattagattaattcaattgttgcttactttgttttcagtactcagtattaactttgacatgaattgaaattattttgagccctctgtttgcttaacttgaaccatatcttacttctcttgtatcctagttttcttgcatagcaccaaggtggaccattcacatttttttttatttcccttgtgtattttaagcatctttatcatgatgattttctctgatgattctggctctgtatttcctctgaaataagacttaaaattaagaactattccataatgttaaaaatggccagcctgacttttctaggtcagtactaataatcacatgtcctctaaagctgtttgcagacttttctccctgctggtcattcctttctgatggaaaaaaaaaatgaataatctcattttactttaaatttatagacaaattccctccctaagtgtagagcacttgggcatctgatctctaggttggtaaattgaatcaattaatctatactgagatgtagtcccagaaaaaaaatcttgatgattgaagtaaaagcttttaagcagaggaaatacagtgatttaattcatcatgggttgtatatggattttctttttgtttttatgttaatcagaagtttgaaaatttataggaagacaagattttctggaaaattggtagcaagccctcagaaggttggagcatgtgatttgataaagttgcatagagggctcttacccttttgcttatgagactttaaatcttcgtacactcatgggttatagacctgattttccaatgaaaagatcaatttttttcaataaatatttgtctttattatatttcatcttcagtggttaacattcgctgtcacgtattgaaatacatattagaaatacctaatttcctcccagaatttcatatttcttagcatttacaactattttgtttgccacacctgttttggtctcaatccagagagtattttgtgtatctaaaaggaaagagttttgatagggaacttggaattagctccttgcatatggtacttcattctatactgataactacttaattttatgctataaagcagtggttctcaatatgaagtcagaagagacttatgtaaacaaaatttttgaactatgtttaatatttcagaaaatctaacaattacacatttgtacagaatcaaactgcatgagtttttaaaatttggctatgattttaacaatttaatgggataatactagttttgttattgggatcagaatctctgattggcagttatatatttctttggttaataaaaatcggagaaattgttacttttaaaatgcagattttggccaggcatggtggctcacgcctgtaatcccaacagtttgggcggctgaggcaggaggattgcttgaggccaggagttcaagaccagcctgggcaagatagagcccgtctcaaaatatattctctgtatatgtatatatatagagagaatacacacacatacacacacacacacacacacacacacacacacacacacacagagggagagagagagagaaagagaggttttttggttgttgataaaatatttgaaattatgtgggttcatgaggagggaaaagggaatccttggtgatgaaaaagttgcaaaccactgctgtatagcctgtaaatcttcaccaaaaggtaatgataacataatcaccaatttgagattctgtgttccttttgctttttgtattctttatggaaagaaaaaagtactgatcaacctattggctatttttttgcttgctaattatattgtaaaggaatttagttaaccatggcactggattaaaatacaacgatgacttgctttctttcttacctctgaaggagaaaagaaagttgctacttacatgtttgaaaaacctctcaaatctactcagtcaaaagattttatgcttcaatttggtcatatgttaagagtttagcttctaaactgatacctcagtagcccatagtttaaaggagtaaagagtacatggatgcttttggtactactcagaagctctgagtttctggccactgaaaccctgaaaagtagctaaatacgttcacttgctattttaatccatcactgtagatatgactcagtccctttgttattttcccccaatttgaaacaaatttaatgtgctgaaaagataactttctcctttttctttctttttctctctcctcttttctcagttattaagactgtttatttgtttcaaggtggaagattgctctgctgtgaatcgtgcccagcttccttccacccggaatgcctaagcatagaaatgccagaaggctgctggaattgtaatgactgtaaagctggcaagaaactacattacaagcagattgtttgggtcaaattgggaaattacaggcaagtttttccaagaacaaagaggaagtattcaatcattgtgcagaccagtttcatactctggatacagagtgacttggagatagataggtagacagcatggacctacttccttaaaaaaaaaaaagaaaagaaccatgttttgaggctgggttcttaaggggttgggaaggttatgttcctaattcattattgaatttctttttctttttctttgggattggttggttgattgtttgtgaggcggtttggctctatcaccaaggctggagtgcagtggtatcgcagctcactgcaccctccacctgctggctgaagccatcctcccacctcagcccccaaagtagctgggattacaggttcacaccaccacccctggctagttttttgtatttttagtagagacaatgtttcgccatgttgcccacgctggtctcaaactcatgagtcaagcaatctgcccacctcagcctcccaaagtgctgggattataagcatgagccaccatgcccaccaacttttgtttttaagtcctgaaagttgttttatactaatgggctatgtactactagattttggaataaaaggtcttatatggacagtggagatgattttttttttccaaaaaaaacttttttttttttttttttttgagacggagtgttgctttgtcgtccaggctggagtgcagttgcgcgatcttggctcactgcaagctccggctcccgggttcatgccattctcctgcctcagcctcccgagtagctgggactacaggcgcccgctaccatgcccgtctaatttttttgtatttttagtagagatggggtttcactgtgttaggcaggatggtctcgatctcctgaccttgtgatccgcctgccttggcttcccaaagtgctgggattgcaggtgtgagccaccacgcccggccaaaaaaaaactttaaaaatttttttttaatttaaattgaataaatatagtgagatggggactcattatattgcccaggctggtctcgaactcctgggctcaagcgatcctcctgcctcagcctcccaaagtgctagaattataggaatgagccaccacacttggccagagatgatattttctttgtgtcttaattagatatatgttgatttctgatttctaataaaatcaagtttatattctggtcaaaatagctctttgcccctgaatctcgtccattttagccctaaaccatgtgtaaagagaaaactttttagaatttaaggagagattattccattaagaggctttagtcttaagggaatgaagcaggaagtatgtgagtaccattattttaatagtactttctcctttaaggcttcaacgagcctttgctgaacaggtatagtgatacagttttaaaacttggccaggtacagtggttcatgcctgtaatcctagcactgtaggaggctggggcaggtggattgcttgagctgaggagttcaagaccagcatgggcaacgtgacaaaactctgtctctacaaaatatatacaaattagctgggcatagtggcgtgccatgtgtggtagcatcatagctactcgggaaactaagtctggaggattgctggagcccaggaggttaaggctacagtgagccatgattgtgccactgcactccaggctgggcaacagggcaagaccctgtctcagaaaaaaacaacaacaaaaaaacacaattaaactaaaaaactctacattttgaggcatatatttatcattttacaaagaaaatagatactattcaagatagcacaatagagttctgcttttcagttagaatcctaggtaaaatatatttctctttttttttttttttttttttttttttttttgagacggagtctcactctgtcacccaggctgggatgtagtgatatgatctctgctcactgtaacccccacctcccaggttcaagcgattctcctgcttcagcctcccaagtagctgggattacaggcacctgacaccacgcctggctaatttttgtaattttagtacagacggggtttcactgtgttggccaggctggtctcgaactcctgacctcagctgatccgcccgcctcggcctcccaaagtgctgggattacagatgtgagccactgtgcccggctctaaaatatatttctagaaaattttaaatatactgtaatttttttagcaagagctatgtttgttctccctctctctttttaattttttttttgagacagggtctcgctctgttgccaggctggagtgcagtggtgtgatcttggcccactgcagcctctgcctgctggattcaagcaattgtcctgcctcagccccccgagtagctgggactacaggcacgctccaccacgcctggctaatttttgtatttttagtagagacggggtttcaccatgttggcccggatggtctcaatctcttgacttcctgatccaccggcctcagcctcccaaagtgctgggattacaggcatgagccactgcacccagcctgttctctctcttttacatatgttagacatgtttacccatttaaattttagaacttcatttttagctgagatctggggtattgaaatcaaacctccccccacttctttttctttttctttttttttttttttttgagacaaagtcttgctctgtcccaggctggagtgcagtggcacgatctcggctcactgcaacctctgcctcctgggttcaagcgattctgttgcctcagcctcccaagtagctgggattacagatgcatgccatgacgcctggctaatgtttgtatttttttttgagacagagtctcgctctgtcgcccaggctggagtgcagtggcgcgatcttggctcactgcaacctccgcctcccgggttcaagtgattctcctgcctcagcctcccaagtagctgggattacagatgcatgccatgatgcctggctaatctttgttttttttgtttgtttgtttgtttttttgagacagagtctcacactgttgcccaggctggagtacagtggcacgatcttggctcactgcaagctctgcctcccgggttcacgccattctcctgccgcagcctcccaagtagctgagactccaggcacccgacaccacacctggctaattttttgtattttttttttttagtagagatggggtttcaccatgttggccaggatggtctcgatctcctgacctcgtgatacacccgccttggcctcccaaagtgctgggattacaggcgtgagacaccgtgcctggcctaatctttgtatttttattagagacggggtttcaccatgttggccaggctggtcttgaactcctgacttcaagtgatctgcccgccacaacctccccaagtgctgggattacaggcctgagccaccacacctggccaatacagtatgtttttaatacctgggaagaaatacatctaatgttaatagtgtcaaggatgagattacaagaagaggcattttcacttttctactatacatttctgcattgttttaatttttagaagaagtgcatactgctttcataattgaaaaatatgtatctttctggcatggagaagggtgcacagtttgaaaattaatacatttaagacatttctagataagaaatatctaaaacaatgtaagaagccttcagatcttcaaataaacttcaatttttttaaagttatggatataaaaatgtctttgatttattttaacacttaaattttaattatattacattttaaagaaacccaaaacagtgctccaattaaattcacagtccagtgagatcttatatctaggtcagattcttcttgtatgttttggaaagacttccatccgtgaactaattcttaatgtatttctttccagtcaggcccagtggggctgcatgaagctgtttattttcaataactagttattccaatgtgttgcttcttgggggaaaatatgaggacctggaacaaacccaggcagaacatgtgactcttcctaactgacgttagtgaaggcagtaactgtatacatatttaattaccttaaagttgtttagaaataaatagagcctgctttgagaacgaaccaagtatcaatcacagaaaatattggtttttgttttgtttacaatttgcgcatggattcttacccatgttttcaattcttagatgaacagcagagtacctttcaggtgacactttatcaagttctgcaatataaatctgggagtgcaatcatgtcatcatttatcttctcaataatacagttatgtgttaaaaattgttttattaagcatatgtaaaataagagattcaaaaaatttaagtctatgtatatttactacaaaagcccatgaggttggcctcattttctgactgttagcttcatcattcaattcttaacttgtctgcttgctagaaactgtcagatttcctcacagatggtttcatttagtgactgctgtagtattcaattatcatagcctgaaacagttatattttcattctgtccactattccatgtttaattatgatctaagatgaattagattctgaaatacaaagtgatataaaacctagtacatttgaccaagaggtgtttgcccaggttgactcgagactaaatgctgatttgaatgggagtggccattctttatgatagcatcagtttattctcaaaatgattccattgactactagaaataaactgttataccttgaaagataatctcagtattaagtttggggggaaacatgacttttctaggattgaaattaggtttggaatatcattgggtagtaggttcagtattattacattttagaacattttcatgatatatattttataaatatgaaatattttttaaaagaaagtagatcaggtgtttagggcctaatttgtttagtctgtgttcactatttcattaattactttttataatgatgtgtggtattttatgttcttagaatctgaatgaaaattgcaaaatacaaaaacttttttcccttctgccaatcttgtaaatagtggttttttgtttcgtttttgccctcttgatctaaaattgcttttgttttcagatggtggccagcagagatctgcaaccccaggtctgtgccactgaacatccagggccttaaacatgacttgggggacttccctgtattcttctttggttctcatgactactactgggtacaccagggcagagtgttcccttatgttgaaggagacaaaagctttgctgaagggcagactagtattaacaagaccttcaaaaagggtaagctggatgatgtttacagtgactcaaaactacaactccggtgtcagtttctcaacatctcctcacctccctaatatttctggtattagagaattttcactagacattatgatcctgtgtccataagcttccagtcacattagaaccaggtttaaaatacatttcaatattgtagactgtgctgtgtatttgaaaggaatttcttcagtgtctttctataaacacagattattctaggaatagtcttttttttttttttagacagggtctcactcttgcccaggctagaatgcagtggcatgatcacagctcactgcagccttgaactccagggctcaagtgatcctcttgcctcagcctcccgagtagctggggctacaggtgcccactatcatgcccagctaatttttgtactttttatagagatagggtttcaccatgttgcccaggctggtcttgaactcctgggttcaagcgatctgcccacctcagccttccaaagtgttgggattatagctctgagccaccaagcccagcctgagaatagtctttttaatcaagtgaagttcctttgcaacagaagagtagtaaagacttgccatgaaaagccttacaactgcttttgcaatgagttgccagcaagtttggctttctggtaagggtaaaatgaatttaaatctattacaaggcaaaaagctgctcttagggtcacttggagacttctgatcattgaagtagagcctcttccctgtggctacagcatgcacagagcatagtgttcagtgagttatatcctatttctttgttaccccatcctggtggtaaacagtaacttccagaaaataattctaaaaagaaaaatctcaggccagatgcaaagcattgggaaggcagcgtaaaactactatcccatcaattttcctttggtttttggtatttacatactttgtatcatcttattggcagcactggaagaagctgcaaaacgtttccaggaattgaaagcacaaagagaaagtaaagaagccctagagattgaaaaaaactcaagaaaaccccctccctacaaacacatcaaagtaagtctttatctctggcctgggattgccaaataaaataagaaacaaagtaagtctttactatgaaagcattgttatttaatagatgagacgaaatgcattactctttagtagttaaagaccctctttgacttgtgcaaacttttgctaattatcacagtcttctgtaaaacagagcttctgttggaagcatcaaatgggagccatagttattgtgctgtgaaaattaggtctttgataagtcctctcatacctagtagcaacatgtcttatgtgaaatcctgttcttgttctaccaggttatcccgccaccaaatgagaatataggtgtttactccctttatttcagagaacccacaaacaagcgtattttctcttgttttcagttatgaaatttccatctagtgaaagtagaaatacccaggataaataagtgaaaattcacatgaggctttgatatttttgtcaactaaatgacaaaagagatggttattaatctcagcttattcatcaggaaagacaacctttctcggagtagcaccacgaggcagtagcgtggatgttttagatgttcctgttcacattgccagatgacttacctgctgcctctctctcgcttgcgattttgttttctaggctaacaaagtaataggaaaggtgcagatccaggttgctgacctgtcagagattccccgctgtaactgcaagccagctgatgaaaacccttgtggcttggaatcggagtgcctgaacagaatgttgcagtatgaatgccacccgcaggtgtgcccagctggagatcgttgtcagaaccagtgctttacaaagagactataccctgatgcagagatcatcaaaacggagcggagaggctggggcctcaggaccaaaaggagcattaagaaggtagcatgggatggtggtggggggtggaagagaccagaacctggcttttcaggaatgcttcagtagggtatagttctagggataaaatcagcaggaatttgtggtaaaatgttaaaactttccatgttgagagtttggtacttcttgagcaaagaagagtagtaggaagaagatagtgataaaatgtgcttaaactttgagtgtccagtggctagtcataaaaaggagagaggggacactggtaatttctatgtgaaatggtttttacttgttttttttattgttttatttttattttcttttaaagacagggtccccattctgttacccatgctggaatacagtggcgtgttcatagctcactcaagccttgaactcctgggctcaagagatcctcccacttcagcctcccgagtagctggatagggtctcactacattgcccaggctggtctcaaactcctggactcaagcaattctcctgccttggcctcccacagtgctgggattataagcatgagccactgtgtccaacctaaaattactcttgacatttttctaccttttaaaaaaaatcagccgggcacagtggtcacagccgaggtcaggagattgagaccatcctggctaacatggtgaaaccccgtctctactaaaaatacaaaaaattagccgggcgtggtagcgggcacctgtagtcccagctactcgggaggctgaggcaggagaatcacttgaaccctggaggtggaggttgcagtgagttgagatcgtgccaccgcactctagcctgggtgacagagcgagactccatctcaaaaaaaaaaaaaaatcaggtttgtaattttaaaatgccatctaatgtagtaaagaaaagtcatagaatacaatcaatacaatacaatacaaaaaagatagcagagtgaaattcttcctacatcccttcaattcttcatctcctcatcagagataaccattgttcatagtttgataggtagccttttataacgttttctatatagttataaacatatataataatacattttttaagggttttctaaacataagtatcagacgttttcttcccattcacacacgatagcataaatacatttgtggcagtacatatagattttacttcattctttttaacagtcttattttagtcatagtaaaatgtaccatatttaacctatttcccaataagtaaataaataacctatttccccaataaataaataatttaacctattcccaataaataaatagatacataaatatttttaaattccataatgaatgttcttggtcatccacctttgtgcatctatttctgtaggtcagattgctcgaagtgaaattcagttattcggtacatgtgtattaagctgcttcctatgtggcaggtattattcttggcacttggaaaacaatagtgaacaagacacatgaaacccttaccttagtggatctgcttgaggagacagatagtaaacatgtcgagtgccattaactgctgtgaataaaaataaagctggaaaaggggctagctggtgacagggattgcccttttcaagtgattggctcagggagacctgaggaggcgctgtttgccgtgtgtgtggtagaaagccatgaaggtgtgtgcaggagaagagcacgtcagactggaggcaggcagctgtaaaggctgcagtgtgctccaggaacagcagggaagttctgtgcctggggaggagccacaggagaggaaagagaggagctgcggtgagaaggtcagccactggctagataggatggtgccttactggccatatctgccatgggatggggaacatctggaggattttactagggagtgacttgatctgatttggtgtattagttttctattgccacacacaaatgttaccacaaagttagcaaattaagacataacacacattttattatctcacagttaatatgggtcaggagtctaggcaatccttaactgggtcctctactgaggacctcaccaggtagcaatcaaggtgccgactggggctgggttctcctctgtggcttgactagggaaggatctgcttccctgcttgcacagttgttggcagaactccgttctctagctatagggctgagagactccagttgtttttgttttggggtgtgtgtgtgtgtgtttgtttgttatgtggttggccaggagctgctttcagcttctagaggctgcccacagttccttgccacatgggattcccagcatgccacttgcttccttacagccagcaggggtgagagacactacaggaagatggacactgaagtcttatgtcataaactcacataatcaccccgtcacccatgccatattctgttggttagaagctaatcacaggtcctgctcacatgcaacaaggggaggaggcgacaaaatggcatgaacaccagcaggcaggcatcaccggggccaccttgagagtctgtctgccacacttgggtttcgaaaggataactgtggctgtggtatggagaacatatgataaggaggaaagagcgataaagggagaccattagagtcgcccaggagaaagacaatggtgacgtggaatcactggggttgtagttgagccaggagggaagtggttagatttctgacattttgaaggtagagccaacaggatttgctgatgtattggatatgtggactgggctgcttggtcaaaggccaaccacatctaaaatgtcattgtataatgcaaaatgttttatattactttagtgccatgcatatcatatatacaaatttttgcctatgatttcactggagtttatggggccatcctgaaatccatccactttaatattgtgttaacaccttttaatagtagttgcacttattctgaaatgtgttgtaagataacttattaaacagtcttgattttcctgctctttagctagcacttgagggtttgctgatgtaagacaattggtcttttacaaaatagctagaaatatacaatcactgaaaagtgtaataatcacagagacattatagcaacatgaaaaagatattcggggtatttacaggaaagaagtccaatatgaaatggaatgtacacagtcagtccccttctttctccacagaacagattcctgaaaatgtgtgccaaactgggaacttcttgttatgaagttgtttctttctcagaaaaaattttaaggtattaaatattgaatgacagcctctttgctgtggtctattttaagatattaaatattgagtgacagcctttttgctgtggtctattttaaggtattaaatattgagtgacagcctttttgctgtggtctattttaaggtattaaatattgactgacagcctctttgctgcggtctttcaggacagatctgtagcattttttaagttaatgaatttgttacaattttttttcacagttgaattcatagttaatggtttttaagtctagtcagcatctctttgaggctaaagatctgtctcaggacatctgaaatatttccatctttatttacagtggtatcaagtttatgagacttgctctcatatttgatatcagcacttaatttttctgtatttactcattttcatagactaacaagtataaaccataataaatcatgatcaagcttttaaagtcacaaaactatttcttcaaatgaaatcttaccttgaatcccaatgtgtgaaaaaagaagtagtagagctgatttggttgaaattctcctctatgagtttccactaaagaaaatttgccctaggccgggcacagtggctcacacctgtaatcctagcactttcggaggttgaggcaggtggatcatttgagattacgagttcgagaccagcctgaccaacatagtgaaaccccatctctactaaaaatataaaattagctgggtgtggtgatgcacacctgtaatcccactacttgggaggctgaggcaggagaatcgcttgaatccaggaggcggaggttgcagtgggccaagatcacgccattgcactccagcctgggcaacaagagtgaaactccgtctcaaaacagaaaatttgccctaacatcattaagtatagtaacagtatgtggcaatgcagccaagatggcaatacaatctgctaccctttgatatcatatcacagtgcaaaatgttgttcatcagctgataacaaagtccaaactggatacaggaaaagctatttgaggctgacagtgtatataatagaaaaatgtgcagaacagtcccatgtcctttgtgagaaaggactggaaggaaaaagtgaaggaaattaactgtttatggtgctgcagttacagatgaattttggtttgtttttttttccttgaaacagtcttgccctgtcacccaggttggagtgcagtggtacagtcacagctcgctgcagccttgaactctcgggctcaagtgatcctcctgcctcagcatcctgagtagtggggaccacagccatgcaccaccacacctggctgatgctttttattttttgtagagatgaggtttcactgtgttgcccaggctgatctcaaactcctggctcaagcagtcctcctgcctcagcctcccaaagtgctaggattacagcatgagccaccacacctggcctgtttttctaactgaattccatatcatagcttatacagtagataaaaacaagagagagaaaaagccagtggtcacctttggtagtgactgctccgcagctgaagcatatgtagctccgtgaagcagaccggtgcttctcgctgagctcactcgccacatgccaccaaaggaagaggcagggaggttagggcccttctagtttaaccattcatttcttttcccttattataatctatttttatcaatagaaaagattaaatgttttaaagaccattggcttatgttcctaatgattttccacaatcagaaaacgtgatgcagtacttctttctcttcagctagggactaccaacagttctgtgatactaagagctatgagaagggctagtggaaatttgtggggtggggggtgggagggagaatggggagaatgggacagaaatctgataaaataagccaatacctttttgtttttcaagacatttattttcctctaaaatatattagtaagattggtaagtccttatagagaatattgacctagattgaatgagcagtgcttttgaggtgaaaaggttaatgattatgtaattataaacacaaaatgttgaatgtacaatatttgctcttattttaaaaggagcttatcactgtatgccttttagaacagcttaaataataaatagtggcaataccagatgcagacaggacgtggagaaagtggatctcatgaactgctggtgggaacataacgatggtatagcaactctggacaatagtttggcagtttccttaataaggaaacatacactcaccatatggtgcagcagacacactcctggccatttatccaggaaaatgaaaatctatgtccacacgaaaactttcaccagaatgttcatagcagctttatttgtaaagccaaaatctggaaacaatccaaatgttcttccatgggtgaatggctaaacaaatggcagaaacactactcagagatttaaaaagaacaacctgttgatatactcagcaccttgggtagatctcaagagaatctgcctgatttttttctttaaagccaatctcaaaaggttctgtactatatcattccattataaaacattcctttttttgtttttttggttttttgagacagagtcttgccttgctctgtcacccaggctggagggcagtggcgcgatctcggccctctgcagcctctacctcctgggtttcggcgattctccagcctcagcctcctgagtagctgggattacaggcatgtgccaccacgcctgaccaatttttgtattcttagtagagacagtgtttcaccatgttggccaggctggtctcggacgcctgacctctggtgatccacccgccttggcctcccaaagtgctgggattacaggcgtgagccacggcgaccagccaaaacattcttgaaatgacaaaattctagagatggagagcaggtgagtgactgccaggggttaggatgagatgagtggaggaggggtgtgattgtaaaggagtgagtatcacaaggaatctctgtggtgaggcaccagctctgtgtcttgattgcagtggtgattacatgatcctacgcctgctaaaactgcatagaattatatacacacacaaatgtatgcatgtaaaattggtaaaatctgagtaaagtctggattataccaatgtcggttttctggttttgatattgtactgtagttatgtcagatgttaccactggggaaactgagtgaatgttcccaagatttcccatgtactatttttgccacttcctctgaatgtcagtaattacttgaaaagaagcttaaaaacaaaaacagagctcacttgtttcagattcagatctcttccaggtctcaccccgaaacctgcatagccaccaactagtaaaattctgttataatatagcttcaaaggctagagttagctttatccccagatcccagcaatgccccacatgttgtcacttggactataaaaatagtattgtcagcaagaaaaggcaagcagattgtcaccttctgaggcacttataccagaaaaataatgccacctgaatgcctatgaataaataaccatttctttctagggttgaagttatattttcagggttctctttaattattttgggttatacatgtgtcattaagcaatgctttatataatacactgattttaagttacatattgcacatttatctccagggtgaatttgtaaatgaatacgtcggtgaattaattgatgaagaagaatgcagattgcgaatcaagcgagcccacgagaacagtgtaactaatttttatatgttaactgttaccaaggtaaaattgctttttttttttgtaagaaaaagggatttgtttttgtttttgtttcatagtcttaatttgaactcagtttcttttaatttgatttttcttcaggcagagcataatgatttgcagtagctagtgtgctgcctactataatgtgccaattataccagagtaaaaaaatgaatgatactgaagctttgcacgtcatgtaagacagcactgtgagtgaaaataaaaccaggagcagggttagcatatctggattttagtctgagctctttgtcaaaaaagtcctgggcctcagtttctttattactgaaggagagaatcaactctgtgattctaagttataaaccaccgttattaaagttctactggagccaaaactccaaattgttctgtatattaaaacttttcggcagggcatggtggcttacacctgtaatcccaatactttgggaggctgaggagggcagatcacatgagcccaggagtttgagaccagcctgtgcaacataggaagaccctgtctctacaaaaaataaaaataaagttagccaggtgtggtggcacgtttctgtggtcccagctcctcaggaggccgaggcaggaggatcacttgagcccaggaggtcaaggctgtagtgaactgtgatcacaccactgcattcctgcttgggcaatggaacaagaccctgtctcaaaaaaaaaaaaaaagaaaataatgagcgctgtcataagaaaaatgacagtaaagctgctagtttaatctctgcagttgtaagacctatttgatacacagtacatccattatctcagttaatttttttgtcagttctctgatttacagaggacaagaagctgatgtccagccatgataagtgatttgttgactattttgttacacttttaagaaccaagactagtacccatatttcctgtgttctaggctatcatatctctataactgagattcagaatatcattaaagtaagaaatggagcttaaaagtattttaactgatacgtcattgtttgaaagttgtacaactttcataaacatatttcataaacatcagttaaaatgtcgttctttatgattgctgggatctggctcctgcaaccctatcctccctgccagtggccccttcagccaccgtgacagcacttgagaggctcagttctgtggagcttatccagattattagagttcaaattcaggaaacctgaatattcagcttttcaatgtattgtgaactttaagtaaaaacagagcaaacagataagcactggagaatatatcctacacagtagtccttccatcagacagctctccaagttttgtttctcatttttctttcttctttctggcctaagctctcatgtatcccctcctatactagttttgcttcctgcttggagcagaaaaggaaggctgacagcaaaacaacagagcagttatcagaactttgagatctctaatcagaaaataccattcctaaacctctggcccactaatcttctaaatagcattattccatggtctatttgtttctagaagcaaacttaaaaagcaactaaatcccactttatcctaattactttgacttgaaggtcatcaaataaaggagagaacttagtaaattacccaggcagcctcacatttcctgatctgtcagttgtcaaacaccagttggtagcaaaatgctgctgcctgtgatccttgactgagttggatgtttctgggagagacttaatttatgtaaaaggtacttttcttttctttctgaaggaccgtataattgatgccggcccaaaaggaaattattctcgcttcatgaaccacagttgtaatcccaactgtgaaacacaaaagtggacagtgaatggagatgttcgagtgggactatttgctctctgtgatattcctgcaggtaaaaaagtgactcgttccccatgctttcctccctaggaagaaagaatatcctatagagctaggacatggttcttcaaggcttgatgcccaagaacttatttaaataagaggaaggttatatttagaaaacgtattcaaataaaaggagagttatatttagaactgagtgttagctgccagtgagaggtaaaaatctataacctcaaaagggaatttagtgagaacttttatgtaagagcgggtctgacaggattctgtgtccgcagtcctgctgaacgaattctccaagttagctgctgtccatagagtgtaaccagatgttttagctgttgttttctttttaaaacatattaacagtaatgagcttgtgttaacagcagctggttccttagttgctgggatcttttgttgttgttttcactttgaaagatcattctgtttcaaattagacataaaagcctctgaagccaaagctgttttcatttttccttacctatccagcatctgaacaataaaacttggtttctcctttgtttagtttgtagaaaaattggtgagaagagaaatgttatagctaaaacagatttaaactgtgtttctagaactcattgtggattgtttaagcccagctagaagaaagcttaggaggccctagtttgagtccctggatctttggtgtatgcagtaaaccttcattttggatctttatttgatcataatataaggcagtaattactggaaatagtattgttacaattccatggtcatattgttcatttagaaactagtgtgagttagctatagaaaagaaggctgaactggaacctagtctcctgagcatagattgcagattcttagaccctatcactttggtttcaaccactgctgtgaaaaggacatgacttcttttgaggatgtgtagttttgctgtcattgttcctgggtggggatgtttttctccttttctttttttaccatcactgttatcaatgaggtagaacactggcaagggaaacgccttcatgccaaaatgatgtctctttttttcattaggggagtgtgcctgtgagagcttttctcttccccatgactcgagtttgaataattatttctcctgtgtttcagggatggagttaacatttaattataacctagattgtctgggcaacggcagaacggagtgccactgtggagcagataactgcagtggttttctaggagtgcggccaaaggtcagtcttgcaggggagcgcccccagtcaacaggcgataaggagtagggctgttaagaagtctgtttggccgggcgcggtggctcatgcctgtaatcccagcactttgggaggccaaggcgggcagatcacgaggtcaggagatcgagaccatcctggctaacacggtgaaaccccatctctactaaaaatacaaaaaattagctgggcatggtgatgggtgcctgtagtcccagctactcgggaggctgaggcaggagaatggcgtgaacccgggatgcggagcttgcagtgagccaagatcgcaccactgcactccagcctgggtgacagtgcaagactctatctcaaaaaaaaaaaaaaaaagaagtctgtttgtgtgtttgtgaccatctcaggaacctgctggcaattgggcacctggattagtttgtgggtcatcagctgggcttatcgaacatttagactgtgactttccaaggaagcttgtttcagtaaggtctgttaggttctgagaatgtatttcatttcagattgaatatgaaattagcaaaaagctaatttaaaactttttaaaaacccacaaaatactaaaggccactgaattatacactttaaaatggcgaattatgtggtatgtgaattatatctcaatgaaaaaaattaacaggttgtctaaaagttgcttggatttaccactacccttgcaattaaaaataaaaagcacctggctgggcgtggtggctcacgcctgtaatcccagcactttgggaggctgaggccggtggatcacaaggtcaggagttttaagaccagcctgaccaacatggtgaaaccccatctctactaaaaatacaaaaattagctgggcgtggtggcacgcacctgtaatctcagctactcaggaagctgaggcagaagaatcgcttgaaactgggaggcagaggttgcagtgagccaaggtcgcgccattgcacttcaacatgggcgacagagcgagactccatctcaaaaaactaaataaataaaaataataaaaagcaccctattcaaaagtcagtgaaggccaggcgcagtggctcatgcctgtaatcctagctctttgggaggccaaggcaggcggattgcctgagctcaggagttcaagaccagcctgggcaacacagtgaaaccccgtctctactaaaatacaaaacattagccatgtgtggcagcacgtgcctgtagtcccagctactcgggaggctaaggcaggagaattgcttgaacccaagaggtggaggttgcagtgagatgagatcgccccactgcactccagcctagtgacagagtgagactcagtctccaaaaaaagtcaatgaaaggctgaggcggaggatcacttgagcccagaagtttgagaccagcctgggcaatgtagcaagaccctgtctctacaaaaaaaattacaaaaattagccaggcatgatgacatgcacatgtagtcccagctacttgggaggctgagacaagaggattgcttgagcccaggaggtcgaggctgcagtgagccaagattgcaccactgcacttcagcctggacaacagagcgagaactccatctcaaaaataaaataatttttaagtcagtgaaaacaaaactttatttttgttatagtatttgttgcagcataaggcctcctgatgtttttaggtaattgtacaacagatgaatttaaatgaatgcaaggttgcagggttttcctgtgtccagcttcatgcactgtctgtgatgtttgaaactatgatcctttctttcctgccagtcggcatgtgcgtcaacaaatgaagagaaggcaaaaaatgctaagttaaaacagaagagacgaaagatcaaaacagaaccaaagcagatgcatgaagattactgttttcaatgtggagatggtggagagctggtcatgtgtgacaaaaaagactgtcccaaagcataccacctcctatgccttaacctgactcagccaccatatggtaagctggaccttcaggaccctttccctaatttgtgtctttgccaactatgtgtaactcacaatatattccatgccatgggataggaaatgttgaatagaacaaacaatagcgaaaaattacgctggcaaaaatctttccccttacacatttgggataccttgtggttcctcaaggattggtttcttgtatactgttcccgtaggtgggtacctgtggcgttgggttttggccagtagctcacatccatcctaaactgtacacccagatctatgtttggttgaaatttggagttgtattcaattgaattccatctccaatgagagaagaaggaacctgggtttttcatgggtaatcaagacaggcactaacttgggcacttctccttcttcctccccatctccccgaattaggaaagtgggagtgtccgtggcatcagtgcgatgagtgcagcagtgcagctgtttccttctgtgaattctgtccacattcattttgtaaagatcatgaaaagggggccctggttccctctgcactggaaggccgcctctgctgctcggaacatgaccccatggctcctgtgtcaccagaatactggagcaagataaaatgtaaatgggaatcacaagatcatggagaagaagtaaaagaataaatgtgtggtgtcccctcctttctatttaagtgaaaaaagcaaatagatcatgcatttaaaaagaagagactgctacagtgcatacagcctttgccatcggaactgccttattaaagcaaaaatgggaaaccagttcatgcaggcagaagcagttggtggtgtctggtttttgtttgatttggttggtttgggattcttttgtggagggttaaattcccttggtcttttcttgccttttattgtgcttcagtgccattgcagcttgaaaaagaaatgtttttgctgttaaaataagaacaaagagaaaagtaagttttgttaatgagataaatttaaagtctaagatgtgttccttggttgtataaagcaaaagtagccatcattcctttatttattttcatttttaggaatttcaagaagtgtagttcaatagtctaatcaagtgtgtgtgtgttttaagtaggaatctgagaaagccctctaggaaagggtatgataagctttatatacctctttactgagcagtaggtaggctcacttctctttcccttcaaaatgcttttcataggcttagagaagggctctatggaagtattaaatctggcctcttgaaaacaatgcctcggtggattttacctctgtggtcttaaacaaggtgggctttgtactatggtaactttacctagaagggtatatggtgtgtttccttggtggaaggaaaaaaaggaatggatgtgctcactgatttttaaaacgttttccattgacatggatggtttgggttttggatgaagtgcgtttctgtggatatgaagcatagttggaatggtcactcctattttcctgacactgattaaggcagctaaagggggatgaaggcataaaccaaaatttggatcatataagcaccattttctgtccaattttattgtagaccctggtcttaattggagagaattacaggcattttattttttgtctctgttttcctctcctactcaaacatttcttttgtcatctgaccattcagtcatgtttcctggtaaaaccacacaagtgagtttgaattgtatttgaatagatctttttggttgagttcctaatttggggggtgaaagtagtaggggcatccccaggttacatgtaaagaatttctattattatccagtacttaagattgctcccattgagtaaggggaagaacttctacttttacagggtgcataagagccacacaaacacacttcatcttaggaagcacttggagaaaactcccaagaaagtcagtgttagcaaaaatggttgatggtgatgcttgactcttatagatgcgagtataccaagatgtctgctcaccaaactcacttgcttttaatgcttaggaatatgtatattccagtattccttgtatgaaaataattagtaatgtcagacattgttgtaacactgtactaagtagaagtctagggttagcttgaatgaatgttaactttctctgtgaattttgactgcttacaattgctggtacctggtagcatttattttccctcaagtacctagtaaccttatgaaggtagggagggtagatgctctaccacattccttcagctgtattgagtgttccatttgcttatcaatttagagctcttctatggaaagagggtgaaaatctgttttgtgcctcttttttttgtatgtaaatgtgcaattatactggattttctcttgtaaaaaacactacaattcttttactgaagctcctaaactgccatttgcctgactccagcaattaattctgcggtgactcattgggcttccagtacttctgttgattagatatggtcccaaaagaaagagcaaaatggaaaatgcgatccatgtcaccaaatataattgctacaagtaacatgaaatacagctcaccaaaacactaaactttgctcttgagcaattatatagtttgatgtccttttaaaaaataagaaaagctaggttttatcatactaaaattttattttgtatatgatgtttggttttttaaacttactaacataaggatttcctttaatattccaaatacagttcttgaaacagtatccaacatgaaatcttatctccttgcttttagacttagtgctatttactatctaaagacttttctatggtaagccagggtacatcctatatactacagataccttaggtttcagtatttttatgcagcttcttcattgtgtcacattttgttttcatatctgtaacagagctctgctgaaattaaaaaaaaattatgattaataggattgtttcaccatttcagaaatcagagtagaaaacaaaatagctgccaggtgcagtggctcacacctgtaatcccagcactttgggaggccgaggtgggcagatcatgaggtcaggagtttgagaccagcctgaccaacatggtgaaaccctgtctctgctaaaaatacaaaaaggagccgggcatggtggcacatacctgtagtcccagtttctcaggaggcagaggttgcagtgagccaagatcacatcactgcactccagcctgggtgacagagcgagactccatctcaaaaaaaaaaggtaaccatagttctgaagtctttggccatgaatgttctttaatggtctaaaaagcggttttagtcatgctggtgccaaggagttctcctcacacctccatagcgtcaatgttgacctatttgatatatttttaagttgcagattatagatgcagaaagagaaaattgtcctttatgtgtgcatgagtatacatgcactgtgcctgtgatacaccaatgaaatattccaaaagacattgctcactcatagtctgaagttggtatttgttaacttttaaatctatatgtggtcagagtgtaagtggctggtttttattcttgtccaacaatgaaataacttaaagcagcatgggctaatggtggtattttttttaaccacatgttaatttgttgaaggaagaagtgaacataagatttttgataatcagcctaaagcttcagaaactggatcagtaagagctaaagatgaaatcctgggaaactttctcaggcactgtgcaggggagggaggggctggaccgccactgctgcgagggaagaatcagaagagctgcctgtggctggctgagaagggcaaggtggatggctcttcattcctggaaggctgaagcagccagaggcagtgattcacctctttaatgtctaatcagggagagatacaggagtgaggtgggttttattttcatttttgttttaacaagttcccactcttatcttaattctcaaaaatgatctggcctcatctatagaactggctgagttggggaatcatttaaaatttgggattttctgtacaagtcaagaacatatgtgaaagctaaaaaagtaatggaggcagggggactgctcccagctcccttctgccatttacacaaaatatttgaaaacatgtctgtaaataacgttgtggaactgagatattgagtatctaatcatgtaaaggaccctcagatgggacaggctattggacaactttcctggttcatgaagtggaatttcctttttgagtagtttcttgcatggtgtattccaataggtcaaacccagacctactgtttgcaaacaggccatctgtagagaatacaatctctggactgcccaggacttgttgcttgtctttcatttcattttaaatacaaagctcttcctttagcattcaccttgaagtcaaggtgttggctgccacatgccatgtcctcttaacaagataagaaaacagtggctatggagccctcacagctgggaagctgacattctatacttccatatgagaaaaaggacattggaaagttgctttatttctgggcagcgtagactaaagttacttttcacaaggctgatgcatccagcctcccccagttgtccaagttggtgcagacatgaattgatgaatggaaacactttcctttggcctagggccacctagaattggtctctggttatttgtaaaacaaaaagtagaacttgcttccattttcagatggactagggaatactataattagacagctttgcaatgaattaacaaatactgaaaagttggaaatgtgtatatactgaaatctcaccaacttttacctggggtggggtaccaggagaaagggaaccccctttctcctggtaaagggtaaggggggggataatgtttaccacaggtacgaaatagtcactttaacattgagacctctgcctcattgaattcaggttttttaagtacttgaaactcttcagattctccttattttagtttctttttacatttatgaagtagaaagcattgttttgtaaactgttttgaaaataaatagcctagtctcttatcctctttagcgtggattaaaggtgaagttctgcaaatgggagagtgttcacagtagatagctcagattgattgaacacatttgaggaagagactcctgcatgagataccagcatttttacaaatactttttatgtacattctttattttgtcattttgtcaaccctctccccaagcacatcttctttccttttactatgtctatgtagggaaaaaaacaaaacaaaaaattgcacttacgttacactcccaaaatgtgggtaatccgtgtctttcaaaaaacatttctgttttttgttttgttttggtcagtccattgcataagtgacaagtttgggtgcttgtggcacgtatgtatgaagcgggagggggatgagaattgcctgtccttcagtaggctgtaaaagtaatttacatgtaagtaaaaagggaaaatagaatagatgccaaagtcatttattcagtccttagttttcttatgtggcattactgcatctgctagttagtgagaaagcaccctcagcttttactgctcccctccctgcctgccaacacacttgatgtgtgcaaacagccctcaagtatctgtcagatgacctatataaggtattgaataaggtattcttgtcagtttagaaatggactggataaaacttacttggttgtcattattttatctcatttgtcctgttacatgccctatgttaagataattatattgccactaataatcaagatgctaaatgagtattacaactggctaatatcattttttatatacaagggtatgtgtatatttggaattgatatgagaaactcatttgtacccatttgagtgatattgcacaacaaacacagatacctacagactccgttttcattttctcgtgttctttatgataatgatctttgtagattggttatttctgtactttatctgtaataaactttgtagatcctgtgaaccattactttgcctaaatcacttgagacttgagtctttaataacaaagcatcaatattcactaaagtcaatctcttttgagtttctgtgacttggctagaagctcttgacactaagggattagtgttaattttccctgggggtgttccactagggcattactgtataatgacttgatgttgccacatagacttcaagatatataatattttgaggattttgttgattggcctatgttttattgcatagtgtgaaacgtgtaaagcttggttaacctgtatatagatagcttattgttgactagttatagtgtatttagggttgcctgtaatatttaagcttctttactgatgtgtgtgctggtaggaacatataatttttgtacattatatttactgagatgttgccttttttattttacaaatactttggaattccaatgtgttttttgcttccgtgaggattaatttggaaaggtttttaatgacattccactgatttcagattttgcttgagattgacttcaataaattgtcctgtatgttccaaattaaatatgtgggcttgttctttgccaataattttttgctacaacactctgggcaggaggccatcctgggtgggaggactaaatgacacaatccagccaacctcaggtagtgtagcttcctgcagaatgcggctgtgttgctaaggaacgaggatctgagagcgggctgtttggttttccatttagaggcgaggtcccgggagaaggctgctccccgcggtggtgtggttgggccgtggagacgagctgctgatgatggaccgtacgccgacctactcggctggaactggggcgctggctccctgctgaacgcaccagagggcagctccgctggctttgcgtaccctttgccagacgatgccctcggcacagccgccaggccgtcttcctggggagccgccggagcgcgggcaactgggagagggggcggtgcccagttcccggcccggccctccccgcggaggtggccacgtcagcgcagcgtcgctcggagctcgcggccggatggggaaggcggcggcggcggtggcctttggggccgaagtgggcgtgcggctcgcgctgttcgcggccttcctgtaagaaagatccacggccgggcccgggcggccccgcttcccaggcaggcgggcggcacggggcggcgggtcgggcagtggggaagcggggaggaagccaggcgacctgctctgcgcttctttgttcccctctagggtgacggagctgctccccccgttccagagactcatccagccggaggagatgtggctctaccggaacccctacgtggaggcggagtatttccccaccaagccgatgtttgtgcgtggagaaagatcgtctttcctccctccccatgacccggcttcccgcgggcacctgtgcgttttccaccccgagacggcctttgtagggacccactgcccactccgctgctgtgcgctgggttccgcctcctagggctcgagtgtttaagatcctgattgagagaggagggtgtccgagcctctttgggctgagacaacgttttcccgggcgctctgtgcctcagcctgaggtaccggggcccgagccgcacgggcgctgctgttcactggtggcgctgcctggcgcccggttacgcgcactcagagaccttatgttagctccagtgagtcctgctgtgtcacatccctctttcctgtaggagcacgagtgtggcttttttttggattgtttttaacctctgacattctgattcaggttattgcatttctctctccactgtctctgatcttcctggccaaatttctcaagaaggcagacacaagagacagcagacaagcctgcctgggtgagcgctagccctttcgggccggtttcttcgtgctgggaacctaggaggtcgttgtgggattcagccacggtgagcctgtgtggaggccactgagttctgcattcctaaaggaactctatccccgcgggagaggaaaatagcactgcagggacttggttacgcaggctacacggcaggcagccctgtgcctaaatgcactgggttatttgtacctcagaaatgtctttggcctagtacaaaagttctcggctacaaaagagtgatcactgaggaccctaattatttttgtgcccaggcctggttggattctatccatctcagaaacagcacggctgctctcataacgaggccatgaccatacctttcctcctagacagatcctttcaactaatggctttgctttgcagctgccagccttgccctggctctgaatggcgtctttaccaacacaataaaactgatcgtagggaggtaagtgacaacagctaaccaccccagcatctgcctcagcccttacccaccagaacagagaggttaatggtgtccaccacacgtctttctcattcttttctcctttatcttcactctgatttttcttttgtcattcaacgcttactcccttccccatacctcagtcctccaggtgacacctgggctcttttctgcctgaacagcatttcccaccaacggccacagcagtcggtcagtgtcctcttgagcacctcctgaagctgcagtgtcatttgctgtttgccctaaaaagtaatcatgtgctggaatgggcgtttttcccctaatttaaatgctcaccttgaaaggcttttctcttagtgtggtgactatactaagccagttaccttattttgcctggggcactatttgaccaatagttaacaggattattaatgtctgctacaactgaaaaataatttctggagttaatgatttacgttccaaccatgctgctttcttccaggccacgcccagatttcttctaccgctgcttccctgatgggctagcccattctgacttgatgtgtacaggggataaggacgtggtgaatgagggccgaaagagcttccccagtggacattcttcctgtatgaatatcatatggactctaccctatgcttgttttcacatcattgaatttaacctagaaagctagtagggatgggaaaatctgactactcttgtttctacaatttggaaaatccccccttctttagtaactccacagtttaacaagtctgagccttgactatttgggtaaatattacagaacagaaaggtagtttaccttcatgagatttgcacatttaattgttatattatttgcctagatcctgcaatcttgtactagcaataaaaatacctttaacgaagagtttctatgtgtcaggtactttgaagcattttcatttcttacctaattatagctcacaataatccaatgaggtggggactattgtatttatgagtcccatttatagatgaggaaactaaagcatcaacaagttgatacatatagctagtataccgaaaactatactcagataaaacattaactttggggcactaagtccttcatttttctttttgtttccctttccttcacaatgacttacactataagtatacacaaaaaaggattaaaacaccctcatggccgggtgtggtggctcatacctgtaatcccagcaattgggaggccaaggcatgcaggtcacttgaggccaggagttcaagaccaggctagccaacatggtgaaatcccaactctactaaaaataaaaaaattagctgggcatggtggcacacacatggagtcccagctactcgggaggctaaggcaggagaatcgcttgaacccgggtggtggaggttgcagtgagccgagatggtgccactgcactccagcctgggcgacagagcaagactgtctcaaaaaataaataaataaaaacatactcatgcttcctagcctcctatgtggggatgaatgaggtagcttcctttaaaagacaaaccacttaaaagtttttcttgttccagttgcatttgctggtctggcctttgcgtccttctacctggcagggaagttacactgcttcacaccacaaggccgtgggaaatcttggaggttctgtgcctttctgtcacctctactttttgcagctgtgattgcactgtcccgcacatgtgactacaagcatcactggcaaggtaagcaaagtactcaggctatggaagcttgcatatttcactcattttattcctagcacctagcacagaggagatgcttactaaatatctgctgaatgaacaaattaatgagtatggatggtctgggttctgtactaagtacatttaaaattataggaaagataagacaaaaagagtttaccaaagataaacatcctaatttttccattatttgaagcattgtaagttcaagttaaactgcatctacaggaaatttaaaacctcaaagttcaatttactctcttaaaaatcaggttcattgtcataggacttttgttcaaaaacataagtaaaattcaagaaaacataaaattataattaaaccaaacaaatttaagctgaatgctatagtaagtaaaatatccaaattacagaacacctggcttggcgcggtggctcacacctcagcactttgggaggctgaggcaggcggatcacctgtagtcaggaattcgagaccagcctggccaacatattgaaaccccgtctctactaaaaatacaaaaattgaggccaggtgcagtggctcatgcctgtaatcacagcactttgggaaggtgaggtaggtggatcacctgaggtcaggagttgaagaccagcctgaccaacagtgaaacgctatctctactaaaaatacaaaatcagctgggcatggtggcacacgcctttaatcccagctacttgggaggctgaggcaggagaatggcttgaacctgacacaattccaaaaaaaacgctggaggtattgcccacaggtcctcaggaaccctattttaaatttttaaataaactagttttttgcaaagagaagcaactcttttttttttttttttttttgagacagagtctagctctgcgcccaggctggagtgcagtggcaccatctcggctcactgcaacctccacctcctgggttcaagcaagtctcctgcctcagcctcctgagtatctgggattacaggcacatgccaccacgcccggctaatttttgtatttttagtagagacagggtttcacttgttggtcaggctggtctcaatctcctgacctcgggatccatctgcctggtcctcccaaagtgctgggattacaggcg

SEQ ID NO: 1020 - DNA, 3400 bp, Homo sapiens
gggggctttgtgcgcggcggcggcgggagaggcggcggcggcggccagcacggaggcggaggccgagggggctgtgcacaggtcgccgcggagaggcgtgcgaattccgagccgagcgccgaggaccgtgctacccaggccgggctgccagccgcaggctcctctctggcagcagcggcggcgcggcgacccccgtccctcggcctccccttcccatcccacctcccgagccttcctcttcccgcagcacgcccggcccggcccggccgtggccctcctcagtgccggccgccatggcagaggcgtccggcgcggggaaaatctagcccggggatttcatgcggcctagctcggttccgcctcctcctcgcgcggccccagcggctgcccgcaccccagccccactccgggcctccgtgtctctcctgtgatcgcactgacacggccggggggttagaatggaacaaactgaaggcccgatgagagaaagggaaagttaaggatgctggagcagaacaatggatttctctttctctttcatgcaagggatcatgggaaacacaattcagcaaccacctcaactcattgactccgccaacatccgtcaggaggatgcctttgataacaacagtgacattgctgaagatggtggccagacaccatatgaagctactttgcagcaaggctttcagtacccagctacaacagaagatcttcctccactcacaaatgggtatccatcatcaatcagtgtgtatgaaactcaaaccaaataccagtcatataatcagtatcctaatgggtcagccaatggctttggtgcagttagaaactttagccccactgactattatcattcagaaattccaaacacaagaccacatgaaattctggaaaaaccttcccctccacagccaccacctcctccttcggtaccacaaactgtgattccaaagaagactggctcacctgaaattaaactaaaaataaccaaaactatccagaatggcagggaattgtttgagtcttccctttgtggagaccttttaaatgaagtacaggcaagtgagcacacgaaatcaaagcatgaaagcagaaaagaaaagaggaaaaaaagcaacaagcatgactcatcaagatctgaagagcgcaagtcacacaaaatccccaaattagaaccagaggaacaaaatagaccaaatgagagggttgacactgtatcagaaaaaccaagggaagaaccagtactaaaagaggaagccccagttcagccaatactatcttctgttccaacaacggaagtgtccactggtgttaagtttcaggttggcgatcttgtgtggtccaaggtgggaacctatccttggtggccttgtatggtttcaagtgatccccagcttgaggttcatactaaaattaacacaagaggtgcccgagaatatcatgtccagttttttagcaaccagccagagagggcgtgggttcatgaaaaacgggtacgagagtataaaggtcataaacagtatgaagaattactggctgaggcaaccaaacaagccagcaatcactctgagaaacaaaagattcggaaaccccgacctcagagagaacgtgctcagtgggatattggcattgcccatgcagagaaagcattgaaaatgactcgagaagaaagaatagaacagtatacttttatttacattgataaacagcctgaagaggctttatcccaagcaaaaaagagtgttgcctccaaaaccgaagttaaaaaaacccgacgaccaagatctgtgctgaatactcagccagaacagaccaatgcaggggaggtggcctcctcactctcaagtactgaaattcggagacatagccagaggcggcacacaagtgcggaagaggaagagccaccgcctgttaaaatagcctggaaaactgcggcagcaaggaaatccttaccagcttccattacgatgcacaaagggagcctggatttgcagaagtgtaacatgtctccagttgtgaaaattgaacaagtgtttgctcttcagaatgctacaggggatgggaaatttatcgatcaatttgtttattcaacaaagggaattggtaacaaaacagaaataagtgtcagggggcaagacaggcttataatttctacaccaaaccagagaaatgaaaagccaacgcagagtgtatcatctcctgaagcaacatctggttctacaggctcagtagaaaagaagcaacagagaagatcaattagaactcgttctgaatcagagaaatccactgaggttgtgccaaagaagaagatcaaaaaggagcaggttgaaacagttcctcaggctacagtgaagactggattacagaaagggtcggcggaccggggagtgcagggctctgtcagattcagtgacagctccgtctccgcagcgattgaggaaactgtggactgagattcctgtacaatttcatcccagaaactccagacttgtagtctccattcaaatgatttttttttttcggtttgagctggatgggtacagcttaaatcatgggtccagcctaaaaaccaccatttaacttacactgatcaatttcaacatggactgtttttggttttttgtttttaaataaagcatcattaatgcacatctgcaggggtttgccaaacagcccaaactgtatacattacaatcattaaaagttcttattttttttaatattagtgccgttatcatggagaacagcatgacagctgtctttggcagtctgtcatttttctagcattttcagaaactcatcggaaatggcggtacctgtgtttcccttcgaaagcctctcagtacagcactcctgttcctctgttaaaactccttgttaatccagtgatcttttaggccaaggaaatattttgtgatggtgttctgggtccatacaccagcaatgaaggagatagatttgtgtacttgtgttttttaatcagcattaacatgggcaggcaccctcatttatagatgtcaggaaacattcagtgaaaaacttgtagaatgggatgtgataacgaggttccagtaatctgagcagtctaacgaggcccacctcctccaccacagaacgtggctatgttccaagtgctactctcactcagcctgttgcggatcttcatggcctcaggagacttgtttctccatgggctcttctggactgcacacttccaccatagcttgctgggttgatctagatgtctgtttgttgtatggaaattttgggggaaaaaatccaaaacacaaactgtgggttgaaatattaaccgtctccttggttccttggtattcaccgtgcctgatctgcacatttcatcgtggctgtttctgtatagcctatactgcattagccc

SEQ ID NO: 1021 - protein, 637 aa, Homo sapiens
MDFSFSFMQGIMGNTIQQPPQLIDSANIRQEDAFDNNSDIAEDGGQTPYEATLQQGFQYPATTEDLPPLTNGYPSSISVYETQTKYQSYNQYPNGSANGFGAVRNFSPTDYYHSEIPNWIKPSPPQPPPPPSVPQTVIPKKTGSPEIKLKITKTIQNGRELFESSLCGDLLNEVQASEHTKSKHESRKEKRKKSNKHDSSRSEERKSHKIPKLEPEEQNRPNERVDTVSEKPREEPVLKEEAPVQPILSSVPTTEVSTGVKFQVGDLVWSKVGTYPWWPCMVSSDPQLEVHTKINTRGAREYHVQFFSNQPERAWVHEKRVREYKGHKQYEELLAEATKQNHSEKQKIRKPRPQRERAQWDIGIAHAEKALKMTREERIEQYTFIYIDKQPEEALSQAKKSVASKTEVKKTRRPRSVLNTQPEQTNAGEVASSLSSTEIRRHSQRRHTSAEEEEPPPVKIAWKTAAARKSLPASITMHKGSLDLQKCNMSPVVKIEQVFALQNATGDGKFIDQFVYSTKGIGNKTEISVRGQDRLIISTPNQRNEKPTQSVSSPEATSGSTGSVEKKQQRRSIRTRSESEKSTEVVPKKKIKKEQVETVPQATVKTGLQKGSADRGVQGSVRFSDSSVSAAIEETVD

SEQ ID NO: 1022 - DNA, 5471 bp, Homo sapiens
gggggctttgtgcgcggcggcggcgggagaggcggcggcggcggccagcacggaggcggaggccgagggggctgtgcacaggtcgccgcggagaggcgtgcgaattccgagccgagcgccgaggaccgtgctacccaggccgggctgccagccgcaggctcctctctggcagcagcggcggcgcggcgacccccgtccctcggcctccccttcccatcccacctcccgagccttcctcttcccgcagcacgcccggcccggcccggccgtggccctcctcagtgccggccgccatggcagaggcgtccggcgcggggaaaatctagcccggggatttcatgcggcctagctcggttccgcctcctcctcgcgcggccccagcggctgcccgcaccccagccccactccgggcctccgtgtctctcctgtgatcgcactgacacggccggggggttagaatggaacaaactgaaggcccgatgagagaaagggaaagttaaggatgctggagcagaacaatggatttctctttctctttcatgcaagggatcatgggaaacacaattcagcaaccacctcaactcattgactccgccaacatccgtcaggaggatgcctttgataacaacagtgacattgctgaagatggtggccagacaccatatgaagctactttgcagcaaggctttcagtacccagctacaacagaagatcttcctccactcacaaatgggtatccatcatcaatcagtgtgtatgaaactcaaaccaaataccagtcatataatcagtatcctaatgggtcagccaatggctttggtgcagttagaaactttagccccactgactattatcattcagaaattccaaacacaagaccacatgaaattctggaaaaaccttcccctccacagccaccacctcctccttcggtaccacaaactgtgattccaaagaagactggctcacctgaaattaaactaaaaataaccaaaactatccagaatggcagggaattgtttgagtcttccctttgtggagaccttttaaatgaagtacaggcaagtgagcacacgaaatcaaagcatgaaagcagaaaagaaaagaggaaaaaaagcaacaagcatgactcatcaagatctgaagagcgcaagtcacacaaaatccccaaattagaaccagaggaacaaaatagaccaaatgagagggttgacactgtatcagaaaaaccaagggaagaaccagtactaaaagaggaagccccagttcagccaatactatcttctgttccaacaacggaagtgtccactggtgttaagtttcaggttggcgatcttgtgtggtccaaggtgggaacctatccttggtggccttgtatggtttcaagtgatccccagcttgaggttcatactaaaattaacacaagaggtgcccgagaatatcatgtccagttttttagcaaccagccagagagggcgtgggttcatgaaaaacgggtacgagagtataaaggtcataaacagtatgaagaattactggctgaggcaaccaaacaagccagcaatcactctgagaaacaaaagattcggaaaccccgacctcagagagaacgtgctcagtgggatattggcattgcccatgcagagaaagcattgaaaatgactcgagaagaaagaatagaacagtatacttttatttacattgataaacagcctgaagaggctttatcccaagcaaaaaagagtgttgcctccaaaaccgaagttaaaaaaacccgacgaccaagatctgtgctgaatactcagccagaacagaccaatgcaggggaggtggcctcctcactctcaagtactgaaattcggagacatagccagaggcggcacacaagtgcggaagaggaagagccaccgcctgttaaaatagcctggaaaactgcggcagcaaggaaatccttaccagcttccattacgatgcacaaagggagcctggatttgcagaagtgtaacatgtctccagttgtgaaaattgaacaagtgtttgctcttcagaatgctacaggggatgggaaatttatcgatcaatttgtttattcaacaaagggaattggtaacaaaacagaaataagtgtcagggggcaagacaggcttataatttctacaccaaaccagagaaatgaaaagccaacgcagagtgtatcatctcctgaagcaacatctggttctacaggctcagtagaaaagaagcaacagagaagatcaattagaactcgttctgaatcagagaaatccactgaggttgtgccaaagaagaagatcaaaaaggagcaggttgaaacagttcctcaggctacagtgaagactggattacagaaaggtgccagcgagatttcagattcctgtaaacctctaaagaaaaggagtcgcgcctcaactgatgtagaaatgactagttcagcatacagagacacatctgactccgattctagaggactgagtgacctgcaggtaggctttggaaagcaagtagatagcccttcagctactgcagatgcagacgtttctgatgtgcagtccatggattcaagtttgtcgagaagaggcactggaatgagtaagaaggacactgtatgtcagatttgtgaaagctctggtgactctctgattccttgtgagggagagtgctgcaaacactttcacctggagtgcctgggattggcatcacttcctgatagcaagttcatctgcatggaatgtaaaactgggcagcacccatgtttttcgtgtaaagtgtctggtaaagatgtgaagcgttgttctgttggtgcttgtgggaaattttatcatgaagcctgtgtccgcaaattccccactgccatctttgaatcaaaaggattccgctgtcctcagcactgctgctctgcctgctctatggagaaagatatccacaaagcaagtaaaggccgcatgatgagatgtttaagatgtccagttgcctatcactctggagatgcttgcattgcggccggaagcatgttagtatcctcctacattctcatctgtagtaatcattccaaacggagcagtaattcttctgctgtaaatgtaggcttttgtttcgtttgtgccagagggctgatagttcaggaccattcagaccccatgttcagttcatatgcctataagtcccactacctactgaatgaatcaaatcgtgctgagttgatgaaattacctatgattccttcttcgtcagcttccaaaaagaaatgtgagaaaggtggaagattgctctgctgtgaatcgtgcccagcttccttccacccggaatgcctaagcatagaaatgccagaaggctgctggaattgtaatgactgtaaagctggcaagaaactacattacaagcagattgtttgggtcaaattgggaaattacaggcaaatggtggccagcagagatctgcaaccccaggtctgtgccactgaacatccagggccttaaacatgacttgggggacttccctgtattcttctttggttctcatgactactactgggtacaccagggcagagtgttcccttatgttgaaggagacaaaagctttgctgaagggcagactagtattaacaagaccttcaaaaaggcactggaagaagctgcaaaacgtttccaggaattgaaagcacaaagagaaagtaaagaagccctagagattgaaaaaaactcaagaaaaccccctccctacaaacacatcaaagctaacaaagtaataggaaaggtgcagatccaggttgctgacctgtcagagattccccgctgtaactgcaagccagctgatgaaaacccttgtggcttggaatcggagtgcctgaacagaatgttgcagtatgaatgccacccgcaggtgtgcccagctggagatcgttgtcagaaccagtgctttacaaagagactataccctgatgcagagatcatcaaaacggagcggagaggctggggcctcaggaccaaaaggagcattaagaagggtgaatttgtaaatgaatacgtcggtgaattaattgatgaagaagaatgcagattgcgaatcaagcgagcccacgagaacagtgtaactaatttttatatgttaactgttaccaaggaccgtataattgatgccggcccaaaaggaaattattctcgcttcatgaaccacagttgtaatcccaactgtgaaacacaaaagtggacagtgaatggagatgttcgagtgggactatttgctctctgtgatattcctgcagggatggagttaacatttaattataacctagattgtctgggcaacggcagaacggagtgccactgtggagcagataactgcagtggttttctaggagtgcggccaaagtcggcatgtgcgtcaacaaatgaagagaaggcaaaaaatgctaagttaaaacagaagagacgaaagatcaaaacagaaccaaagcagatgcatgaagattactgttttcaatgtggagatggtggagagctggtcatgtgtgacaaaaaagactgtcccaaagcataccacctcctatgccttaacctgactcagccaccatatggaaagtgggagtgtccgtggcatcagtgcgatgagtgcagcagtgcagctgtttccttctgtgaattctgtccacattcattttgtaaagatcatgaaaagggggccctggttccctctgcactggaaggccgcctctgctgctcggaacatgaccccatggctcctgtgtcaccagaatactggagcaagataaaatgtaaatgggaatcacaagatcatggagaagaagtaaaagaataaatgtgtggtgtcccctcctttctatttaagtgaaaaaagcaaatagatcatgcatttaaaaagaagagactgctacagtgcatacagcctttgccatcggaactgccttattaaagcaaaaatgggaaaccagttcatgcaggcagaagcagttggtggtgtctggtttttgtttgatttggttggtttgggattcttttgtggagggttaaattcccttggtcttttcttgccttttattgtgcttcagtgccattgcagcttgaaaaagaaatgtttttgctgttaaaataagaacaaagagaaaagtaagttttgttaatgagataaatttaaagtctaagatgtgttccttggttgtataaagcaaaagtagccatcattcctttatttattttcatttttaggaatttcaagaagtgtagttcaatagtctaatcaagtgtgtgtgtgttttaagtaggaatctgagaaagccctctaggaaagggtatgataagctttatatacctctttactgagcagtaggtaggctcacttctctttcccttcaaaatgcttttcataggcttagagaagggctctatggaagtattaaatctggcctcttgaaaacaatgcctcggtggatttta

SEQ ID NO: 1023 - protein, 982 aa, Homo sapiens
MDFSFSFMQGIMGNTIQQPPQLIDSANIRQEDAFDNNSDIAEDGGQTPYEATLQQGFQYPATTEDLPPLTNGYPSSISVYETQTKYQSYNQYPNGSANGFGAVRNFSPTDYYHSEIPNWIKPSPPQPPPPPSVPQTVIPKKTGSPEIKLKITKTIQNGRELFESSLCGDLLNEVQASEHTKSKHESRKEKRKKSNKHDSSRSEERKSHKIPKLEPEEQNRPNERVDTVSEKPREEPVLKEEAPVQPILSSVPTTEVSTGVKFQVGDLVWSKVGTYPWWPCMVSSDPQLEVHTKINTRGAREYHVQFFSNQPERAWVHEKRVREYKGHKQYEELLAEATKQNHSEKQKIRKPRPQRERAQWDIGIAHAEKALKMTREERIEQYTFIYIDKQPEEALSQAKKSVASKTEVKKTRRPRSVLNTQPEQTNAGEVASSLSSTEIRRHSQRRHTSAEEEEPPPVKIAWKTAAARKSLPASITMHKGSLDLQKCNMSPVVKIEQVFALQNATGDGKFIDQFVYSTKGIGNKTEISVRGQDRLIISTPNQRNEKPTQSVSSPEATSGSTGSVEKKQQRRSIRTRSESEKSTEVVPKKKIKKEQVETVPQATVKTGLQKGASEISDSCKPLKKRSRASTDVEMTSSAYRDTSDSDSRGLSDLQVGFGKQVDSPSATADADVSDVQSMDSSLSRRGTGMSKKDTVCQICESSGDSLIPCEGECCKHFHLECLGLASLPDSKFICMECKTGQHPCFSCKVSGKDVKRCSVGACGKFYHEACVRKFPTAIFESKGFRCPQHCCSACSMEKDIHKASKGRMMRCLRCPVAYHSGDACIAAGSMLVSSYILICSNHSKRSSNSSAVNVGFCFVCRLIVQDHSDPMFSSYAYKSHYLLNESNRAELMKLPMIPSSSASKKKCEKGGRLLCCESCPASFHPECLSIEMPEGCWNCNDCKAGKKLHYKQIVWVKLGNYRQMVASRDLQPQVCATEHPGP

SEQ ID NO: 1024 - DNA, 3747 bp, Homo sapiens
ggtgcatgcctgagtcccagctactggggaggctgagatgggaggatcacctgagcctgggaggttgaggctgtagtgagccatgattgtaccactacattcaagcctgggtgacagagtgagattctgtctcaaaaaaaaagaaaaaatgcaataacattttattatttttgtaataaaaacaaccactggacaaaatatgaatgattttaaaggaagctcttatggaagcagattgatatgtgtcaggacactgcttattttgcaaacaccagttttaacctgagacgatctctaacttgggaaataaaaaggaatgtcaaaactatttcgtgtgttggtggtgatgataaaatcttgttgccacagttgttgtgaaagtaatcaggagtttcaaacagataagcattgaagataaaaggtatttgccctgtgtcagaattatatcagttatctgttttagaaatatttaatgtctatgcatatctggatatgaaaattgagttcaaaacattttagtttaatcctttttcagttgattagcctctagcctatgagaatagtaacaccttctaatcccctcttttataattttaggcccgatgagagaaagggaaagttaaggatgctggagcagaacaatggatttctctttctctttcatgcaagggatcatgggaaacacaattcagcaaccacctcaactcattgactccgccaacatccgtcaggaggatgcctttgataacaacagtgacattgctgaagatggtggccagacaccatatgaagctactttgcagcaaggctttcagtacccagctacaacagaagatcttcctccactcacaaatgggtatccatcatcaatcagtgtgtatgaaactcaaaccaaataccagtcatataatcagtatcctaatgggtcagccaatggctttggtgcagttagaaactttagccccactgactattatcattcagaaattccaaacacaagaccacatgaaattctggaaaaaccttcccctccacagccaccacctcctccttcggtaccacaaactgtgattccaaagaagactggctcacctgaaattaaactaaaaataaccaaaactatccagaatggcagggaattgtttgagtcttccctttgtggagaccttttaaatgaagtacaggcaagtgagcacacgaaatcaaagcatgaaagcagaaaagaaaagaggaaaaaaagcaacaagcatgactcatcaagatctgaagagcgcaagtcacacaaaatccccaaattagaaccagaggaacaaaatagaccaaatgagagggttgacactgtatcagaaaaaccaagggaagaaccagtactaaaagaggaagccccagttcagccaatactatcttctgttccaacaacggaagtgtccactggtgttaagtttcaggttggcgatcttgtgtggtccaaggtgggaacctatccttggtggccttgtatggtttcaagtgatccccagcttgaggttcatactaaaattaacacaagaggtgcccgagaatatcatgtccagttttttagcaaccagccagagagggcgtgggttcatgaaaaacgggtacgagagtataaaggtcataaacagtatgaagaattactggctgaggcaaccaaacaagccagcaatcactctgagaaacaaaagattcggaaaccccgacctcagagagaacgtgctcagtgggatattggcattgcccatgcagagaaagcattgaaaatgactcgagaagaaagaatagaacagtatacttttatttacattgataaacagcctgaagaggctttatcccaagcaaaaaagagtgttgcctccaaaaccgaagttaaaaaaacccgacgaccaagatctgtgctgaatactcagccagaacagaccaatgcaggggaggtggcctcctcactctcaagtactgaaattcggagacatagccagaggcggcacacaagtgcggaagaggaagagccaccgcctgttaaaatagcctggaaaactgcggcagcaaggaaatccttaccagcttccattacgatgcacaaagggagcctggatttgcagaagtgtaacatgtctccagttgtgaaaattgaacaagtgtttgctcttcagaatgctacaggggatgggaaatttatcgatcaatttgtttattcaacaaagggaattggtaacaaaacagaaataagtgtcagggggcaagacaggcttataatttctacaccaaaccagagaaatgaaaagccaacgcagagtgtatcatctcctgaagcaacatctggttctacaggctcagtagaaaagaagcaacagagaagatcaattagaactcgttctgaatcagagaaatccactgaggttgtgccaaagaagaagatcaaaaaggagcaggttgaaacagttcctcaggctacagtgaagactggattacagaaagggtcggcggaccggggagtgcagggctctgtcagattcagtgacagctccgtctccgcagcgattgaggaaactgtggactgagattcctgtacaatttcatcccagaaactccagacttgtagtctccatgcaagatttctttgtcggcggcttgataaacagtttctttgttttcgattttgatttcgccaatcatcattattggcattttcctgcctggtttcttcttcaagactctgaacaattgctttaacagtcaaatgatttttttttttcggtttgagctggatgggtacagcttaaatcatgggtccagcctaaaaaccaccatttaacttacactgatcaatttcaacatggactgtttttggttttttgtttttaaataaagcatcattaatgcacatctgcaggggtttgccaaacagcccaaactgtatacattacaatcattaaaagttcttattttttttaatattagtgccgttatcatggagaacagcatgacagctgtctttggcagtctgtcatttttctagcattttcagaaactcatcggaaatggcggtacctgtgtttcccttcgaaagcctctcagtacagcactcctgttcctctgttaaaactccttgttaatccagtgatcttttaggccaaggaaatattttgtgatggtgttctgggtccatacaccagcaatgaaggagatagatttgtgtacttgtgttttttaatcagcattaacatgggcaggcaccctcatttatagatgtcaggaaacattcagtgaaaaacttgtagaatgggatgtgataacgaggttccagtaatctgagcagtctaacgaggcccacctcctccaccacagaacgtggctatgttccaagtgctactctcactcagcctgttgcggatcttcatggcctcaggagacttgtttctccatgggctcttctggactgcacacttccaccatagcttgctgggttgatctagatgtctgtttgttgtatggaaattttgggggaaaaaatccaaaacacaaactgtgggttgaaatattaaccgtctccttggttccttggtattcaccgtgcctgatctgcacatttcatcgtggctgtttctgtatagcctatactgcattagcccaagagattgttgctttgtaactttttgcactattgttttggctggatttgtattacacacagttttaaaaaaaacaattccacactattctctgcct

SEQ ID NO: 1025 - protein, 637 aa, Homo sapiens; identical to SEQ ID NO: 1021

SEQ ID NO: 1026 - DNA, 50947 bp, Mus musculus
  misc_feature (1)...(50947): n = A,T,C or G
gttagtctgtgggtttctccgccatcttggatgattgaaagagtgtccagcccacggtgaacagcaccatccttaggtaggtgggtctgagctgtgtaagaaagctacctgtgtataggcccaggaaccaaacagtgagcagcttcccttcatagtctctgcttcagttcctgcctcctgagcctgtcttggggttccggtcctgacttccctcagtgataggatattatctggaagtgtaagctaaaataaaccttttcatctccaagttactttcggggttttgttttttgcagcatcagaaagcaactgtggatgctatgggatgagtgtcagtaaggcccccccccactctagcattgcagcccattagtatgatgcaaagaaaagggtggtgcttttaggacgcacttagactgtgggggtgaagccattgtgtgaatctggtctttacattggttactttgcatatcactgtgacagaacacttcatttatggtggcatccttcacagaggccacggctgatgagcaggtcattcctcagcagagggaacctgttgtaggagtgcctcgaacagggagctgctggtcacatggcagcaggaccaggaacttgagtgagcaggctaaaagcagacaggggttcgacctttcagaggtcctcccttagtaatctacgtctggtagccaggcctaccttcacaaaggctccactgaagccagctgaagagaaagtgaccaagagcaagagtctgtggcaggcactgagagtgtaaagtggtctcatccaggaggcatgcttcccttggccatgggaggacccagaaatgagatgccatctatggatagaatgacccttggtgacttaccagacaccaagtttttttcatcagtattattactatagaaaaaatgttaatacagtatattctgatcataattcctctccctcatcatctcccagatcctgtccaggttctttctcatccagtttcattctctatttagaaaacaaatagggcaccaaaacaaacaaacaaacaaacaaacaaaccagaataaaacaaaccaaacagagacaagcaaaacaaagaaaaggcacaagaaacatacatatatgcaggcattcccacacgcacacccccccacccgcttgaaaaagaaaaatcagaaactacaatagataatcaaaagataaataatgtaaaaaacacacaacacactacaagacaaaaatatcactaaaaataccattttgtgttggcatctactgctgggcatgaggccttccttaagagtggtttgtatacccagtgaggtgacattggagaaaacaatgtacatttcctttgtgagcagctgtcaattggagatgtcttctgggctagggataggagctcaatgatcagttcccctctctcagtgctgggaccatgtctgggtttgaacccgtgtagtctgtgtgcatgctgccatggtctttgtgggtacatatgtgcatccgccctgctgtgtcacaaacacattatttcctccatgtcctccaccatctttgtctggtagagtcattcttccttccctccacagatttccctgaggggacggatatcaggaaacatcccatttagggctgagggctctgagttcttttcctctctgcacacggtccagttgtgggtctctgtattcattcccatctcctgcaggaggaggaatcttcttggataacagctggctgggacactgatctatgggtattgcagaatcagacaccaaccctttcggtgcttcaattctggatttcccggcctctagaaagtgagcaagatattcctgctctttataaataaaccatgtatgctatttttgttatagcagctggaacagactaaaacatttggatcccacactagatgaaaggtccctttgtgtggcttaatgtgatttacatttcaaagggttctcacctaactacttctgaatgggaaaaaaaagatatacacttcttttgcccaaggctctgaaacagcgtggcctaaggcaggcactagaccacaagtcaaattatctagtatgtagaccttaccttgcttcttgtctctcctaactttctcagctactgtccttgctgcttgttctagtcttacatccttgtcttgattctgatctggctatgagctgttataatttagtcctgaatgtacttgaaaaaaaccatgcggtaaaaaccttgttccccagaaggtgatgtgtagaggaacatttaaaggtagggcctagtggaatgtcttcagattgttggcggtgagttgctgaaggaaacgccaagtccctgccccccacctcatccatctttccttcttggccatgaggtgagccattttgctctgccccatcctccaccatgataggctgcctcaccaacagcctgacctatcatgagcttggatctccgtatgctataagaatggacgatgactaacacatagactcttatcttgtgaagtctgcacccttccctttataacagtgaatttgtggaccatcttgggatgggttaggtcacctgagctaaccaaatcctgggggtcttcatatttagcgtgcttgatcttctccttcaccaaagtcacccctaagcctatttatctactttagtcttttaaacaaaacatagaaacaggcactctctctacatcactcattattctataaagtgtaatcctaaacatactgtgatttattcaatagttcaggttctaaaaacatcatcacaaaggaactgagagtgtgccagagaaaagcgttccatgcgacttgtcatctaaaggacagccaagctgtataatcttgggaatgtacacatgaaacagagccacgtgggatgaaggaactggcaagggcatctctcttcaaaggatcagtttacccaataaactatcaccaaggttaatgactcctttccatgtaggctgatatggaaactttatttttaaatatcactcttgaatagagttaatatcttgttagtccctgccttgggagaccaggcctcagactcacgatttggccctctgagcaattggactgcaggcataccaccacattcaatttgttatcaacatccaattatactgaatatagtgccaagagcaacgcacataaatcccaagtagaatgcatagcctttgggggagacatgtaagataaaggtacacagtatcttggggagggtcattaaagatgaagtaagaaaaataatgagtccaagtaagtcatcagaggaggtgacatttgtataaaagccagtaaaaagagagtggagtaacttgctggagtctacagaatatcccaagcaagagagacagagaaaaacgctctagaatgggccaggacaggagtgaaggatggggaggccagtagcagatgaggtcagagacattagaagtggggggaggggggctaggtggggaaaggggtaggtcaagcacggatcttcagggcatgtgtttcttctgagcggtgagtagattatgaggggtgtgcagtttgatttaagacaaggcttcaggttgtgttgtttgtagagaaggaaatggtggaaagctagagggaggggctgggctgaaggcttttggtttagtctgtttgagtgatgggcatggctggggacaaagaagagctatgaggaaggtgaaaagatgtaacattctggatgtagctttgaagttagtaaaagcaaaggagtttcaggtgaccctgagatttttgacccctatggacatcccaacaaattttaaatcttaagtctgtgctaatattcttaggactgtaggaagaatttagagataataatgctactaaataatgtgaaaacctttgccaaattattagggctttgtttacttatttatgtttttttctgaatataacttactttatatccatctcttctggagaaaaatggtattgtacttaaataataacaaaattccttgccttagttttgagacaagagatgctattgtcttgggtcatgatcctgagtggggttttaggtggattaagtgggaagacttgatgcaggatatattctaaaggtacagtcaaagggttattggtctggccagtcagagagaaagaggtggagggagacagtgttttggtctgattcagctgcaataatatatatatatatatatatatatatatatatatatatatatcagagacaaactagtttgtgaaccatgattctggctgcatggagtctgtggtgtgtgtttggggtatgtctgcacgtttgggttctgctacggactcccttctgggtccacagactgccagtttcttccaacatctccacatgacagtgtccgtgcaaaacacatacctcttgtctcaaaggaataggaaagcttattctgctaccatatatgagtggccaggatcggagaacacatactcaggtcgtcccaaatcccatgttctaacatgtaaagggattcatgaagcagtcagagtagcagagcaaaggaagccataaatcagggcgtttttcaaacacagggctggaaacatcttggagacaggttacagggaacaaagaaatcttggctataggtctcagactccgcctcatgatattttatgttggtaaaagctagaggtctatacattctaaaagagacttacctaacagttacgaggatctacatgacatacagagatgggcaataagtggctccttaggggtctaagacagccaatgaggatttggatctggatctccaacattccaaactctccataatcattgaaatgtgaatcagtcactaagacctgtaggatatttaatggaagctttcttctgtccctgccacaggaactacgacaacaatagtaataataacaattgttaaggatagaaagagaccaagcaagccctctgacttcctagaaaagctcagtcactcaggaaggctccagtgtcacgtgacttcccagactcccgattctcacacacaaaaggctatgctttacccgatgaattttaagcagatgccttcagtccacaactgaaacatgcagggagaacaaaagcatggtggtcagcgtgaagaagaggttcttggtgttaacaggggagcagcttaggagatggtatctccgatctgtgggtgggctccttccgtgattacctgctgacttcctactcatgccagagacttatcagtgaaccatatggacagaaatcccatatcccaagaggcttacactctagagggttttgtgtgtgtgtgtgtgtgtgtgtgttcagatgataacagcactaaggaggcaggaaatacccaggacttcatgggtagttagttcttagaattgaactagtatatgaagggcatcgccgtgcttatttgttcttaagagcctaacacttgggaaacacatccatttgaattaataaaattaataaaattgattgcacatttagtactcctagagtcttttaaagagttagggcaggcacccttcctaaaacccttgagtgctcctcacagggacagcaagcagctctagagagtggtgagctgtactgtaacagttgcccctgcaagtaactgggtttcgactctatctgtttagaatcacctctatttaacctactcaggttgtccccattagggcttttcacttagaacaccatcgcagcgatcatatactgtatttttagcatcttatataaacttccttacaaatgcctgttacataaccaggccccccaacccccaccccaggctttcttccagcctctcctagatttatggtagaggtaagcagatatgtatgggttagtggacccctgtccggtgactgaatgttccagagactcactccacctgctctgagcaggactgagtgtgcagcaacaaagtacacttctcaaggtatggtcccttccctttcagcctctaccttctgttccatttgcatcaggtgtcacactgctgtgtccctgggcttgggaaacactgttctacctgccattgtgttcgcataaagctctccagctgggctccaggggcaactctgagcagtttgtcctctgtacagatggcaaatgggaggcaggtgacctcttcccaccgcccacggaatacagtcagcattaaggtgtctggattcccttccttagagggcttctatcaagccagcagtttctcagccctgctttctcatatataatgaatgagactactattaggtggattttgaaaccctgtctataggcggttcacctatagaaacactactggatataggcagattgtataatactttatgatttagtgttcagagcattagctagattctagcatcaggaatgtcattaacctgaaccaggaaatggactgtatatatgtatgtatgtatgtatgtatgtatgcatgtatgcatgtatgatgtatatgtgtatgtacgattgaacacagagctacctagacatatattctctccctttgtgttatattccccgggtccacggtcattcagttttctttctttctctatgataacggggaaaacaaatgctaagttcactgactgtacaaataggaggttcaaatgtcctcctgcgtagtgtgcaagcaaaccattgtgtcaatgttattcttaacagtctagctatatcaggacaaggcatggggtgcggcagtgggcaggagggataagcagggaatgatggtgataagcattttccaaattaggaaacagatacgcttttcttctgactctcttacataactgatctattttagaagacaacactaaaaaaaaaaaaaaaaaaaaaaaaaaaaaaaaaaaaaaggaaagaaaggctgaaacgaaatacaaacctcctgattttactacttcattagcaaagaaatgacaaaaggcagtgatgctacaggaagaaaggagagagcccttgaagcctgtcaggcacctcctgcccagaggctggcttgcaggacgccctcttttttcctcccagccggctggatgagtcagagaccaaaggctaagttttagaaaatgaatgaaggtactaatttctctctcccttgaatttaagaggcagttgcatcaaagggcataccctttctagtggcacagagagacggaagagtgacctattacaatgctagcgattacagtgctgagacttcctgattcatcgggggaagttgtgctgcatacaaaggccacagtggaaatacagcctcttacataaataagttacataaatgagagagaacaggttatgtaaatgtataaaccagcaaacatgaattataaccatttacaaatgccatggagagcaggacacagttcctcctaccatcccctccctccttattttgtcataactgtgtcacttcattccatgccagattcgggtgtatttgtcatagtcagtagggaaaaagactgcaaaggacaaggcgggcgatccctcatctcattttctgagacacacgtttttctttagagagaaatctcataacaaacctgatttgaaactgtaactgagaagacctatttgtttaccaatttattattatactttgtctaatcatgaatgcagttcatgaaatgtttgctagggcacagtctggaaactgcctgggcaagaatgaagtgtgcaagtgaatagtgtgtgtgtgtgtgtgtgtgtgtgtgtgtgtgtgtgtgtgtgtgtatgtgagtgtgcctgtgtgtgcatgtgcgtgtgtgcgtgtgcatgtgcatgtgtgtgtgtgcatgtgtttgtgggcgcacacatggcaagaatgaagcatgcaagtgaatagtgtatgtgtgtgtgtgcatgtgcactcgcgcacacccatatgtgtgtgcacgcgtgaatgcattatactggttagattttttttaagtctccagtgagtgtctcggcatctaactcacatcattgttctgccttggctatggttccatgcttgggggcttgcctagaagacaggaagacccaggcttgattccaaagctacacatacaaggtaaacgccattgcccatgtaacttagatttaaggttctcctcataaccaattctccgtgctccccagatgagaaggaggtgctccctgcctggctgcaccttgcttccagactgtctgaaacaggagcccgggattttgcttttgtttttaagtcaactcttctttctctagccctttgttcccgtcccctctttcttttctgaagtttgcttattgtgtagcagaaagacgctttcaaatctttgtcacctgttctgtgtaagcaggatctcgtgtgtttgcagacctcgtgtaaaaaaaaaattgaagaaagataactgttgattaaacattatatacgatattatcaccgtgagaagatcttaaaatctctttgtaatactgactgtatgatttcagacaaatatatttcctttcctgttaccaagcatttgaaaaagaaccaaaagccttaaatctcttcctacattttccacccagtactctgtaatcaaacctataaatatttccattgagaatattaaactcgatgctgtcacatttaaaggaactagaatccattacatacgagccaaactgtcttcagtcgacaaagctgcggaatgcttgcattgtagtgatctggtttctgccacagggaaaatgtttttcttctatattctcatttaaaaacccttaagcaactgtgggttcgtgtgtatgaaggttgtggagcccatctgaggaacctggagactttcactctctaaggtgtgctttgtttatttaatagtttaatgggggggttggtgtattgcactttttaaattaaaatttaaaggtcactcacaaagtatcgggcttcttttggacagttcatttcttcgtttgaactcttaataaactttatcacaagtcagcactaaccaaaggaagtggtctctggacgtggaatgtgtgtgtgtataaagttggcagatttcagttttaagtctcaaagtaatcacaccgtgcattcacaatccctttgcctgttctggccggccgtaacccagggcatctagacccacccaaagtttcctttctatggccaggaggagtcggagtacctactcaggtgctgcaggtttggggtcacagcactgctggtgcacatacgaactgcacagcgcccaagttataggcctggggatggacctcggttacaagaggtgtcagctcgaaggccgcccaggagacttcgggctttgttcagtcacgagccaagccctcctcgtcagagaagccaattagatccccgctggggatcatctgatctcacgtccctctccaggaggggctcagaaagggcgggaccagccggccagctagggtgaactaggaggccggccgcgtgtcgggaggccgggcgcagaagccaaggcccgccccgctccgcctcgctaagcctcgcccctcctctgtaggccccgcccccaggggctccccgggcgcgcgccgccccgccatgtccgcgcgccacgcccccctgctcgccggccgcgtgcggagccgcgcgccccggaggttcccggaccgtggcggcgggcggcggcggcagagcagccctgtgcgggccatgtcttctccggccgtggcgagggcgtccccgggcgggaatcgggaggcgtccggcggaccgcggagccggaacgggccgtgggaagtgggcnnnnnnnnnnnnnnnnnnnnnnnnnnnnnnnnnnnnnnnnnnnnnnnnnnnnnnnnnnnnnnnnnnnnnnnnnnnnnnnnnnnnnnnnnnnnnnnnnnnnnnnnnnnnnnnnnnnnnnnnnnnnnnnnnnnnnnncgcctcgggtcgctagtggactgcctggtgttcagctaccggctccgccacgggctgcgctggagcgcggcacccgcggcgggcgcggccgggctgctcagctgcctgagctgccggggcttcctaagcgagccggtgaccgtgccgtgcggccacagctactgccgccgttgcctacggagggagctgcgcgcccgctgccgcctgtgccgggaccgcctgccacccgccgccgccgcctcggaggggaccccgcggccgccgcccctggccgccgccatcgccgacttccgaaccagcgtcgtgctcaaccacctggcggagaagtggttcccgggccagcgcgagcgcgcgcgggcggccggccgcctcggggaactgctgcacgaagggcgctaccgggaggccctggccgccgcctgcgacgccctgcgagcaggtgatgcggggctgcggtgtggggccgggcgagcggggatcgcgagtgtgggagggggcggcgccccggggtgcttcggtcacggtggggatcgcctgggagctgcaagtgacgcggcgcggggaggggcgcggatgcgaggttccctcgtgcgcgcgcccagcggggacctggggccgcggagcttgggcgcggggtgggtgggggccgcaggcttccctcagtactctggccgggaaccccagccggggtgggggcgagcatccccgggcttggcgggagctcgggggataccgtgtctaccttggtcgtgcactaaagtcaccggggcaattagaagccgcgggagggcagaattgcataagctgggtgggggggcgttgtgtaacgggtgacgttcagtgggcgtggcgggagcccggcgcgggcaccggcatcgggaggcccagcgacggcccaactccgagttggtggccggctgcccccgaggtggtcacctcttcttacctgcaggatctcttgctcctggaacctcctccacctgcctgtctcatatcctgcttcctccgcccctgtgctgctcccatgtacccctggtgttggtagagaagtagcctgcctgaggagtttgccttgctcacagtagacctgtgaggggaagctttgtaggtcttttgtttatattttcgtatccaagaaacagcagcttggtcccgtctcctgcttagagcttaagttggcttttaagctgggggttggggggaagagggccatgtaaacttagtaaacccgagagttcctctttagatcctggaaagtggttgttctctactgactggggaggggaccttatctagaaaagcacgtagagacatcttcgaatggccacctcttataggagtcctgtcagtacagacatctggtggcccttccaaggatgtcactaaacattcctaggctcacagccgcctatgtgaaagactgatcaggcccaaatgtcaactttatcatagttggtcacctgatgttggccatgctttgtgtctgctgcctaccacgagaaattacttataggaaatcattgacattgggaatttttaactgatttaagtattagataagttataatcctataactgaaattattatcttgactcttttagtcatcctgagctagtgacagtagcttcaggaatatctttctggcatgttttcattgtctcccagaagcttcatgagcaagcagtaataaactaagatgacaaacccagaacactttggagtccacagttctgctgggggtgactctggatatctgggtgaataaagttgagtgggggagctggagccaactgaccagtcatccagtatcaggctgcggtcagaccttaatgaggaagcagagactggacgggtgacttaccaacagtcacttgggtggtggcttgtctggacagcttagaccctccactttccaaccttctgtgcccagtattgagattctagggtctaccgggatatcatcttgaacagaaaaagctgggaatgatgaattcttttgtttccaagcttcacagaccaaacgtgagatttgcttacaagctgtggaaccacccctttttcaggacttgaatgcaagtctcttcttgcctttcactttattatgttattaggtttttatttttcttatttgtaggcttgtcaaaaaccagtaattctacacctgattgtgtatctcagcgatactaaagtgataatatttttcccttgaattctttgtgtgagataaaaggagaatagttatagagccaaacatatttgagttggtagagggcaattgtatgtggttcataatttatgggcattaataagagtaggcggatagctccggggtagcgtgcttgcctggcacatgtaatgttctgctctgtatctctaacctcccgaacaagcaacacagtcactctcagaaatctgtttgtccgcttgttaaggttaagttttgtttgttggtttggtttggtttggtttggttttttttttttcttttggacttggtgagttattatctatggcagcatttgaaaggcatttgtatcactgctcaactctagttattaatgacactgtcctttttggtaatgaaaaaaaaagcccttgctgtatttttttcatgtttcttagaatgaaacaaatattattagaaaaaaaaatctagtctgcagttggcccccacacaaccaaacttaaacttgtcggcagaaaaagaaagcccaggaacccttgccaacgtcagaattcccattgcgattacataagggtctgttgcattgaaatatatttagataacatttaatccattgatcttttggtattaactctcagatgtttcataactttcttcttagtattcaaggagcttatgtaaaagtcttttctgcatggagtctttatactggagtcttttgaacggatcccactgtggagtggagtctttttattctggattttttacactgacccctctctcctgtgttctccactctccacatgaagacagaacggtgtggttgaccatttgaactggctttttaaaaaaagtcaaagtgtatgtgcgtgcgcgtgtgtgttgtgtgtgtgtgtgtttgtgtacaattttttatttaaattgtttaaggaaggtattttttttttagttttttatgtttttcatttatttaccgttttgctcatgcatacatacatgctgtggtgtgcatatggaagtcagaggacactgtgggaatgagagagagctttcattgtcagacctgggaagaatggcttggcagcaaatgcctttgtccatctcaccagcccagactttgtctttttattattaggtttataagtattaatggttcctacagaggcccttcagaaggacgttgaggcctctaaagccagagatgttttatagttcgtgacagagctctgcacactggaagcagactacctaccagagtcccagtacagccgtcacctggtgtgtgacctgggtatgtggcctgacctctctgtgatctgggttccttgtctaagccatgagtgcggtctcaccctcagagggctgctgtgagaactgattaggcgaaaacaagcgaactgcttcggaagaaggcctcacacagtaaaattcccagaagaccatagaaaggttttacaacgtaaaagctttgtgctggtcaggcgaattagctgaaactgaaatctaagctttgtggttttaaattcagttccattttttatatacattttgactaaataaaggttaaaccctgattgtatttacacatgccagttagtagcatcctgctgtatcagtttttctgtgtatggggtggtggtggtggtggtggtggtggtggtggtggtggtggtggtggtaggggggagtgagggtcttagttataaaaagattggtcaaatcaaatacattctgaatatgtttaaagagaatggaaagggttttgatagctaccgcaatttaaccagttttaaatgattgcattttaatgtatttatatacccttctgtatttaacgtatctatatcttactgcacaaaggacttagttctggcaattatgtgcttcttagagtgcacagactgttttcattccagtatcttcgctgacctgcataaaactcttgagttgaaaggcaagcatcagtttttctcgtccacggactatggggaaaagtccaagagttcccgacagcttttaagacatagtcaagttagacctaagcagaaagcagggtgacttgcctctgaaaatagagtagatgaaagccttagcatttaaggaatattgactcttcttcttattcaacaactatttactgagtgcctttgatatgtcaggaacataggctgtatgctgtaggtcctggaaatacaataaagaacaaaataaagtccttgtcattacatagtttgtattactggtttctttaattatagcaaaataatattcattcaaaatattttaaaaatggaatttattagttattgacttctaatgaattgatactacagcagtcatttagttaatgaggggcttgagaggtctttacagtgccatgtaactaaaatgtatctaaaatagcagtgtttgtgttgtagaagatggaaaatcctggttctataaataccttctaagggtccagttgtaaataagtactttccgttattttacctgtcttttattcatcaaagaatgcaaagtataccaaaatattgttaccttagatttatagttatttgtacagtaactttttgaaagatttgttacattttaaatttgtgtgtgtgtgtgcatgcatgcatgcatgtgtgtacgtgcatgtgtgtgtgtgcatgcatgcatgtgtgtacatgcatgtgtgtgtaaatacatggtatgtatgtatgtatatctatcacatgcatacaagtgcctgcagaagccagaaagagagtatcagataccctggaactggagttacaggcaattgtgagttgcctagtgtgggagctaggaatggacccaggacctttgccagaacagtaagtgctcttacagtccagccatctctccagcctcaagtacattttagataacattgtatcttttccatttcttttactgcaagctgtttttcagaattggaattgagttgctagagaagatgagttacctaaaagcactctaatggaggaggcagagaggcctctcttcaacttttccattatctgactcatatctgacagctgtagtatccagtctatattactgatccctaaagacctgtctcaccaggtctaagattcatgtgggtaaatgacaaggtgggaaatccttttctaaaccttgtaccaagagttaacctgctgattttattacattctgaaagtgttgcagcgttatcaacaatgttattactactacttcaacacttttgtgccatccatttgccccccctcccctgctctctccatgtgttatattattcagttcttgcaacagttttaagatatgagtattttataggaaagcattttataggtggggaacctgaaagtcaaagagttaaactacccaaagagaatctgaacccttatcttggaatccgttgttcgtgctcttaatgtgtcctcggatatttgtaaaattacttgaaaatccattggcattgattttctccttacctgtggttattcaaaaagtaataggaaagtttttttttttgttaatcgttgcttttttgatagtttaatatatatataagagagaggagtaagtccattaataagggcattttgtgcatgcatgcacacaatgtagagtcttaatggggagagtctcacattgcttaaaggtgtgcttttagcctgtttctttgtatgctacccacatgtctaagcggactagcccgtagagctaggtgatatttgaatcatacaggatcactgccagagacacacatctcttctgaccaaaatgtcagacctaatgtggcataagatgcctagggagggctctctctcctcattattcggcttcatgatgctttacctcaaaaggaatactttgggtaaaacgctgagttttatctgactgtgcattgacattttgttctccttgaaaaaaataatttcatcagcacgaattttaatgcttaggtgaacgtgtagcatctggtgggaccagtcacaatcaaacctgatttaatgaaaaacttctgaaattttagaacaaagtagcgtgtgtagatttagacccgtgtgttcaattagagcttaaaagtcgttacagccttttacaggatgtatactgtataatttacctataaaggtaacgaatatgttttctcaagctactaaacttgaaccactgagttttctggttctgattgccagaacgcgcatcaccgtctcaaaccatcaagttgaatgttttcttccaaattctccaaaatgatacgctggcaagattaaaacctgtggcactttctgttatgtaaataaaccttttcccctttatcaaactcgcaggcgggactggggaaacaaatcggtacacagtgtttgctccataagcctggcgacccgagttcagtccccagcacccatggagaaagctgagcatgttagtttattcctgtaagcccaaggcccgggaggaagaaggggactccttggtgcttgccggctacacagtctggctgaattggtggccttcaggttcactgcgagatcgtttataacacacagacacagacagacatgttgtttaaagtacagacatattgtttaaagcacacatacacagactgacagatggatgggtggaaagataggtagagcccagcactgagaagctgtcagtgtaattaaactgtaagcacagtgctcatttcactatgaagctgtagatgttgatttttaaaatttctataaagaaacgtggcaacttgaaacgctgttctttacagattttcaaagatatttcagaccatttagtcacagggcctgaagtgaccatttaaatgatgtccctgtcattgtaatactcccattgaaatgacaggcatttttcatcttttttttaagaattaattaattactttttttttttttttacacgagtccctggggcctccagtctcttgagagttaggtgcatcatctctgaattaacccagacccaatggtcctctgctgtatgtgtgttgggggcctcatatcagctggtgtatgctacctggttagtgatccagtgtttgagagatctcaggggtccaggttaattgagactactagtcctcctacagggtcgccctcctcctcagcttctttcagccttcccctaattcaaccacaggggtcagctgcttctgtccattggttgggtgcaaatatctacatctgactttcagctgcttgttgggtcttttgggttgaatacagtcatgctaggtccctttttgtgagctctccatagcctcagtaataatgtcaggccttgggacctccccttgagccggaacccacttggagcctgtctctggaccttcttttcctcaggctcctctccatttccatccctgcagttctttcagacaggaacaattatgggtcagagttttgactatggaatggcaaaccctccctcacttgatgccctgtcttcctgatggaagtgggctctataagttccctctccctactggcatttcatctaaggtccctccctttgagtcctgacagtctttcacctcccaggtctctggtgggtcttgggggggtgggtgttcccccaacctcctacctcccaaggttgcctgttnnnnnnnnnnnnnnnnnnnnctcctacctcccaaggttgcctgtttacattttttttctgctggccctcagggcttcagtcttagtccttttccctcactcaataccagatcaggttcccctccccccccccagcattcccccacccttatctacttcccctcccaggcccctctctccttccctccccacttgtgattgctttcttctctttcccacgtggaactgaggcgtccttacttgggcccttcagcttgttgacctttttcagttctgtggactgtatcttaggtaggcacttttcatctttactacttattttttctttccatagtcatgcccatgatcatgacttccatctttattgaagaaaccgtctttgcctcctatagactcattctcactgggatacctagtgcagctggtttgccagtctcctgggtaggatgagaattctacctggcagtactgttataatggttatttggcatcatggggtatttgaagacccgtcaaactgaagatcatagtgtgaaccctgactgtgcacatgtagagtcccaaattctcatcctgtgacagtggagagcacgtcatccctacatccctaccgatctctgatggttttctggagaagggaatggtctgagttattggtgacagtagagacatgtgacccactgttcatcactgctgggacagctggagagaagctaatctgtcactagctccttggatgcccagagtgtaccacttgcctcacggccacctctaccccaacctgcccctcctcccccccaggatggagcttgcagacagtatgtcgattttgctttttgatggtatagatgctcacttaaagatgatatggagggagttcttactgtatcatgcaggctaaccttgaattcattttgtgcagactggcctcaagttctcatcttccctcaacccacccacatgctaaagtcacagaacgcaccatttaaatatccagcttaattcccaattttctttatttttcaatttctcagtatgcattttagaacctttgcagtacggcaggaaaaaacaatctttaagatgggttaaagaagcagctttaagattgccgccaatgctgtggatctctgcggattggcacactgatggggagccgtggctggagaaggccttcagcccacgacgtgcacaggcagctcgccttagatgacagcagtacccagagcaagaggaaatgagaacttgaccggggagttcagatgggtcagattttagtgtttctctaagatcacaaaacactgtcagagttgggtccggggagaaaatgatggaaagagcactcgtcccaaaatgtagctgcattcagatgctgtgcacggccagcatagcgcagcacaccttctgcatatcaggcgtgccttggttcagaacactctccatactagcagtgtcgaagtgaagagcaagggttctgggttcagagtcttgtatctgtttttaccagcctgtgcaagctgcatgtattgcacctagagcagaggttctcaacctgcctaatgcttggaccctttaatacagtttattcacattgtggtgattcccgaccatttgctacagttatgaatcataatgtaactttctgatatgtgaccccatgcttgagaactgctgatgtagggtcatggctcgcaagcggtctaacaccaactttatcccgagccttttctgcctttttatttttacttttgagacagggtttctctgtgtagccctggaactcactctgtagatcaggctggcctctaactcagaaatccgcctgcctctgcctcccgagtgctgggattaaaggcgtgcgccaccactgcctggctactttttcacttttttattttggcaggagtctcactaagttgcctaggcaagccttgaacttgggatcttcctgcttctccccctcgtagctgaggttacagacctgagccaccaatcccagcattataaaaaggcatggggcggtgccttaccaggtaaagtgtaagcaaaggacctgagtttgaatctctagtagaagaacactcaagcaaaactaggtgtggtagcatgtgtctgtgttcatagcatctctatagtgagatgagaaggggaaatgaaaaccttaagaagctgagtggccagccagcgtggcatatgcagcaaaccatgagggagaccctgtccttaggtagaggctgaggacttgatggtcaaggtgacctctgacctccacttgggcgctgtggcatgcacacacctctactactgcacgggattcttttttcaaagttttaataactgtgtagtcatggtggggtgaaggatatttgttacctgcctcaggtgacagtgagtccagctacacacacacactgttgatgcgaatggcaccctggatcaagacaggctccagtgagaggcatcctgtgaggatgatggcgagatgagtcacgtgggatggggaagtcaccagagtagaagagggctatgtaagggctagagcgagaaggaaggaagatgggggcagggggaggagtcatgacgcagaatggcatctacagagcaggcatttggaagaagtaaggctgccagaggcagggccgtcagtgtcatctctgtcttgtagatggtgaagacaggctagtggcgggagagagccagcctctgtaataggactgaagagagtctggaagcctaactttagggccactggcaggggagttgggaaagcagagaattggccacgctcgggatgactgtgatttgggacatcagcggtgtaaatgtgaaaggacttccagagggagaacaagctgacatgagggtagccacagcaggctgatggaaatatgattgtgatgttagggtgaaaaattcaaaattgagggtgcagaccctagaggtaagtaatggcagagaattagatctgtgcctggtccaggggcggggggggggggcaggaagcaggaaacagctatcacaaagtcaaggtcctctgtactttttagattgggggtgaggtgggtgggtcagatctcaccatgtagtcctagaatctcccaggcagacctgactggcctctaattcaggatcttccagactcctgaatgttggggtgacgggtgcataccccgtgccaggctataaaaactgcagcaactaccctccgtatggttagcccaaagcatggcatctcagcatctcacttttcacaaaagtacatggtgtgccaggcaattgctgggtgccgtggacacctgcagttgtggaccgaggcgcctcctcaatgacacaggtggtaaagccctttgcttactccagggtccctaagtcaggtgccgtacaggcggtccatcgctgttgactttggggtggcgacacagccaggacaggtggctgttttcagtcatctttcttgaaagtttatgtggagaggaaacgttctgtatgtctggttattcaaagggcctgaggtggtgcgcttagctcctttgtatgattaggaagggggggatgggtgagtgagtgagtggggtgagcctcatctcttcagaagtgacagcactcactggtgacgtcactggtttccagtggcatcagcccaagtaattactccattaacatttgaccctcaaggagctaggcaggagttttaaaactagctgtcttcctgtcttctcagggcacactggtctcttagcccaagtgtacctacgttttagggcttgctttaggggtgagcagctgagtgtttgtagagaagatatggcccctttccgacctttgtcagagtgaggaaagtttcttcttgacttataatgatgtatatttatgcatggtgaccaggagtcatggcattggaggctttgtggtggtggccagccagggctacctgctctatccacgacactgatcaggaagcacatctgttgggaagcaggttggattctaagtctctagccacgccctggggtttcagcagtatccaccatctggaccccgtgtgtagaactttccccagcctccccaaaccgtgtcagcagctggagcccaagtgttgacaggaccaggagggagccgtttcacattccagtgctggcaggtgggtaggcagatgtgcgtcatgtgccacgcatggcgaggacatgctgtaaacatgtgaaatgagaagaagccttctaaggggttcaagaacagtgcgggctgagcttctgcagggagctccctcctggtaggtccctgcctcccggaggcagctggaaacccctgagctgtgatgcgaaacagtgccttgtgggccaggcgcctggattgcgactgtgaagccttcactgctcgcttttggacagtgttggcgtgcacactccgtccccgtcagtgctactgatgccgcttcccgctcctgtaaagtcaggttaggcgctcaaaggcaggtgtgcagtaagggagcctgagctacggatccagaccctgttctaggaactcttaaattctccattcaagtattgacatatgatgtgtgttgcatgaatactgtacttagtctgtaaattttcacttggcagtttttgattttggaatcacagggcttttcttaagctagtatgacagtattttgcaaattaccctagtcatctttctaaaataacagtatccccgtgaaatgcttatttcagagcccagcgacctgactctcaaaatctacagagcggagtcgtacgctggcctgcaggagtttaaggcggccctagaggatctgaatgcagttctctttcagcttcccaactggcccgaggtaagacggatgttcgagtccctgtgagtgttaaccttgcagctgtgaggagcttcagttaacagctacaggtcttaacagaggagatggttggcttctgatgaaatccgtagttcagagctaagtcagtgacattatgtttaccccacaaccttcaaggcacgacgagctcaagtctcagaacgcctgtgaaagccaggtgtcctggtacaggtttgcagtcccagggccaggaagacagagccaggtagagccctgcagctcatgaggtggggtctgaagaacagggccagagggttgcccccatgggctcgatacacacctgcctacacgcgagcacacatacacacaaaagagaagcatttctggaaagaaatatgtagcttcctggaagtgtaggtaagatgagtggtttttttttttttttttttctttttttctgcaacatcctattttcggtgattacttgagaatttcacctcatgcatccccgtcacactcacttcccagttctcccaggtccacccccaccccatactggagaactcccccaaggaaaagtaaacaaattttattgtcagaaagaaatttgattgtaggggaaaaaaaaacccaaacctttgtttcttaagtaaaaaaacaaacaattcatgacacagaaaaataacataaatttttaaataaaaatttcaacttgacatattataaagctagagtcaaactggacttactaaatgcttttggtaatagaaagagcatagtccttgaagctgagagattctgagaggtagtagagttccagtgaggtgactgtacagtaggtttgtacagaagttggtcttgcctaggtggtttacacacacacacatacacacacacacacacacacacacacacacacacacacacacacacacagaggctggcctcgaactcaaagagatccacctgcctctgcttactgagtgctaggattaaaggtgtgcactatcaccacccagcttgaattcttgatgaaacaaggaattttattcacagatgtcttttcaatgtgatatatatatcacatacaaatacacaaatacatatatatgtatgtatgtttatatgtggaaagagtgatcaagagacagtaaattgaaactgaggacagtaattataaccacagataatttgtagcacagaatctagttagttgattcttttgatcccctcacattctagataatataagcactgtattttatcctgaatatatatataacctaccatagttggagttgttggattatttacatatacaggttagacacatttgaaaattgctactcaattttcatttgctaagaactagaaaataatgtcttaaattttacctaggttatttgtcaccaatagttacaaggtaattatttaaattttactatagttatttatcactgaaagtgatctgttcaatgtattgaaagaagtcactcatagtttaaatattaatatcactcatcctgattttaagatgagattgtttatattatttttaatatgtacttttgaaacatcttaaagtcagtaaatataggtgttattttgtgtttctctcactgtcattatatgagtaaactttaaattggcaatttggggagttgagcaggtaaggttacttgctgcttttccagataacatgagtttaattttcagcacccgtagagggcagctcatagtcacctgttaactccagttcctggggatccagacacactcttctagccctctcgggcagcctcacgcgcgcacacacacacacacactaagtgtttaaatcagtaacttctcaagtgaagatcgtttgtgggcctcagtttccccatttggagtacttgtttggactttgagaaccctttctttccctggtggttggaaacagtcctgtgcatgaagttatgtgtgtgctttgttgaaggtctacttcaggaaagggaaggtcctccaggatgccggctttctaggcgatgccttacagctctttcttcagtgcttagccctcgatgaagactttgcacccgcaaagctacaagtagaaaaggtactacgttacccgcaccattgtccaaggcagaggcacatggggtcttaaaaagtaagatgaggaacataagaagggattttatctgaggagctatttgacaactaagttcttatctttaatatattgaattctgtttttttttttccttttgattttttgagacaagttttctctgtgtggtcctggctgttcttgaactcagtctgtagaccaggctggccttgaactcacagagactgcccgcctctgcctcctgagtgttgagattaaaggcgtgcgcaccaccaccacttggcttgaattcttgatgtaaccaaagcatttcatttatatataattcaatgtagtatttgtggttgatttatacagatggttccaaatataggctaaacagtcccaatttgaaaatcaaaactctggaatttgggggatgggatgccatatgtgaaaagattcattcctgaccttatatgactgactggtcgtagtcaaaacacaaagcacagagaactaaaaacatgatatcaaactaccttcagtttatgggtacaggatatacctgagacaggttctgtatttattcttgtgtcctttctcaagataactatctataaacactccaaaattaaaattagaaagttgaaacccttctagccccaagccctttggaaaggggtgtgctttgttcagtcaaaaccaagctgatattccctattgaaggtgctttcttataccacactcaggaatctctttgagtgagaaaagaaataaaaagaaacaaaaaggaaaggatgcggctgctcctaggtcaggcgaaggagaaaggttattgtaggtatgtggagagtcagactagacacaaccagactgagctgggctatatgggagagtgggaggggaagggagaggggagagaagggagccacatatagcagccaggaagccaaagatatagaaggggctggtaaccaaatggctagaaatagataggaaaggagcaggaggttggagagaggtgtgcagcccagcccctgggctagagagttcagggtagaggcagggtatgccagccatcgcctgtaacaggtagggactgagagatgctgggagagcctggaggccaggtctgatgtgatggtaaataggctcttttgtccacttggagacttagcactctggtcctgccagtgcctttcattcaggccttttacctttgtatgtggctattgtgaagtgagttgtttgcctaatttctttccctgcccgtttgtcatttgtataatgaagggttgctgatttgagttaattttgtacccagccactttgctgaagttgtttatcagctgtaggaattcttttggggctcccttactgcgacagcatccgaaaagacaggatctttgcaaagttctttgggaaaactcactgatgttgagtcctagctgtgtgacctcagtgttcatagactgtgccacatcagttgtgatgttaagcgtatggcattttgaaggatcacctgggtcaataagtaatacacagtgccctggatcccacctcactgagttggcatacctggaccttcctcttttcttcctcctcctccagtttatgggtttgtttgcttgtttgtttgttttctgttttgttagcggtaatcctcatttattttgttttcacagtggtttttggagggtttggtgctgctgctgttttctgtcttttcaaagcagttcattgcagatacctaggagaggagagtgtttagtgcatttttttttgtacgagctctttaccaatgagctacatccctggaccctggatagcttcctattgagtgagttattgctcaaggacctacggaagacatattctactcacagtgtgtttatttcctggcactgatttgtggataaccacattctatgacccacgaagcttgacccccagacctagagtttaggaagcacgtgctgcacagagaaacatggtgctttatagagcaccccgtttttctgcagccacgcattccctgtgtcttactaagccctgttgatgcgggtgattgggatttatccctggcttgaacacccaggacgttttatcacgcagccagctgcgtttgcgtacccagaggtttcagggaagctggtgtttgctcccaagcaaggactcagcagtggaggccaccgtatgggtagctgtggtcagtgacaggctaagtccagtgcaaacacagggactttgagagttttgagtttagtccacgttcttaggttcacacaaatacaatagtactccagctataacccaaaaattggctgtcgtggacaccctgacctcctgacagagtagggcttgctaagagatggaatagttccatttctcttaaaacgtcttccctttgtaatctgaatatttataaagctcgctcttcccttgggtaccttcttaagccactttatcccgtccttgccgaggttaaacctccctcccctcttttttcttttttcccttgaagtgatatgacccctattgagtcataccttggtccgtaaaacttaaaaatgtatcgattctttcctgatcactaaaaatagtatcttctacaaacacctctcagaatttgaatagacagtaaagcgtatattgttgttcttcatcagatagtatatatcttctattctacttcataatatttcttacagattctgtgtgacttactgtcacctgaaaatgtaagggaaggcctgaaggagtcttcctggagttcgttaccgtgcattaagagcaaacctcttggttttccatcagtaatggagcagccgccctcccctgctgagcttggcctgaagcaggtaaggggtggaaggatgacatttgctccctacacccgcctccttagagctaagaccccccacgttctcagggtcgagcattggagcctgcttaagtgtgcactgcctgtcagatgatagtaacagggtcttgtctgcagcatctgatttatactgaagctctggatgtcatgtcagtgctcactgcgccattttaggtcacttagctggcatcacacttacagtttaggacatgcatatagctataaatattctagtctcgtctagaagcatctgcgtcagaactgctgctctacacagtgctgtgacatcagtcagcatgatacctaaggctctataaatactgacaacaaaccctttacttgcctggttttaaagttgaaaagttctgttaagctagttttcaaactccttataataaggagttgaaatctcggttccgtttttttcttcttggcaaggagaagaaaggacggtgaacagaggggattgcctttgtttattgtgttccacagactgaagaacgagtggaggatgccccagagcctgtcaaaggaagcttaagccgcgcccagtcagcacaagccatcagtgcagcggcagtgcctgccagggaggacggtttaaagcgcgtgtgctcagaacccttactgtccgcccagggaaagggggtcctgctcaaacgaaagctgtctctcttagaacaggacgtgcttattaacgaagacgggaggagtaagctcaaaaagcaaagcggtaaggcttcccctctgcagttgtccccgtcaagtcctcattccaagtggcctttggacttcttcccccaagagtaaaaccctgcctgtctctttatttgattagaatctcccagtgaagactgtatgttttcaatagcttatggcgacatcccagaagaactaatcgacgtctcagactttgagtgttctctctgtatgaggtgagtgtgtcaaattctgtaaagatgattatgttggtataactatgcagcatagatgaaggcagtgctagggaagatgagctaacactctcgggctaagcatcagaaggtggagttttagtcctaggttgagctttaaacagtcccctgaatctcagacttatgcatccagaaagtggggccagtgtttgcagacacaggatctgggtgcccggctgtcctggaactgactctgtagatcagactggcctcgaacttgatgaggctatatcaaaatctaatggtcaccagtggcctgcttggtttgctctgtctttgagtctgcatttactttgctcagtttggctcagccacaggcttaagggttggggatccacgtgtccaacagtgatgactgctgtagtcagtgcagtcctgggcccctggcagggtacctttgttgttcaaggtctttcagaaggtgcaggaggccaccgtactgttagcattgcccccttctccctctcctctctcaccttggccttctgatgccctctaagccatggttcttctcaaccttccgaatgctgtgaccctttaatatttcctcatgctatggtgaccccaaccataaaatttttgttggtatttaataattgtaattttgacactgttatgaattacgatgtaaatatctgatatgcaggatatctgagatgtgcctcccaaagggctgaggaagagaaccgctgctctaagtagagctttatgttacagtccattattaacagaagcatttccgccgtggaggctcctggtgtgaaagctaatgtgcgctttgtttgattccaggttgttttttgagccagtaacaaccccttgtggacactcattctgtaagaattgtcttgagcgttgtttagatcatgcgccatattgtcccctctgcaaagaaagcttaaaagaggtaaacgcacatttgtatctgtctgttggtcaaagtttggggacatggcttggtttgtgttcagcagaaagcgtggtttcattttcagagtgaggtgaattatgaatcctcgccgaccaagagcacactgctgattgattacctgtgttgtgtaggagagagaaacggagagccgggcagagatggggcctaagagccaagtcctccgtacttggatggctggttggttggttggtttggtttttttgttttgtttgttttaagggataataggaaaatataattggaataatatgatagtgtaaaacaaagactaacacatcaggattggataaaacaaacaagcagaaggcaaagcccaggagaaggcacgagtaacaggtccacttgcctgcttattctcccagaatcccacaaaaaatgctaagctggaagccataatatgtatacaaaggacttgtagggtaaaaaagagaaaaaaataaaataaataaaaagtcgtaagattttttttaaaaaaggaaaatccctgacccaacattgtgagacaaggaacctctaaagatggcaccaagtttgtttttgtaaaaaagaaatacagccaggcacctgctgagggaaaggttcagttttaatgatgataccacgggaggtgggtggggaggactctgctgccctgcatctcacccagacttgaggcccacccattccagatcccttagtgctcggagtaactgtcctgtagaacctcctttgtggtagagacggcccagctttcctatccagtttggtggttgctggccacgtatgactactcaaacgcttgaattgtggctggagtatctgagggacaggtctccatattctttaatcaactaaaacttacagaggccccacgaccaatgcctgctccactgggcagcatagctctaggaagtggtggcagaagacagaagagaacaggcagtgtcctcgtagagccagagacacagcctccgagaggggacacacagtgcggtgctgggtcctctctatcaggatccagtttcaaggggctgttgtaacttcagtggaagcatcccaggaggacagctccctgtgatgacttccagtattgtttgcagagaaaagcaccctatttattaaaaaaataaatacaacccctattaaaaaaatacttatcacagaaaaaacagtggcatatgttgctacatttgataggtatgttacataataagctggtatgttgaaaacatacacaagcacacacatgtacacacatgcacataagtacacacacacacacaaatgtttacagagtcaagaaatctaagataaagttactgttgaagggtttaccagttatgacaatgacttggcgtttttggataaagtatattagacaggctatcattcccacagtttagatactgagacatagttgctattgttttcaagttaactattcaatatagtactttcatttagaaatacttcatctttaagaatactaatagtttgaatgagaaccttgattataccatctgaacatatggccagctgtttaaacatatcctgtttccagtgttgctgatagcttatgctacatcgtttgtaaagaacagactatgtctatacctaagagtatgaaattgaaaataatgctggtgtgcctgcatatttcctgcctgcatgttactgcccctctttgcccattaagtgtagtttcaagacgtgagctttgcagcagctcagtaaagaatgtcagcatctccctgtcacagagcttacaagctaggctgcccctttgtacagaaactgccttttgtaagttaatgagtgtagctgtttgtcagtatccttagctaaattcctggaagctgaattactggatcgatggcagtatttttataatcttcctaaaaaccacttgttgaatttcctagtcgcctgaaattgttgcacagtgacataggcaatatttcttcagctgtaactatgtgagcatccatttttttcagaaatctttattaatttaacagagcgcagttagaggactgctctgacaaagtctgtagtgtggttagcctcatgataaactcctactgtctatacacatacagtctgacagagtccactcacaccctcctcttcatccagaccacagttcagcagccctgtatcatctaagaacttgccagaactgctgagtctcagactccgcttcacccctgagtcttagcaatttgtattcccacagaccttcctagtcaaggttgcatactgcttctgtggccaccttccccaaatcccaaatttcccagtgtatcattcattacagcttgacaaaccactctatctgttgtctctacagatggagagctggcttttctttgtgattcttctcccaagttctttctattttatttatttatttactctaatacatgtgtattttctgtctgtcagtgtactctgagcttaatcaacttttactttaattatgaagacatatatatccatatggcacactacagggatttactacggttaaaacatcacaacacacaatgtaaggtaaaagaggaattaaggaagacatcaggaaattagaagtcagatcctgacctgagagagcttgcatagacaggagagaggtggatttttttttttttttttttttgtcagccagaacgatgatatagtctacatgtggagagccactttttggagtatgtggagggagcacaaatgcaccaggtacttagaggcggggagagatcaccaggaaaagcagcatgctttgaagtctgactggtagcaatattggatggaaaacctaaaagaaaaatgaaataggttgagcggaggcaaatgccttatcattccagtacctggggagctgaggtagagaaccttaagttgcaggccagcctgagctacacagtaagaccttatctcagaaacagcaacagtgctcccaggagaaaaccctatgtagagactttatctttgaaaatagacaaaacagcagttgttttgactttctgaaataaggcaagtgcattcttttcttcatccgtatcttctttctgctccttagaaattggcttgcgtcgtgggagacaggcaggggccaggccggctgctgccaataaaagacttgtgcttgtggcagggcgctttctacaaggggtgggggtaggccttgcttccagcagcgtctccagtcttaccctggagcccaggcccgggcaggtttattgtgtagctacatgaactgcagggttcccgtcttgaattaaatgcagttagagtgtttcagcctatagcaaaggctttgatctctcagttaaactttgcccactttgcactgtaggaaagcatctactggaatgtgactaattgtgtctttcagtatctagcagacaggaggtactgtgtcacccagctgctggaggagttaatagtgaaatacctgccagatgagctgtccgagaggaagaaaatctatgatgaagaaactgctgagctctcacagtaagtcccttctccttaccgagatcatgaagactgccagagaaccatgccagagccagcaggatcctgtcgctcagtccagcatgggcatgtcggagccaagtgttgatggggtttcctgcccttaagcagacaggctcgtgaacctgtctgtagagtccaggcatgctaaagggagtcattggtacagctctttggactagagcagtattagagaatacgaagggacttcctgctcagacagcaggcggtggactggggtagaggtgaagtaggtaacatggatggaaacccaggtctcccatatcctggaacaggaagaacagcagcctacgttagcaggatcttaacaggagagagcagtggttctcagccttcctaatgctgccaccctttaatacacttcttcatgttgtagtgaccccctcatcccatgcataacattattttgttcctacttcatagctgcagttttgctactgttgtgaatcatgatgtaaatgtctgtgtttacacatgatcttaggcgatgcctgtgaaatggccatctgacgcccaaaggggtcgcactccacaggttgagaaccactgggggagagactcagaatggggtgggattgaaatctgaaggaatgccatgggcgtcagatgctcagtagagataccagtgagagaccatccacgttagtaggacaggaaacaccccaagggagctttgtggtgttagcagctgtccccactgccggggtaggcttgcccagctctgcctgcaggtcttccttccttgttctttcttccccctccccttaaacatttttgactttttgatcggtcactccaacctctctgcatttctttgccgggttttgaatttcttggcttttccttcacctctctcagctaacacgttgaagagctctgctaactttatgcgctgttattatttagcgacggtttgcttctcctgtttttaaaatgcaagtagaatgttggatctttcccttctaaaacagactgagctgtgcctgtgaacttgaattttcccatgggtgcccacgggaagtcttcacaggccagtggccttcaggacaggtttctaagctttccattacaaggcctgtaagggcctcttgttcctcccaagagatggatgttttactgtgtacttttgtgatagaaaatactgaggtgaggcccctgtctcttctggatactgaaggagaagtctaaaaaggagattcggtgacactgctgatctgaagcctggcggtgaagccagcctgcccttaggagagtgtacctgaggagggagagctgagtgctggggagaagccagggccggcgggcttgctagctgggcagtgttgtaactgcacatacatgttaagcaccgcatgaccttaggtcattagtggtcatgtagcaggaacataaaagggagcagaaacaaatctagaccccgtagccctggtctctgctctccacggccttacatggaccatgctggctgcattattctctgtcggcttcttctctgtcagtcagtgtaggcctgggcctgtgggcagcgtggcccccggcttcagccgcagcacactttcctccatcctctcctctgtgcactgccgacctccagctattccccacggtgctgtgtgagcattcagttctgcatctgtaggcttgtttctaagaggaaaactgttggtcccaaggatgctttcttccaagaacctgtggtctttctgctgtggactcaagtgcctgtgtatgcatttttcttctcagctgccccgacaaggcaggctttctcatccttgctatctgggcatcgtcttggcccctcttcctgttcacagtctgggagaagaaaggtatctgtcactttagaccccgatgagagcgttattttgttgatttctctttgttgaccttttgaatatatcagggctcagagtttttgtccatttgggaggtttttttttttatcttaatgtctcatggataaaagctagaactctgtcctgcattgtattttaaacaagtcctcaatgtgaaatatgataaatttccttttgattttttaaaaaaatagctgtgtatggtacctgctcttttagaattgcggcttataaatatgagaatcagagtcagattccgtttcaggggctcagcggtgggtgtggactcagcggtgggtgtggactcagcggtgggtgtggacttgatgaaggggagctgcttcctgttctagtcaggaaacaggagcacacatttaaaacacatttcgtccttgttgctattattgctgtttatacatcaatttttttttttttgctgtgataagactatgtgttttgctatggcaaatctggtatgtttttgctgtctgatttggtttataacaatgaactgtcctctccctcagcttgaccaagaatgtcccaatattcgtttgcactatggcctaccccactgtgccttgcccactccatgtgttcgagcccagatacaggctcatgatccgaaggagtatccagactggaaccaagcagttcgggatgtgcgtcagtgatacacaaaacaggtaggctccccgggaacttcggcatctgcgtttgcaccggagcttcctttctgtccgaatgggctgaagcagggttttctcttagttttgcagattatggttgtatgctacaaatccgaaacgtgcatttcttacctgacggaaggtctgttgttgacacagttggagggaagcggttccgagttttaaaaagaggaatgaaagatggatattgcactgcagacattgagtatctagaagatgttaaggtatggaaagtgttctttccccgtgcatcctgggccactgtgtcctagggcttggtaccaacatgtaggtgatgtttctagacacaggagccagctcttctgtcattcctcgttgctgcttaggagggttagctccggccaccttccctttatcttgctcttgaatcgtttgcccattcaggagctcatggggacaagaagctgcagcctcctcgtattccagccatccccggcagcatggtgcctagactctacttatacgtgtgcatgcagtagtcatggtaaccgcttaaataacagtagcaggtgactaagttaaacttcctgctcatcaaagttttaagttggtgaatctctaccttattttacttgattcattaataattaaaactgctataattcatagattaaattttaatataaaagtaaacccaaaattcttttaaggattgctctgtgtattaaggattttttcctgtgccagagacaatcttaattataaagtaattgcaactggatgctgttttaaaatggtaggatgtcccagattagatactgccacaatgaatatatatatatgatatgtgtacttatttaatccttgagcattttgttccaccttctaaaaagcactaaaacatccacactttggccttccttcttcttgggcttcatatgatctgtgaattaaatatatatacatatatacacacacacacacacacacacatatatatgcatgctgcttatggcttagacagggttaatgtggcctctcgatggttttgggacctaatttaccaactggaattaaagtaccagaaagtggctgctgttttaagtatcaaattgatagcaatttctacaggaaaggcaggataaaatataggtcttacattagcactgttcaccagtctattccagccctttatttcagtcaacatttcctgattgctgggcatcttcacaaagagttcataagacttttcacaaaactaagagagttagcagatagagtgattgggagtctgtgatgtattacagaaacgatggaaggctgactgcctccacgtcctgtgaactctccctacaccacgctgcctctctgctgataagtgattagcttgatgttgcttgttctctcttataaagaaagatgccatgtggtgggaggcagaggaggcaggtctcttgagtttgaggccaacctggtctacatagctccaggatggttgggactacatagaaaaaccttgaggcaaacaagcaaacaaaaagatgtcatacgggaatactttgctgtatcaatcagggcagaatattttatgagtgagttgaaaattttagttgattgatagtctttgtcctatgtgtggttggctaatgaaattgtttgctaaagatggtgtgctttgtaaaacccaaaaaccagttttaattttggtaaatgtgtataatgttagatcacatttgacggcaaagtgctttgggtgggcagctgagcacacacccagtagagtagcacattggaagcgtgtgtagaaaccgacatggtgctgggagactggggtcatgccttagatccttcctgttcccatttcgtatgtttcagctttttgcttttgctgttgtctgtgctggtctggtctggaagacctcaattttattatttaccttttcttcttgtggtagtaattctattttctgggatgtctaaggaaatgttaagctcaatctttaaaaagcctgcttttgaaatgctgcttgtttcctggctggttttgtttatctcacagaggtgcagctcttcgccattttaactatttttaagcaccacttatggatatatctatcacattatgcaaattacaactaacttaatgcatagtttcaacggtcattttacttttttcagaagtaagaatgtgtggccttttgtgttttgtgtcttttgtatttcaaaaatcttcccatagccagtaggccaggaacatggtccacccattaggatggatgggtcccgtggccattcacctgcgttctgctggtcttcttcggctggacgatgtctttcatttttacatttgccatccagtggtctagagggcacagggaggagtttgtggagggagccacggcgttggacccttatggcagaagttgaaattgtatattttatgctctaccttttgacatgacaatttttttagcaagtatttttgttgcatttgtgttttgtattttgacccagttctcccataaatcatgtattcatggccatcctcctgttgctgctctctgccgtgtgtaacccgagtgccccatttctctttttactgtagcaactattctattccaaatttgtgtagacctttgaaccagagcccactgtccaccatacttgctccttcccaggctgtcagtcaggttgctgcttgctcccagtggggaccaggcactgctcttcccaatgagtcctgtcagcactctgtaaggcagaaatataacctgctattgcctgaggataacactctgatagcctagcaccgacgaggaccttcccgctttcccagtgtcccgtggggctgaggctaagcgctcggacacctctgagatcttactgcctgctcttcctagattgagaatggagatgaaataaggagcctgcgagagctccatgactcggtgtactcgcaagcctgcagctggtttcagaatttaagggacagatttcgaagccaaatccttcagcactttggatcaatgcctgagagagaagaaaacctccaggtaggatggctctgctgccgctgccgctgcctgtctccctttctcaggaacctgatgaacagctttccacctcccccttcttttattgccgtcgaccccatcttgagcattatggctgtattctctagagcactggtatctgctacatgtagcccaggcaaggatgcctgcaggaaagagggtgccacagagggagggggtcttgtctcaggatgtcttgagggttgtaagatgtaaaatggatgctagcctccattaaactgtgactctgaagccaccgtacctcccagcccatcagccgtgcctttgacagttgagagatgtgtggttttccatcctttaggaagtctgctcctctccttttatctcctaactactgttcaccgtttcaatccacttttgtctagctgcatgtaacacttccattaccataaaaccatcattcttggggtcctgctcaagtactggggtttacatcaaaactgaacctaatcattaatgtgatttagattctttctatgcaccaagctccgcagtagcaattgcaaaacccattagggggtcccttaccctggggactccaaccacaggctcctgagacaaccaatattaagcagtacattttgaattgaataaagtctttatggttgacttcatagtgggatggctatacatctatgaaggtagagggataatagatccaagtgtgatccatctctcactccatccttcagaggttggtttgagtctcttatgtcagcatcaggaccatttccaaactgaggacacgcagatgctacgtctgtgttgcccattgcagcatgttcatcctggacacctgaacctggttaaacattatagaagtatgctctcataagacgaagcaggataacacatttaaagcctccagaatgtagcttccgtcaaagtctgggcagaactcccccatggtcctctcttctctcctctctcagtagctgccactggtttctgttaatgccacgttaggagtcagggaaacaaagcagcctctggagagatccatgagtgagagggtttgtaaagagggacgggtatgggcgttggaggctggaggagcgaaggtcagcgccaacggcaccagaggccacaggatccctccgcggtgcatcaggagcagcagagcaccatggctcgctggaacttgtggagaaagtgctgcagttcttggggccccagggaacacccgtctgtctgtccatcagtcagaggcagtggaatgggtggttctctagaatcctctggaaagccacaccccacgctttgcaaaagtttctagaaaataatgacctcattatccgtttctgcatctggtaagaatgccattggcccgattgtgtctaacctggagacacgtggagggtgggatcctgggaaatgttttctctggaatgcagaaggaagtgggagtggtgcagagatcagagcggtggagagtggggcagtggcacaggttgcttaggtactgccgtggttccttcatcactctgaatgtccctgttatgtggctcgtgagcaccagtgcagtgacagtaagggaggctatggagtcctgttgtgcacacttaccgtgactctgtggctgtgtgcagcccttgcaacgcacaggagcttccttgacttgtcctcgcccttgcaatgttaatttttcaaactaaattcgaacccattttttttgaataaaaaaaattctaagttttgaccaaaaatgtcaagtatcaagagttaactttctgtagtgctttaagtaagcaggtctggccccacgaggcatttggcactatctggagacatttacctttacacctggagaggtgctgttagtggctagccagccgaaggaaggtaaaggtgctggcggactacagagcactgggactgtgacacacagcacaggggaccgaggccccagacgtcagcagcctgagggcaagagcctgactgggtattgagaaagctgactatggagtcagggccagattaaaatcctgactctaacatgtgagctgagagaccatgggtgaccacatgacagtccccagcttcggctcctccctgtctgtggccatcataatcacctgccttctagtattaagagacttaggtagtacctggcccgtaagtcagtcaagcgggctaggttttgtgttgtacttttgctgttacattaacagtctgaactgttggttggttttaggcaacacccaatggacctgcatggtgttggtggctgctggcagtcctccctgtcgacccgagatatcagctctccgtactgtccatgaagtctttggaggaacggttgacgaagatacagcatattctgacatacttttctagagaccagtctaagtaacgaactgcctggatctcacttagctcgctctcagcccagaggccgagatgcgcggctggatcttaacttttaacgtcgccctgatctggctccagttgacagccggattgcccgctgccttttgcacacccagtgctggtttaagaaatcaaggaaacttttcttttcttcaaacctcctgaatctcgtggatctgcaaatgaataccttcaactaggtcccagaccactaagaacttgcacagaaaacacgcactgaatgtgtgttaaacctcgacattgtgatgaagttgcactatgtaccatattctgaatgaactaagaactccgtggatgtgtgacgtgtgtgtgtgtgtgtgtgtgtgtgtgtgtgtgtggtgtgtgtatgtgtgtgtgtgtgtgtggtgtggtgtgtgtggagtgtgtgtgtgtgtgtgtgtgttgtgtgtatgtgtgtgtgtgttgtgatgtgtgtgtgtgtgtgtgtgtgtatgtggggggggtggggtgtgtgtgtatatgtgtgtgtgtgtgtgctttttttctctggctttaaattttaaaagacaaaaaaaaaaaaaaaaagccatagggagcggacttgctgaaggccctctgttgcccacgtttacagcggtagtcataggagttttcgcaggttgactttgcctcagatttattcccccatgcttctctttgcacaagtatgtaaactacggtctagagtatcattttttctgttggaaatcctgctcttgctgaactgtcttggccgttgactttgacacagttaattatttatgtaaatacatgcatcccggtagccggcaggcagggatgctgaatctcgagccagtctccaggaacaactgcaaacctgacacatggtactgtgcatccattcataaaacacttaaaactgtgaaaatatggtttacattaaaaatgtacataaaggtagacggagaactcgattcagccagttagcttgtacattttagggggcttttcacattaactgcccgtctatgtcatttagagtttgacacgataacttgtatttaaggaattatgtagtgtataaatcggtcgaggatctgggggaggtggagaagcttactgtaggactcagcttgtaaggtttgttttgttttgactctggtcttggtgcaaatgttagttatgccttattcataccagttagagcaccgtgctgtgacatgggtatatccgtgctgcccggcccttttataattatttgttgcagatttgtgactgtctctattaactttcttttatgtaagtaatttgtacaagtttcttaagatttttgcttttgcttatttaattttgaataaaagctaaattcataatactcccccccccttttaaatcgtaaagcaatgtcagaaaaatgtcaatacagggaccgagctatagatagtgtagaacatgtgtttgtttgcctgtttgtgacatgagacttaaattgtagatttttgggaggcagtggggtggggtggggcgtgacgtctgagacaggctctctctacatagctctggctgtcctggagctcactatgtagaccacactggccttgaactcacagatatcctactgcctctgcctcctgagtgctgggattaaaggtgtcctatgccatgacactcagcaagttgtagttttaaaacattttataaacaacgaatgtggtatcttgatgcttcaggtctaacaactattttctaaactttagagtttaaagcattgttttttaaccttaaagaaacaaacccagatcactctagaataacgatatttttctttttaaataccctaaaaatgtttgttaacatttaaatttaaatgaatttaaattaatgaatttaaaagatgacaggtgtgtcttacagaaaaaagtttgtgtacattctcctccgtcaggatgactcttggttgtacacaccagaccatttctgtccccagttcctcggctgagattttcccagatactgttgtggttttcgtttgcagatgagattttactgtgtggcccaggctgatctcatgtctcctgctctactgcctgggtccccaactgctctactcataggcacacacctccttgccagtaaatgggaccttcaggattggttgaaactttagaataagattcagaagacccccccacccactcagtgccacctttactagtagagaactgtccatagtacctggggatgtagttctttaacccacctactctggaggctgaagcaggaggattctgggttaaggccagtgtgagttacacagtgagttcaaggccagtctgggtgaattagtctttgacaatcaaggccctggcttcgttccccagcaccattaacaaagaggctcataaagaaagcggccaccgagtacacaatcgcttacccagtgctaccttagcaatagtccttttatcattactggtactttatcaatagttttgaagtgtaagctaacttcctcataattaaaaatactgctaagcgcctgttaaaataaggaatatatgtaaatgatttccctatatgtttctcgagagcacatggtgaaagtagtcccaggtgctgagtacacatatttaatgggtacatgtgtgctatacacacagatggactctgaatggtttttatatagcacacatatatccccccccaacaaaggaagtgggcgagccttctttatgatttattctgattatatatggcagatactcctatggtagtttttctctctgaagatatagtaagtctgaggtttttttctatcttttcaaaacaaaaacaaaaaacaaagaatcaaattgtttaccttgtcactttaggtgctggagttccatcattagtgcagtagttttgcaaaaatgtcgagctcactagtttatagacgtctgcatgtctaattcttctagctctgacttggacacttcaggtaggaagatgccgaactctagagtgcttcccctttgcccctgatgcttgagggagtaactaagatacattcacacacctcgctgagggctctccaactgttccagcacttcagcaggggtcacagactgaccgctgcacatagctgaaacaaatgcttcagcactgagcgtggtgacagtcatctgtaacctcattcctccagatcacaagttcaaagacaacctgggctactactgagactccgagatgggaagggggaaagttccaattgaggaaaggagattaaaaggctggaatggatgagccactgctttcttcacaaattcagataacaataaaaaggaaagaagtgaagattacattatgaaatcagaacctcaaggattagcaaatgcatttgacgataccggggatacacgtgatatctaccacattaggccgcaggccagaggaaatcatggctttgcagaagtggagtgctgtaggccaagtacaaatagctccagggaatccctagactcaagagagcatcttggcaaactcaaatagaaagaaaggctgggtgtgaatttgaacttgctccccaccccagatgcactgtaaacagaaacagccgttctcaggccttgaatgtgagggtcgggccagaggaaaaaaaaatcaatcttcataccttacatagcaacttatctcctgtaggatcaagaatctttactcacagacaagctacattaggcactctgttcctgaatattccatggtcacacagctaggctaccttccctgggccaccaatcccaaatggtttatctcaaacaacaaaagatgaatacacaagtaaagcctagaggtttgacgataaggaagaagacagcaatgcactaagagctgaggatgctgcactccccccaaagatgggagaatagagaacgtctctcaacctctcctaccattaggatcttcagtaacatccaaccaatgaattaatcatcaaagccaagtctgtagctgagccaaacaggagactgagtgcagataatgaaacagatagaggatcaagctacagcccttcctgtaacatggcagagttcaagagaataggaagaatacaatgtgaaggaaaacaggcatgagtaatcgctagaagattgctaaccaccggctagccaagagaagtttcttactagtagaaggaaagaaagaagtacttttccatgagtcctgttgagacttctgcatcctcaggaaccagatacatccacataaagagaaacggaagaaactgaagaccaaacattggaaggctgaaggaaaacaaatagtaactccagcaatagtaaatcctgcgttggccaatgaggaatggccaacgtgagaatgaggctgagggacacacatttaaggacaggagttttgggcctaagccaatgtttcaatgtcagtacttaataattgttagggttggcaaggcagctcagccaataaagatgccagccaccaagcttgctgacctgagtacagtccccagttttcccacaagttgtcctctgactgtcacacacgtgctgtgacacacacacacaattagaaataaatatatatttaaaataaatatattgtttttaaagataggatgccagtaatacgctgctatgaagccctgcctcttgatggcatttggctgtttattaaaattaagtttgtctttacaattgcttttttggcaagggttgaggagagaaagtgggtccactattcaagatttcaaaagaatatgcttaatttcaaaatgtgtcaggtacactgcctagttttatgtcagcttgacacagggtcaaggaggagagaactggaactaagaaaatgtctccctaagttgagcttgtacgcaggtctataaggcattttctctagtcattgatggaggtggcacagcccattgttggtggtgacatcctgggctggtggtcctgggttctataagaaatcaggctgagcaagccatggggagcaagccagtacacgctgtttattgcccctccatggcctctacatcacctcctgcctccagggtcctgcccagtttgggttcctgtcctgacttccttcagtgatgaacttcagtgaagttcatgtaagtgaaagccaaataaaccctttccttcccaacatgctctttggtcatggtgttttaccatacctatagtaaccctgacaaagacagttagccctcagaaaagtcctgcaaggaatgtgacctgttgtcaggtcagctttgatgcctggcagccccgctgtaccttgctgccatatcaagttatcaaagacaaaagaatcaccaaacgtgattgaagggtgctttatggaattaggatgtgtgtgaacactactgtgaggtgctcaaatcagattcagccctgcattttgggaagcagggtaaattgataatccttttatacagagagagttcataaatgtatcagatcattataatgtttgggaggtgtgatggtttgtatatgcttgggctagggagtggcgctgttaggaggtgtggccttgttggagtaggtgagtcactgtaggcgtgggtttaatatcctagtcctagctgcctgggagtgaatcttctcttagaggcctgcagatgaagatgtagacctctcagctcctcctgcaccatgcctgcccggatgctgccttgataatgaactgaacctctgaacctgtaagccagccccattaaatgttgcccttacaagagttgccttgatcatggtgtctgttcacagcaggaacaccctaactaagacaggagggattgaagtaacttagaaataaagccatatgcatgacaggtggaatatttcctcaatggctttagaacagcaaagacagaaataaccaacactcaatttaaacagcgaagagaaactttagcattcagtcactaaaaataactaaagagactaatgtataaaaatatgtgattcaattttgtcattataccatggttaccctgtagcgtgtaacacagaagatgggatgccaggatgaattcaggaagattgatgatgaatggttttgttcggtggcagtggggttggagcttgagacagggtttctctgtgtagccctggctgtcctggaactcactctgtagaccaggctggcctcaaacttaaaaatccacctgcctctgcctcccaagtgctgggattaaaggcatgcactacaactgcccggcatgagcaatgtatttttgtgtgatctgtcttttctacaggaaacctgggcatatgaaggcaatagggttttaggatctaagattgttgccattgtgtctaagtctacgcattgtggtcactgatacgtttgctgtagttgaggtctatgataaccagatggctaagaattgaatgtttatgtgactttatcaacaccagtagtaaatttagcgtcatcttggtatggcttattaataggaaatatgaaaatcagtcaatatgaagacatggtaacaatgaggatgattgtggagaccagaacgttcttgtagttaaagtgtagataatgaagaaggtgtaggtttgggttttgtgatggatatgaagcgtttgctttggctcacagtttgacacagtctgtcatggtgggaaaggcataggacaaattctggtctataacaccaaccaggaaagaggtaagaaccaaagactcgatgggtgggttttaagtgctcaggactgaccctagggctttataggctaaaatatacgctctaccactgagttctgtctttttccccaaagacttgatttttaagaacctatgattttataaaactttgtgatgggggaagacttttgtaaaatgataggagttggttttccccacccccaacgatccaccagagtgttaattcagaatttgattttgattaaggtgaaaaccaaaaaaggcagtgttttgttcacacctggatttggaaccctaggttcatatgctctgtaattagattaaggagccaagaaaagcagaaaacttggggcggggtgggggtggggaggcaactcaagaagtacaaggcagtagaaaccaagagccttcccaccgagagagaagagaccaagagaatcaaagattctgacaattagcctgagatctcaaacccaagtgacactgatcagaagaggaagagaaacagtgctggcttgcagaagataaagaatatgcgcttctagcagtttgctaggctaaaaggttgttgtcaaagctaagaatatttcagaacagatagtatacatcctggaacttgtcattgtcttcgtgcagcggagacgggaagtaaggggggaagacagcttgggagactctcagcgtgtttatcctttgggggtccagagataacgaagagctgtaagacatgaatctctaatgcaggtcttagggatgcttcacccgcacactttccccttatgattggacaagggagtctgcttggtttacagcctaaaaataaacgcaaataactgggaagaaaaagaaatcaaggtctcttgtgcttcttcttcgtgttctcggctgtgcggcctgggactcagaagggaaagcaaaagaaagacaggaactcaggaattcaaaatggccacatcccagagcctgggaggggatgtttgcaaagattcctcccacttacttacacagttgtttccagaactttgccacatcttcgatcccccacacaactgaatggggtgtccaaacctcctatccaacagtctcatggagttaaaggtataaatttatcttctgaaaggcccagttgagtgctccaaaaatcctatatactaaaaccatgtggggtcaagtcaccaaacttaatctactttcctagattaaagatgtccccactagcccagaaagtttacagtttttccatttcccgttggctctgttacttttcttgctgcagtgataaaatacctgaagggcaaaccttgtggcttttaataatacattacctgtgttattggaaacgtggactgactgatggggaaacgcagtttatctcattaatagacaccttctcaataaattatcacagtctacaatgcatatatagaattttgatcagatttaaattaccactaattatactttcatgtgtatactcaatccagaagaaactcaacccagaagaaaatgttcgtacttttaaagctttattgcctaggaaataaatatttataacatgtaaataaaaacacacacacacctcctgttgcaataaaatatatcttgaaaaatagtggactttcaaatataagacatatgcacacaatattcttgaaaggagagtaaagaaatatgttaaaagtcagaaaagtatattaaatgttttttatcttaattttttatattcttaaatgatgctgctaacagtcaaattacaatcatttgttctactaggtacaagtaagtaattttatgccactttattctaaaatgtggtttaaaataagctgaaaactatgtattctcatttcaatgtataataagctatactcaacctaaaaaaatgcacaaggaagaacatggttttagctttgttttagagagatcgcaatcaagtgtttgaagaagagacgttgactatctcaacggttccctcttccctgaatcattctgaaagcacctcctcccccatctctgtcctcttattaacaaggactatcacctacttgtttgcccctgtctagggcagaaggcagtcctcttcctcctcttcctcctcctcctcctcctcctcctcctcctcnnnnnnnnnnnnnnnnnnnnnnnnnnnnnnnnnnnnnnnnnnnnnnnnnnnnnnnnnnnnnnnnnnnnnnnnnnnnnnnnnnnnnnnnnnnnnnnnnnnnnnnnnnnnnnnnnnnnnnnnnnnnnnnnnnnnnnnnnnnnnnnnnnnnnnnnnnnnnnnnnnnnnnnnnnnnnnnnnnnnnnnnnnnnnnnnnnnnnnnnnnnnnnnnnnnnnnnnnnnnnnnnnnnnnnnnnnnnnnnnnnnnnnnnnnnnnnnnnnnnnnnnnnnnnnnnnnnnnnnnnnnnnnnnnnnnnnnnnnnnnnnnnnnnnnnnnnnnnnnnnnnnnnnnnnnnnnnnnnnnnnnnnnnnnnnnnnnnnnnnnnnnnnnnnnnnnnnnnnnnnnnnnnnnnnnnnnnnnnnnnnnnnnnnnnnnnnnnnnnnnnnnnnnnnnnnnnnnnnnnnnnnnnnnnnnnnnnnnnnnnnnnnnnnnnnnnnnnnnnnnnnnnnnnnnnnnnnnnnnnnnnnnnnnnnnnnnnnnnnnnnnnnnnnnnnnnnnnnnnnnnnnnnnnnaataattacacggggggggggggtgggtgggggggcgcggaatctacgatctctgtatacttgaactgtcttcttcactacttgcgaagttgttactgtgaggagctcagtgaatgcttcctcagccttaattcactcagcctaagtgtaaggcagtgccacatgaatcagatactgaaagaagcaaagtcagactcttccaaggaaggtgtgggaagtgggggagagagaaacggagggaggaagggaagtgtgtattcaatgtatgttttggggtcaccaagatagctcagctggtaaagatacttgctgcagaaacctgacaacctgagtttagtacctggaactcacaggggaaggtggttaaaaagctatcccttctgtgagtggttggtgcacgcctttaatcccagcactcaagaagcagagtcaggcagatctttgagttcaaggccagcctggtctatggagtgagttccaggacagccagggctacaaagagaaaccctgtcccagaaataaaaaaaaaaattaaccaaaagtctgctggcctccacaaacatgccatgacacatgcacacatgcatcccctcctctctctttctctctctctctctctctctctctctctctctctctctctctctct

SEQ ID NO: 1027 - DNA, 1938 bp, Mus musculus
tgcctgagctgccggggcttcctaagcgagccggtgaccgtgccgtgcggccacagctactgccgccgttgcctacggagggagctgcgcgcccgctgccgcctgtgccgggaccgcctgccacccgccgccgccgcctcggaggggaccccgcggccgccgcccctggccgccgccatcgccgacttccgaaccagcgtcgtgctcaaccacctggcggagaagtggttcccgggccagcgcgagcgcgcgcgggcggccggccgcctcggggaactgctgcacgaagggcgctaccgggaggccctggccgccgcctgcgacgccctgcgagcagagcccagcgacctgactctcaaaatctacagagcggagtcgtacgctggcctgcaggagtttaaggcggccctagaggatctgaatgcagttctctttcagcttcccaactggcccgaggtctacttcaggaaagggaaggtcctccaggatgccggctttctaggcgatgccttacagctctttcttcagtgcttagccctcgatgaagactttgcacccgcaaagctacaagtagaaaagattctgtgtgacttactgtcacctgaaaatgtaagggaaggcctgaaggagtcttcctggagttcgttaccgtgcattaagagcaaacctcttggttttccatcagtaatggagcagccgccctcccctgctgagcttggcctgaagcagactgaagaacgagtggaggatgccccagagcctgtcaaaggaagcttaagccgcgcccagtcagcacaagccatcagtgcagcggcagtgcctgccagggaggacggtttaaagcgcgtgtgctcagaacccttactgtccgcccagggaaagggggtcctgctcaaacgaaagctgtctctcttagaacaggacgtgcttattaacgaagacgggaggagtaagctcaaaaagcaaagcgaatctcccagtgaagactgtatgttttcaatagcttatggcgacatcccagaagaactaatcgacgtctcagactttgagtgttctctctgtatgaggttgttttttgagccagtaacaaccccttgtggacactcattctgtaagaattgtcttgagcgttgtttagatcatgcgccatattgtcccctctgcaaagaaagcttaaaagagtatctagcagacaggaggtactgtgtcacccagctgctggaggagttaatagtgaaatacctgccagatgagctgtccgagaggaagaaaatctatgatgaagaaactgctgagctctcacacttgaccaagaatgtcccaatattcgtttgcactatggcctaccccactgtgccttgcccactccatgtgttcgagcccagatacaggctcatgatccgaaggagtatccagactggaaccaagcagttcgggatgtgcgtcagtgatacacaaaacagttttgcagattatggttgtatgctacaaatccgaaacgtgcatttcttacctgacggaaggtctgttgttgacacagttggagggaagcggttccgagttttaaaaagaggaatgaaagatggatattgcactgcagacattgagtatctagaagatgttaagattgagaatggagatgaaataaggagcctgcgagagctccatgactcggtgtactcgcaagcctgcagctggtttcagaatttaagggacagatttcgaagccaaatccttcagcactttggatcaatgcctgagagagaagaaaacctccaggcaacacccaatggacctgcatggtgttggtggctgctggcagtcctccctgtcgacccgagatatcagctctccgtactgtccatgaagtctttggaggaacggttgacgaagatacagcatattctgacatacttttctagagaccagtctaagtaa

SEQ ID NO: 1028 - protein, 641 aa, Mus musculus
CLSCRGFLSEPVTVPCGHSYCRRCLRRELRARCRLCRDRLPPAAAASEGTPRPPPLAAAIADFRTSVVLNHLAEKWFPGQRERARAAGRLGELLHEGRYREAAACDALRAEPSDLTLKIYRAESYAGLQEFKAALEDLNAVLFQLPNWPEVYFRKGKVLQDAGFLGDALQLFLQCLALDEDFAPAKLQVEKILCDLLSPENVREGLKESSWSSLPCIKSKPLGFPSVMEQPPSPAELGLKQTEERVEDAPEPVKGSLSRAQSAQAISAAAVPAREDGLKRVCSEPLLSAQGKGVLLKRKLSLLEQDVLINEDGRSKLKKQSESPSEDCMFSIAYGDIPEELIDVSDFECSLCMRLFFEPVTTPCGHSFCKNCLERCLDHAPYCPLCKESLKEYLADRRYCVTQLLEELIVKYLPDELSKKIYDEETAELSHLTKNVPIFVCTMAYPTVPCPLHVFEPRYRLMIRRSIQTGTKQFGMCVSDTQNSFADYGCMLQIRNVHFLPDGRSVVDTVGGKRFRVLKRGMKDGYCTADIEYLEDVKIENGDEIRSLRELHDSVYSQACSWFQNLRDRFRSQILQHFGSMPEREENLQATPNGPAWCWWLLAVLPVDPRYQLSVLSMKSLEERLTKIQHILTYFSRDQSK

SEQ ID NO: 1029 - DNA, 27445 bp, Homo sapiens
tattttttagatacatctagtcattttttattgttttttaaagtattccattatatgaacataatggaatttgtggttttcagttagtagtgattttcatttggattgtttccagtattttttcctgatataaactaagctgctatgagtattcttgtacaagtcattttgtggacatatgtttttacatccctttggcaaaaacttagcagtggaattgctgggttctagggtggatgtgtgtttaatttattttttaaaacagaggaaatgtaaatgtgtatatacagatttttaaatgtttgcttattaaatggagtatttgagcacctaccaaagatacgtgcttttatctacattgtttatatttccataaatgatttgtgatttattttgatttttgtgtatttgaaagataacagctgaaaaaccgaacctccaatttagactttaatatgtgctatacctataaatacagattgtttgaccaccaaaaatatcagaatccctttcatttcattctagccatgttcttcccctatcttaacctgtttctgttggagttttaggcatattcctgagataagcacccagaaatttgattctccagctgtctcccagcttatttcctcgctattatagggaagctgccatggggtgcttctaaccaagtattgggcagcagtaactgcccacacaggttagttattcagtgagaaattaaattgagtgtaagtacagggaattttgtagttttgtagttagaagtccaagtgtagttcacataagtgccccaaggccaacttcgtaaatatacattgaggtgaaccatgaactattttgatagcatagggctcactaagattcagagataaatatttaatatgtcttttaagatctttttatagtctttgtgttgaaagatcagcctttatcctgagtcttactactcccatgctttcctttcaaagttttgaatcatttgtttgcgggtgatttgaccccatgaggcacacctaattttgcaagacttttgaacttacagtgttgcttaccttgttcccctcctgctcattaaaaaaatgtctgctacaaactttctacatattctttattaggtaaatttatacaaaattatccttaaccaaatattttatattttctactacttttaatatttctcttacagattttatgtgatttattattacctgaaaacttaaaagaaggcctgaaggaatcttcctggagttcattaccatgtactaaaaacagaccttttgattttcattcagtgatggaagagtctcagtctctcaatgaacctagcccaaagcaggtacggggtgagacaaggttatcatgagtttagcgtatccatttctttacgagttaagagcttcactttcctagtttcaagtactagcacctacttaagtacttttaacctggttagttatcatagtagaattttttccatagcctttactttacactaaaatcttttatgtaaaatatttgctaatgaatcacaattttaggtcccgtgaaagaaaacttttagttctttaaaaatatgtatagaacattgcatttatgtttcctcagggtagtaacagctgtgttatagcataactacttttaaacctcattataacataagtcaccttgatttctagggctgtgtaagtacagtcatcccttgtatctgtgggagattggttccaggacctctcacagatagcaaatccaaggatgctcaagtccctgatatattaataaaatggcacagtatttgcatataacttatgcacatcctcctgtatacttaaatcatctctaggttacttataatacctaatacaatgtaaatactatgtaaatagttgttatactgtattgtctagggaataatgacaagaaaaaagtcgatatatgttcaggcttttttttagaatattttctatccccagttggatgaacccacggatgcagagcctgtggatacggagggccaactgtgctggcaaaaatcatttacttgtcacagtgttggaatcaagttagtgctattaaatgaacattaaaatgagcattataaggcattgaaatttcatttcagtttgattcttggtgagaggaataaaggatagtaaagaaatacagttacctttgtttattgtatttttgtagagtgaagaaataccagaggtcacttcagagcctgtcaaaggaagcttaaaccgtgctcagtcagcacagtctataaattcaacagaaatgcctgccagagaggactgtttaaaaagagtgtcctcagaacctgttctgtcagttcaagaaaaaggtgttctgctgaaaagaaagttgtctcttttagaacaggatgtgattgtaaatgaagatggaagaaataagctgaaaaaacaaggaggtaaaaattttgctctacacttatataaaataaatttatttagtcagaatagtctttaaagtttttcctaaggaagaaaaccccatgtctttgttttaatagaaactcccaatgaagtctgtatgttttccttagcttatggtgatattccagaagaattaatcgatgtctcagatttcgagtgttctctctgcatgaggtaagcatataaaactttatagaagatgaatattttatgttagtatacataaaataccgtgtagataaaggtaataatagacaatgtaaagtaacacaatgctggaataaaaatcaaaagacatgaattttagtcctgggtttacctttcatgccttgggcaaataactgaatctctgaacctcaggtttcctaatttagaaagtgggatcaagctttgcatggcctacatctcattgttgtgagaatcacatggcttcagtataaaaggaatctgggaaattgtaaagtactaagaaagttatagatgatattatttttgaaacttacctatctccatggttttaaatttgggtatgaattctaattagtattttatgtatatgatcctatcttattaatgtatattaaccataaagtctttttaaagtaacataaggataaggatttccattattcagaatgctataattctaaaagactaaatgttttgaaataacatttctcatttacatgaattgtgtaggatcaaaagattcatacggggtcaggaggcctagtgctggtcacactaggctggtagcagttacgttcctgagcaagtcttaattctgagccttggtttcttcatctgtgaagtgaggggattatactaaacagtccctaaagtacctctaaatctatttctagcaaattcaaaactatcatgtttcagaaaataagtaaaactagttgttctgtaatgtttgaataatacatttagtattaagtctaacattaggattcaactgcattatttattaggtcattctttttatgagttttatatcataagggtcttataaacctattaaggaatcatttttaagttgatattaaaatgggaatctaaaggctatacaaaagctaactaatgatttttaatgatgtattttacattatttattttgcagaaagtctttgaaatctggtatgtattttacattcagtgcacatatcagcttgtactagccacatttcaagtgattagtagccatagtgtccaggggctgttgcgttagtcaggacagctctaggcccttggctctaggcctttggcaggaggcctttgttgatggagaattttaaaacattctggagggtatggttacacttatcactgccccttctctcctctcctgcctgctgggccctccttcttcctcctttaaatagagattagtgttatggttctaaagtagtacaagcttttcattggatagtttaatgtgaaaactaacatgtatcttggttgatttcaggttgttttttgagccagtaacaaccccttgcggacattcgttctgtaagaattgtcttgagcgttgtttagatcatgcaccatattgtcctctttgcaaagaaagcttaaaagaggtaaatatttgtatatgtgtctgtttgttggtcttaagtttggcagcatggtttaatttctgttcagccatagaaatagtgatgatcacgttcagaattacattctatattctgagtgactaacaaggataatgttttattacccatatgctaatgttggagaaaagtgaggttgaagaggatggggagaaagaagacagatgctgaagaccaacccccttgtacttaattttttttttttaaacaaaagtgggtatggttagttatctggtcagggataagttcaattttggtgatgactatactggggaaaccctattgccctgcctccaaccctcaataataagccagatgtgaggactgtttcagcttcctcaacatctagaacaactttgttcaatagaattttctgcattgatggaaatgttccatatctttgctgtcagatatattagccattagccatgtttgcctgttaagcttttaaatatggttagtgtcactgaggaactatatttacattttattaacttaaatttaagtaggcacatgtgactaatggctgcgacattgggcaatgcagctctagaaaagtggtagattggaaagaagagagggaggtacagcttcctattccccttcttgtagagtcagtgatcagtgctaataacctgtgataggaaagtagctagatctcagtggatgtcttctctaattgatgagaagagagcaccctcttaatcatgcttgagtgactgcagatcacctactgtcaggctaaagcctgtgattctgagaggcaattgcagtttgtagcgttgattggggaaagtgattctgtctctgatgattgacaggattgcttaaaaaaaagtatcttccaaatatgaattgaaaaattcataaaaccattatgaatatacatacagtatttcctgtatagaaaacaactcagtacggatgtcataatagcatgtctgttattacatttgatatgtgtcttacatatataacaagctgataatgtaaaacaaaagcatatttagaattttctcaaagtcaggaaacatcagatacatttattcttaaaagagtttgttagttacatttttagctaatatgctcaatgtttttagatgaagtactgtaaacatgctatttttccagacttcatttaaatacccccccaggataactatgatgcttgtgtttccagattaactgttaggttggtgcaaaagtaattgtggtttttggcataatattagatctattgctttgattagggatattccctctttaaaaaatgtctggagattgaaaaatatatactaagcatattttttgaaagtataactaacatactatttagcaatatcctgtttccaactttgaagataccctgcgtaatataatttgtaaattcaaaatacatatactttaaaaaagattggtatgctgttcagttttacatttttcctacttgtcattttattttgctcatttttccatttccatctattttagatacattgtttttatagcagcataatagtccagtgatttaacatttctttgttgttggatatataaggtttcttgttctcttttttatatactatgcttttgccaacatcatttaaaatgaatgattttatgcatctttatgtaatcgaagatattatgacagatattatatatctgtcactgaaggacagagttgaggtctgctcctctactcagtagtgggtgacaatggaagaaaaatttgaaagaaaaattatctacagactgtgtctgaaattgggaacaaaacagatgttttgcttttcttaaataaggcaataaccatttccttaggttaaatttttgggaggtgaattattggatcaaaagccatatatttatgaagcccttaaaaccaattgttggattgcctcatccccagaaatgttatttattgagatttttatcagtaacgtaagagtggctgtatttccctagatgtttaaacatctttattaacttaatagaaaatgataatggaattgcttttatgacagctaatttgattaattttgtgataaacacttattatctgtgtatatactacctgcccaaggccacctctccccatgctcccctgaccagcagcatctgtcacctgacaacctgttagaaacatagattcttggaccctaccccagatgctcagagactctggtgtggggctcagtagtctgtattttaacaagccgcgattcatgctaaactttgaaaaccaccaccagtttcccaacctctcgcatttccccatctactcttcattggataatgacaaaacccttgcttttactgactgcagattcaaggatggcttcatcttgtgatagtttcccaggaggttttcctcactaattttatgaaataaatatgtattgggcattttctttgtacaaagttctgtgcatacaccctgaccatgtccctggccctaccctaagcaatttttagtttaactacagagatgtaatatatctgtgtacatatactacacgctacaatgcctactatgtggtaaaaacagtaaaatatgggttcttgggagagaaaaaaataattaaggaagagtttgtgaaaaaggtaaaattggagtcagaccttgaaggatagagatgttttgcataagcaggagtgagagagatggcttttgtaagttggaatagagaataacacaaaaatgcatgaggatagtactttttcagagtatttaggggtcagcgcaaatgtaagattttatatagagctggggtagatggatcatacaggaaaagcaatatcttgataagggtctgagtgatagtgtcccaagaaacgcaccttccttgggtcactcaaggacagagttgaggtctgctcctctactcaatagtgggtgacaatggaagaaaaatctgaaagaaaatttatctagagactgtgtctgaaattgggaacaaaacagatgttttgcttttcttaaataaggcaaatgtgttattttatttattccttatcccgtttttgtatctcagttaaaatgatagtttagtgcccatgagctgtcaggtggaaaagggcctctgttgtggaagacggcagggcagggccctctgcggctaatagagaagctgtggtcacagcaggaagcagttcttctgtacagggcttggttcaggttgcagccaactatctttactgctcttgtgcaaagcctcagacaggtttttttgcttagcatcatccattgtaatgttcccctcactaattaatccagaattgatggtataagtatgtaataaaggctttaatatatcagttaactgtgttgcctgttttatactgtaggaaaaccactgctggaatgtaaaataatattgtcttttagtatctagcagataggaggtactgtgtcacacagctgttggaagaattaatagtgaagtatctgcctgatgaactgtctgagagaaaaaaaatatatgatgaagaaactgctgaactctcacagtaagtttcttctcataaaaaaaattatgaactactaccctttaatagtaaggaaaaacctcacctcaagctggatcctgtctttagttcatctcagtctagtcaagaagtattggtctgtttccgtggtcctcaacagacagaatcttataaaagttcacttggtaacatccggatgttttatagggagttattgactcagctctgtgggctgaagcagtattttgggcgggggaggaatttcctacagtgccatcaggcagtggaatgggaaatagagagggggcgctggtgacagtgacattggtggtgatggcggctctcatgtgtcgtggtagggcaagaggaaggttgagggtcagtagcctagattagcaggggattttctgtcacatggaggcccggaagggggctttccaaactttgagatctgagattgaaattggaagaggggtgttcagggccaaatcctcaattaatgaagatactgactgggagcacaactgagttggtgtcgggagggtgaaaatctcggaggcaactttgggattcggtaaggcaggccactctgcaaagaacacagcagctgatggagctgggtaggcagggccaggcattgcttgttgtcccttttctgtttttctttcccgtttttctccctttcttttccctaaatgtctttccctcttgtgcagtcacttgggtctctttaaattttattaacgggtttttaatttctttatttcttttactctcttttaattgaacacactaaaaaacaaaattataatttgtatatgctgttttatttaacaactttttgtttccattgattttcaaaatataaattgaacattttgtatgtcactttctaagaaaagctgtgcttgtagactcctttatcaacatgtgcccatcagatgtcttcagtgagccaggtgccttccacagaagaaagattgccactctttatagaaatagatattgatttgtcttctcacagaattgatattttattgtgtggtttataaaatgatatgacaattatgaacctttctgatcagtgctgaagcatctagatttaagaaaactgcatttctgcttttgaaaatttaaacatggtgacacaaccagccagcccacggaagagtggtagactcaaaggacagaggagggagacacacagagagctgcgcattggagagaagagaagcgacagggtgtccagctgcttactaatggggctgtttcttaaaacacatattttaaacatgtttcaccttatgtttatataagtaattgatggtcattttgaaaaaaactcaaaaatacaaatgagcttttaaaaaaagccataatctgcaactcaaagggaatcaactattggcattttggcatacatatttccaaacttgaatgtagtatgtataaataggctttaaacaaagatgggatcatgttattcatgatcagtatctaaaacctgctcctctcattaatataagcatttcttctaattcagttcatacacatcatcttttaatggaaacatagtattccgttttatggatgtaccataattgatcttactagtctcctctttatgattctacaatttggttactatccacattgctacagtgaacattcatatagcacttgcctgcttatgtctgaaaataagctggttggttccaagaacatgaacatttcctgccaacaacgtaaggtttctgctgtctgtagccatgttctttagcgtgcctgtgctgtttcagagtgcccccatgctgccatttttcccatacctcagacagaactgggcattgcctttatccttctctttctttctaccaatctggcaatgaaaaatgttatatcattttaattacttggaaaaaatgttatctcatcaaaatatgttttcttatccttgcgtttgaaaataatggctgagaatttttaagtatttgctctttgttgtgggagttcactttttcttgttatctaagagtaactatgagtgtttgggataaaaggtatttattgtcatgttataaatatttaaaacagattttaatataaaatattacttataataaattctcttgattcataaacatacttagctctgtaagataatctggtgtcttaaaattcagtttactcttataaataagaggatcacagcagattttcagtattaatatttcatcagtgtgagcttagtgaacggggtgctgattcttgttcttgccaagaataaaaaccaccttatttagaactaattctttttttgctttacattagttcattactgttataaacctcactcattttttgtatgtgttcggtaatatttttcttgtatgaattctaataattaaactgtttttcccttagcttgaccaagaatgttccaatatttgtttgcactatggcctaccccactgtgccttgccctctccatgtatttgagccaagatacagattgatgattcgaagaagtatacagactggaaccaaacagtttggcatgtgtgtcagtgatacacaaaataggtatgctttttgtgaacctaaatatttgtatttatgttagacctctcaatatggatgagaacttgcatgtttatgtttcaactttgttactaatcaaggttttcttttagttttgcagattatggttgtatgttacaaattagaaacgtgcatttcttaccggacggaaggtctgtggttgatacagttggaggaaagcggtttagggttttaaaaagaggaatgaaagatggatattgcactgccgacattgaatatctggaagatgttaaggtattttaaaatgtgctttgccagcatactttcgtatatcctgttccagggattggtacaggcatgcaggctattttctaggtgcatgaaccagttcttatcagacagccttaccactgtgatgagaatgtgctccaagttaccttttccgtatcttgctctgaaactgttgcacattctaagagaacttggaagactagaacatagattctctttatttctgcaggcttaacaaccagcccagtgcctagaatgtatgtgtatatgtacacatgtgcatgtgtgtatacacgtgataggtacttaacaatagtggttgaataagttgaacttccaacccatctaagttttgaaaggtttacatttctgccctgttttattgaatgtattagtagttgaagccgatggaattagtagattgaaatttgatgtaaatgtaaacacatcaaatcttataagaattgttttatatattaagattgttcttgtgcctaagataaccttaatgataaaatagagttgaatgctgtgtgaagaccctggggcagacatagaaagcactgccagtgtacatgttggtgataacttaacagggtagggtttttgtgatgtctttctagaatagggttaatgtggcccttttgatgtttgcaatacccagtttacctactgcagttagtttaggaaccggaaaagtgacttatgatgctacaaataccaaattgaaggcaatttcttttggaaaggcattataaaaacatagatcttatcccttctcttattcattgatctgtttaggcccttcatttcgtcagcatttattggatattggcattaggtattttcacaaacattaactcatagaattttcacaactctatgaaatagtagatgaggaaagtacaattcagaggtgttaattaatttgcctgagagcctatagataatgtaacaaaaatgattaaagcaaactctctgactcagactttgagctttatcactatgccatttggctctctgttgataaacctgattagtctgacgttggcagtcctatcttattataaaaatgctatgggggtactttgtcttgtgcagttggccgaaagtattgtgtgagttgaaattttgagttgattgatagaatctgtgccttaggcatacttggttaatggaatcacttgctaaaggttcttctttgtaaagttaataaccatatttcagttttgtgtaaatttatgtcttcacatattggatttgatgacaaaatcacttgagtatatggctaaattacatgactatatgtattaatacttacaaacatgtaggcaatagaatcacattctaaaagtattacagatatgatatttataaacgagtcctctttggtcctcggaatgtctagtaatcttttctcatcataatgtcttcatctatataatgattttcttgtccattctggaaaaccttctcaaatttgttttttatggcaaattttcctcttcttataataattctgttttctgtgacttctaatgaaattttaagttctgttaaaattatcacagtaaagttccttgactttaaaagcttgcttttaaaatggagctggccaaaaagcaggcagagactttaaaagcgtctctgcctgctttttggccagctccgtttttcatcactgacgcttataattgttatcattccttgtttaccagagcctgtcatttgttttcttgaattttgtgagggtgcaaagcagatgctttaaaaaaaaaaaaaaaaaaaagatttaacaaggcataagtttgtttcttgctcctatcaatgtatgttagcaggggcctgaatcatgtatagtcatttcaggaccaaaattcttcaattgtgtggctcctctaccttttttaaaagtttatttttattgtggtaaaatatacatagaatttaccattttaaccatctttgagtgcacacagtggcattaagtacattcacattgttatgcaaaaaacagatgctctttaaactttagttttcatttcaaatctttcaaaagtaaaaagtctgcttttttgtctctggtgtgctgtagtcttatttttatatttcgaaatgttttcagagtccctttgttgtttttaaatgagtcatccttgaagtatgaaaggctgagtcaggcctggtattttttcagatgagtttgtgcatatgagacagagcacgacctggcaagtagcaagtgggatgtaagtgtgcattaaagaaatcagtataagatggatgagttaaacttagatcttcccacctgtgttctctgagactactcttctatctcaggctggaagcctgatgcaattaattttacatttgcagtttggtgacccagtagtctaaagaatacactgaggggttccagaggtagccatagccttgggccttgccagcagaagctcatcattgtgtaattgactctctgacatactggctttatatgctaacttatttgttgtagctttttgtttgtttttgtgttttgacccagttccctagtaaaagatgtaactgtgcctggactcctcctgttactactttctgtcatgtcatctacaccctaactacttatcttttctttttttgtagcaactatcatccacttttttgttccactgctttcaaaaaccattgatccataaagacaaatggaattccaaattagacctctgaaccagaactcactctcaatcttactcttcccacttgggggctgttgtagggttctgcaatattgcactgctaagtcagcaaggttaggcataggtcaggccttgttgtctttctttagtctggtcagccctatatgagacagaaatatgtattaaagcataggaataatactctctgggacgtcagcactgaaacaggtattgccctgttcttctgatccctttttccatttgtgtcggttggcatatggcatatggacgggggattagacacagaagtcttactgactattgtatttctaggttgagaatgaagatgagattaagaatctcagagagcttcatgatttggtttactctcaagcctgcagctggtttcagaatttaagagacagatttcgaagccaaattcttcagcatttcggatcaatgcccgagagggaggaaaaccttcaggtatggtggcttttctgttcttccaaaagtcacttttttataaacccaaatttgcacacttctacatttgttttctcattgtcctttctgcactactttttctttgactgtcccctcccccgcaccagccccacctcatctttgcaatcatgagttctctagagcagtggtctccactacattccgtacagatagaggctggaaatacgtgtcagctgagatgcctgtaggagagagtgccagaaagggagcaagtccttaagaggatttttaggagtgggtaaggaattaaaaacgggatgttactatctagaaactgtgactgtgggacaactaaccatgcctttgagcccatcgcctgttgctgttattctttgacagcagagagacttaccattttctatacatttgaaacatcttttctcacctttctttgtatctcccaacatttgacccaaccacttcaattcatttttgtctcttcatgtttaatacctcgcttctcatgaaactattattcttttagtcttgctggtacttagggtttacacttaagcttagtctaatgaatgtgtatctggcactttctgtgcaagcaaaactgcaggaggcataaaagaagggtctggctcctggaaaatctgatcatagacttactaaagcactacgttttaggcatcgtagcattttgaattgaactaaatgtttttgatcagaaggtgatagattttacaaaggaatggctgtcagtaaatatgtgaagatggagagataatagatctcattgtaatgcacactgcctcattcccgttttcaagggttggtctacatttgtctgaatcccaattgaatccttcacctgaacttgaaacaccaacattaggccatctccaaatttagtattcattctgtttagcatattatcagttgccatctatttgttttaactgattacttgaatctgattaaacatcacagaaatgggctttgataagaacaatattgaataagaaattttaaataacaaaacagcttatagaaaaattcagcataacttttccatcaccttcaccacccttgccttttattatcctgtcctgtatcactgctttctgttagcagtgttgtgtgagttaggatttgggcaggaaagcaaaagcaaccacccgtcattttcccagaatgaagggtttgacgtaggatgtagactttgtatagtagttgggagagctgtgggagtgaaggtcagggatgtcacctacagaagtcagggaatctgccaccagagatcctgcatcagaaacagccaacagcgtgcttctgaagaactagtggggaagtggctataattcttaggaatcccagcaagtccgcaccactatctcagtctacagcagtggagaaaggggtttccaggagctctctggaaagttcctgcccacactttgcaacaatcttcagaggataatggcttctcttccagcttccacacccaacaagagtgcctttcatcggccaactctaacctggaaccctatggcagaggggattttaggagacagtttgtaatgtctgtggaatgcagatgaagaggtagcaatgcttagttgacagcggacaatacacaaatatagaaaccgaatctgattctagaggggcctactgagatcagcactgatgtcgtagctccttttgtcattctgaagctttatattttaagtccgataaatagcaatttaaggttcagtgaaggtggcttacaagtccttttatggaaatttctagttgtttcaatagccaatagtcagccctcacagcattaccaggaccttttcactggagatatgtttcttttttgaacaacattggaagctggggcctttttcttctgtctttccaagggttccataatactttgaggaaattttaaatctcaattaacatttcttaatgctttaaatctatagctcaagaaagtggctgtcaactaggggcatgttgcccccacaggatatttggcattacctggagacatttttggctgtcacagctggatgggaaggtgctactggcatctggtggatagagatcagaggtgctgctgaatgtgctctagtgcataggacagccacatgcaacaaagaattatctggctcaaagtgtcagtagcctgaggtcgagaagccttgctagtgtaataggaggaaagagcgtgtgttgactgtggggagtcaggtctagatttgaatctcggctctgccacataagagccaagagatcttggacaatttgcattacattgctgagcttcagtttctcccattttatactttgcataattgttaaggacattggagatagcacctggcacatagtacaagtgctcaataaatagtaattttttggtggtttgctactgttgttacataaatccttgttttattaatgctataaactgtccattgtttttaggcagcccctaatggacctgcatggtgttggtggcttcttgcagttctccctgtagacccacgataccagctgtcggttttgtcaatgaagtctttgaaagaacggttgaccaagatacagcatatactgacctatttttctagagaccaatctaagtaactaactctttggatctccctttaaagtgaccctaatctggctgcattgatggccagattgtctgctgcctttgcacatctagtgctggtttcagaaatttaatgaaacttttctttttccttcgacctcctgaatcatgtggttctgcaaatgaataccttcaactaggatttagaccactaagaacttgcacagaaaaacacgcattgaatgtgtgtcgaacctctacattgtgaagttgcactatgtaccatactctaaaatgaaataagaactctttatgtctgtgagagagtgtgtgtgtgtgtgtgcgtgcgtgtgtgcttgtgggggttgggtagtgtgtgtgtattttctctggctttaaaattttaaaacaaacaaacaaaaaagccatagagagcagaacttgccgagggtcatttattgcccaagtttacaagagtagcgatacaagtttttgcaaattgaatttgcctcagatatatctgtcctaatgcttatatttgcacaagtatgtaaaatatcgtgttgaggatcattctttgttggaaatactgctcttgctgaactgtcttgaccattgactatgacacagtttcttatttatgtaaatacttgcatcacagtggccgacaggcattggatgcagaacctagagccagttttcaggaacaattgtaaacctgacatggtactgtgcatctattcataaaacactcaaaactgtgaaaatatggtttacatttaattgtacataaaggtaaagggagaactcaattcagtaccagttagtttgtacattttagggggcttttcacattaactgcccatttgtgtaatttatagtttgacatgatgtgtttgttttaaaaaaaaatgcatagtataaacccattaaggatctgggaaaagagaagaagtttaatatagaactaagcttttaaagtttgtttttgtttttaattctggtctcggtgcaaatgttagttatgccttattcatatcacagttagatcaccatgctgcaacatggtttatattcatgctgccctagaaacttttgtaattatttgttgcaaatttgtgactgtccttattaactttcttttatgtaagtaatttgtaaaagtttcttaaaatttttgcttttgcttatttaattttgaataaaagctaaattcctaatactttttcttaaattgtaggtcagtgttataaaaacaagtcagtagaagaaccaaactgcatatgttaaagaacagatgagttttgcttatggtttggtggcattagatatatgctatggtttccaaaaactttggccatttttattttttgagaaaaaaaaagcaatttattgagggtttaggcctcggaaccatccctaaagcactatttttcaaccttttaaaaatccatgtccctttagggtaaggctaaaattctttctttgatgcctcaccatttgagacttctcttggttacacagactggactgtttctgcccccagttcctcagctaggattttgcaaatgtcagtcaatcatctttttttttttagagacaggatcttgctctatggccaaggctggaatgcagtagcacaatcataacttgctgcagcctcaaactcctgggctcaagtgattttcctgtcacaggatccttggggtggcactttgccagccagaaatgtctgtggccggtggtgccttctgcctgagtaatgctcatgcccactgggcttgttctggccactcagcctggcaggccgtgcttggcttttgctaccagcccagatcccccacctgccaagagcgaaccaggcacggagcagcgaggggtgtgtgggcaagtgcatgcagggtccagacactgcacacagccaggcacaccagctgctgtgttggggtgggcaccttcatgcgaggttgcagctggaccagatgcaccacgtggcttccactgcaggcacccacatctggacaaggggaacactgtggcacccagaagcttggagatgccaggaaccacagagctccaaagagggtgtcacagccctggcttaggcaccctttaggtctggactccccaaatagctgtagctcttcttgtcacccacaatgtggtgagttggggtgcaaggggggtatgtgtttcagccctgtttgtgttatagttctttcagtttcaccatttagcaagtcctgagttctatccctgcatccaggaagaatgaggtggacagacaactggaaggtgagcaaggcagagaggagcttcactgagtgatagaacagctctcaggagacccaaagtgggtagctcctttctgcaggcaggtcttcctgatttgagtgtccagctttcagtggagagaagaccctcagtgggtagctcttttccacaggcaggtcatcccatagagtgtccagttctcagcagagaagagacctgaagtgggtagctgttttccacaagcaggtcatccagaagagtcaaggagactcacaatgggtagctccttcctgcagctggtagtcctgagggtctgtttgagtcttactgactctagggtttttatgggctcaggaggggaagtgtgtgctgatcggtccatgggcggccatgggtgggctggggaaaaagctccatatgtactcactccaggcagtggactccagctggaactggcagctcaggccccaggcttcaggccatccctggcttgaaggtgaggtttcaccaggacccacccttttccatcctgccaccatcaacatgccatccacagcaaccaggctgttcctaccaagaggcaccggcaggcttgtgccaaaccgccctcagggcccccttggcctcccgcccctgcttgttggtgcccaaaattcaaagggggtcaaggtggtgggactggtgtgtcagcaccacccctagcacgcacacatccagccaggttgagatagcacccgggttcagcctcaactttgctccagaattggagcaggtgtcaggagaggggagaagcaggagcaggcacttctgagcctgtggggccagggggggcttccaggagtgcaggcatgcccaggtctggagccatagctgggtggctgcaactgcatccatgagtgtggggctcctgccctgccaactcagtagggggtggggctcccacctgttccctcccctattggatccactgtgtagtagtgtgtaaacctacggtgatattaaaagttatatctccctagggtattgcgaataacatcacagtgggtgtacaaccactctgatattcgaagtaatacctccctaagatatgacaaaaaatatcaaagcgtggacccagtcgtggcatcaaaagtaacgtctctgtggatattccgaataatatcacagggtgtacacagcctgtgacattaggagtagcatccccataagatattccgagtaatatcacagggtgtacaccccatgtgacattaagggtaacatcttaggatgttacaaacaacatcacagggtgtataccccctgtgactttttaagtaacatccccctagaatattacgaagaatatcatgggtgtacaccccgtgtgacattaggagtaacatctccctaggatattacgaagaataccactgggtgtacgccctctgtcatattaggagtgacatccttctaggacattatggataatatcacaaggtgtacacacactgtgatattcggagagatatctccctaggatagaaggtatcatatcacagaatgtacgtgcatggtgtacacctactgtgatattagaagcaatatctccctatgaaagtatgagaaataccaaagggagtacacactctgtgctattagatgtcatgtttaccatggatattacaaataatatcacagggtgtacacacatgaggtacacccactgtggtattatttgtactgtcttagagagatataactctctaatataacagagagagttataactctgtaatatctctgagatattacaaataatatcacagtgagtgtaaacacagtgtacatagtgtacacccactgtgagatttacagtaatatctccctataagactacaaatattatcgaagggtgtacaccccctgtgaccgcaggagtaacatccttctggatattgggaatgatatcataagccatacccaccctgtgacattttgtacaccctttgtgacatgaaaagtcacaccccctggtatattacgaataatatcaaaggcagttgacgcacacggtgtacacatcctgttgcattaggcataatctttttctgtgatttccgaataatatcacagaaggtgtacacacattgtgtacactccaggtgacattaggaggaacatctcctcaagctgttagaaataatattaccagcgttgcatacacatggtgtaccctccctgtgacattagcagcaacattcccctagaatattacgaataacatcagagggggagtacacacatcatgtacgcaccttgtgaaattaggagtagcatctccctacgatgttatgagtaatatcacagaatgtgtactcatatggcatataccccatatgatgttaggagttacatccttctagtatgttaggaagaatatcacaaaggtgttcacacatggttaatagcatatggaatattaggattaacatcccttgagatcattacaaataacatcacaagggctgtgcacacatggtgcacatgccctgtgacgttaggagtgcatttccctgacacattatgagaaatatcacagagtgtacaccttctgtgacatttggagtaatgtcccctagggtagtacgaataatatcccagggtgtgcatcccctgtgacctgaggagtaacgtctttctaggatattgtgaataatatcactaaacgcacagcccctgtgacacaaggagtaacatccacctaggatattaggaataatatcacagggagtacacctcatgtgacagtaggagtaacctcgcccgaggatataacgaacaaatacagaggatgtacacgtgtggtgacatcagcagtaacatccatttaggatattacgaatattatcacagtgtgaacaccacctgtgacattaggagtaacatctccctgggatattaagaataatgtcactgggggcacaccctctgtgatattagcagcaacatctttctaggagattacgaatgatatcacagggtgtcaactcactttgatattagaaggactgtctccctaggatataagctatctcatgtcacagagtgtacacacatggtgtacacccactgtgttattagcagcaatatctccctatgatattatgaaaactatcacagggtgtaccctctgtggattactagaagtaatgtttaccatggatattacaaataatatcacagggtgtacacacatggggtacacccactgtgatattaggagtgatatctctcgaagatattacaaataatatgccagtgggtgtaccccatgtatgtacacccactgtgatatttaaagtaatatctctctataagactacaaataacatcgaagggtgtacaccccctgtgacactaggagtaacatccccctacaatacttggaacaatatcacacggtgtacacccctgtaatgttaggagtaacatcccccctgaatattactaataatatcacaaggtatacaggcattgtgacattagtcataatatcctgctagcatattttcaataatatcacagaaggagcacacctgtgacattaagagtaacatccccctagaatagtaagaataatatcacagggggtacaccccctgtgacattaggggaatcatctcgctagaacatgatgaagaatgtcacagggtgttatcctctgtgccaataggagtatagacccctgggaaattatgaatactatcaaagggtgtacacccctgtgacattaggaataacgtatttctagaatatcacgaataatatcacaatgtgtacatcccctgtgtcattaaaagtaaaattgccccaggatattacgaaatagaacacagggagtacaccccatgtgacattagaagtaacatcccccaaggatatagcgaataatatcagagaacgtacctgcattgggacatcagtagtaacatctcttcaggaaacacgaataataccaaagggtgtacacgcattgtgaaattagaagtgaactcccgctaggatattatgaattttctgacagggtctacttgccctgtgacattagcagtcatgttttcctagactattacgaggactgtgaaagagtgtacaggacctgtgaattacgagtaacatttctatagaatatcgcacgtaacatcactctgtgtacaccccgtgtgacatcaggggtaacatcccacaaaattataacgaaaagtttcacaaggtgtacaccctccgtgacatgaaaagtaacatttccgtagaatacgacctctagaatcccctagaattccctagaatctcacctctctgatatgaggagtgacaccttataaggataatacgagtaatttgacaaggtgtacaaaccctgtgacataagcagtgacatccctctaggatgttgtgaatactatcaaagggaatatatcccgtgtgacaataaaagtaacctccgcttaggagaacaagaataacatcaaaaggtgtacacacattgtgacattattattaatgacccgataggatattgggaataacatcacagtgtgtagagtcctgttacaacaggattaacattcccctacaatatgacgaataatatcgcagggtgtatatcccctgtgactttagtagtggcatcttgctagaatatggaaaacaatgttccagggtgtgaaccaaggggggcagtagacaaaagatcccaggaaaaaggggggagtcctatcaaccccctctccccccgtgaatatgaggatcctcggtggtcacacagcgtgttcacgttattgtcagtaatatcttctccgcctctggaaattaccaactatgtcaccgacgggtgcacatcctctgcactctttggagtaatagcattctctttccccttgatattaagaacaatatcacaggagtgtttttacccctaggggcattccgtgtagtatcatcctctcccacgatgaaattaggaacaatatcactgggggtgtgtccaccccgtgcgatattgaaagtaatatcatcctcttctctcctggatcatgggaaccatatcactggggtggtgtacactttctgcagtattgggagtaagatcatcctctccgccttggaatattaaggaccatatcacagtggggctgtacacacccagtgctattaagaagaatattatcctcccctgccctgcacattggaaaaaatatcacagagtgggtgtacacctcctgtgatggggggggggggtgatatcatcttctcttcttctggatagtagaaacaatatcacacgggtttgtacactttctgtgatattgggagtaatatcaacttctccgcctttgaatattaagaacagtatcaagactggatgtacaccccctgcgatattgggagtaatatcagcctctcctctccatggatattaggaataatatccccggatgggtgtacacctcctgctgtgtggggagtcatatcgtcctctcgcttccgggctactaggaacaacattagagggtgggtgtacacagcctgcgatattgcgagtaatatcaccctctccccctccggatattaggaacaatgtcacagaaggggtgtacacttcctgccatactgggagtaatagcattctcttcttccgtgaatattaggagcaaaatcaccgggtggatgcacacccagtgctatattggaagtaacgtcatactccaccccctggagattatattcggatcaatatcaccgggtgggtgtacacctagtgcgatattgaacggaatatcatgctctctccctccctggacattaggaacaatatcacaggtgggtgtacacccactgagatattaggtgtaagattcgtattcatctttcctcatttattattcacatgaatatgaattaccaatattaatattaataaataattgctaataaagtgttcaggttattaatattaatattaattattaggagctaatattactgttttctaatgaataagatcaatatcagttattaatatcaggcgttattaatcattaatatgaatcatttattatcatttgtataactatttaatattaattatcattattattggtatgatttttaaaattatattatcagttattaatattgataattattagtatcaattaataattgatattattaatagcgataagtaatattgatattaaaatggatattatagattattaattattaattgcattactattattattattaattgcgataagtaatattgatattgaaattgatattaattgcgataagtaatattgatattaaaagtgatattattaattgcgataagtaatatcgtgccattccacttaatatctgtgatcttgttgctaatatccgggcggggacagcacgctattaatcccaataatccagaaggtgtagacctcccctgtgatattgtccctcacatccaaaggtggagaggaagatatatctcccagtttcgcaggggttgtacaccacccctgtgacattgttcttgatgtccaggggtagagaaaatgacgtgactcacaatatggcaggggatgaacaccccctccatgatattgttcctaatattcaggggggaagagtatgatatttttcccaatatgacagcgggtgtactccccatatcccagggggtggatagtatcctgatctgtgatagactctgccacgatgcggggagtaatatcatccccctctccttcccttgctattacgatacacatcgcacgggggcgggcgacccccgcgatgcggggagaaatatcaccccccccacccccgatattacgagccacatcgcgggggggtagacacccccagtgatgtggggagtaatacatatcccccttccccatggatattaggagccacatctcaggggcgtggacaccctccgctgatgcgcagagtaatatcaacccccttccctccctgcatgttagcagccactgtggacacacagcgtatttaccatatttccagcaagatcatcttttccattgaaccttatgaacaagatcacagaggggtgtacacctcctgcgatattgggggtaatatcgttctctcctccactgcctactgacaacaatatcacaggggcgtgtatttctcctttcatattgagagtcatatcatacttgccttccatatatgaagaacaatagcaaagaagggggtggacactttgactatattaggagtaacatcattctctctacccctggatattagtagcaatatcatagggggatgcacatttcttgtgatattgagagtagtattgttgtctcccccgctggatatgaaaaacaataccacaaggggcgtgaaaccacctgccaaatttgagggaatgttatcctctccgcccccggatactagagacaataacacaggggtaatgtgcacccactgcttgactgggagaagtatcatcctctcccttcttggatattaggaacaatatcacggggcggggggtggtgtactgcctctgcgatattgggagtaaaactatcctctcttcccctggatattaggaagtgtatcagaggcggagggtgcacattccctgcgatattcaatgtcatcttatgctctccctcccagggtatgaagaacaatattacaggaggggtgtacaccccctgcgatattgagagtcatatcatcctctttcgctctggatattaggaacaatatcacagggctgtgtacgccccctgcgatattgggagtaatatcatcctgtcgccctgaggagagaagccatttctctactgtctcttgtctctgaagaggaggaggaagtaaaactggaaaaacaacaggaatgaagtcggtggcaagaccagctggtggcaatgatgagccggcctgagatgaaaagattaacccccgcccccccactctaagcacatgtgctctgaatccatcacgaccctttcacgtggaaccccttagagttgtaagcccttaaacgggccaggaactctgtcttccttcagggagctgggctcttaagatgcgagtctgccgacgttcccggctgaacaaaaaacctctttcttcttgaatccgctgtctgagggacttggtcccctgcttctcctatttgatttcttggttccctgatcaggaatcgaatgcgggcagcagcagtgagagcgccaaatcccaaccactagaccaccaggggaacttagaaccttgtcagaactagattgcccaccattagaagtgggtcggccatcagaaggaagcctggacaggtcccttgtttctaaggtgtggcacaaggtaactggtaaaggatacctagaccagttcgtatacatagacacttggtgacggctggtgctagaccctcccacagtggctaagagggcaggcagcaacagtactagtagcaaagggacagatacctaaggaaggatcctgctccacccgcccagggaaatcaactcctgaagttctattccacccagcataagaagatgcattgcaggagatggcaccagtgatcctagtggtgccctccccttaccagggaaagaggctccccactcttgagcccacagtgcttgcacctccgcaagacaagcatatccctaggccaccgagagtagacaagagaggaggtgaggacttaggagaaacccctcccttggcagctcctttacaaccccaaatggggatccaaatgcccccgagagagcagcggtatactgggatagatgaggatggtcacgtagtggagaggcgcatttttgtgtaccagcccttcacctctgccaaccttctcgactggcaaaacaataccctgtcctatactgaaaagccacaagccctaattgatttgctcca

SEQ ID NO: 1030 - DNA, 1849 bp, Homo sapiens
cttgaccaagaatgttccaatatttgtttgcactatggcctaccccactgtgccttgccctctccatgtatttgagccaagatacagattgatgattcgaagaagtatacagactggaaccaaacagtttggcatgtgtgtcagtgatacacaaaataggttttcttttagttttgcagattatggttgtatgttacaaattagaaacgtgcatttcttaccggacggaaggtctgtggttgatacagttggaggaaagcggtttagggttttaaaaagaggaatgaaagatggatattgcactgccgacattgaatatctggaagatgttaaggttgagaatgaagatgagattaagaatctcagagagcttcatgatttggtttactctcaagcctgcagctggtttcagaatttaagagacagatttcgaagccaaattcttcagcatttcggatcaatgcccgagagggaggaaaaccttcaggcagcccctaatggacctgcatggtgttggtggcttcttgcagttctccctgtagacccacgataccagctgtcggttttgtcaatgaagtctttgaaagaacggttgaccaagatacagcatatactgacctatttttctagagaccaatctaagtaactaactctttggatctccctttaaagtgaccctaatctggctgcattgatggccagattgtctgctgcctttgcacatctagtgctggtttcagaaatttaatgaaacttttctttttccttcgacctcctgaatcatgtggttctgcaaatgaataccttcaactaggatttagaccactaagaacttgcacagaaaaacacgcattgaatgtgtgtcgaacctctacattgtgaagttgcactatgtaccatactctaaaatgaaataagaactctttatgtctgtgagagagtgtgtgtgtgtgtgtgcgtgcgtgtgtgcttgtgggggttgggtagtgtgtgtgtattttctctggctttaaaattttaaaacaaacaaacaaaaaagccatagagagcagaacttgccgagggtcatttattgcccaagtttacaagagtagcgatacaagtttttgcaaattgaatttgcctcagatatatctgtcctaatgcttatatttgcacaagtatgtaaaatatcgtgttgaggatcattctttgttggaaatactgctcttgctgaactgtcttgaccattgactatgacacagtttcttatttatgtaaatacttgcatcacagtggccgacaggcattggatgcagaacctagagccagttttcaggaacaattgtaaacctgacatggtactgtgcatctattcataaaacactcaaaactgtgaaaatatggtttacatttaattgtacataaaggtaaagggagaactcaattcagtaccagttagtttgtacattttagggggcttttcacattaactgcccatttgtgtaatttatagtttgacatgatgtgtttgttttaaaaaaaaatgcatagtataaacccattaaggatctgggaaaagagaagaagtttaatatagaactaagcttttaaagtttgtttttgtttttaattctggtctcggtgcaaatgttagttatgccttattcatatcacagttagatcaccatgctgcaacatggtttatattcatgctgccctagaaacttttgtaattatttgttgcaaatttgtgactgtccttattaactttcttttatgtaagtaatttgtaaaagtttcttaaaatttttgcttttgcttatttaattttgaataaaagctaaattcctaatactttttcttaaat

SEQ ID NO: 1031 - protein, 203 aa, Homo sapiens
MAYPTVPCPLHVFEPRYRLMIRRSIQTGTKQFGMCVSDTQNRFSFSFADYGCMLQIRNVHFLPDGRSVVDTVGGKRFRVLKRGMKDGYCTADIEYLEDVKVENEDEIKNLRELHDLVYSQACSWFQNLRDRFRSQILQHFGSMPEREENLQAAPNGPAWCWWLLAVLPVDPRYQLSVLSMKSLKERLTKIQHILTYFSRDQSK
